United States Patent Application Publication US 2013/0096032 A1 - sequence listing, part 40

SEQ ID NO: 1426 - DNA, 82207 bp, Arabidopsis thaliana
gtacatgaccgatggagtactactgagagagaccctcaaagattctgacctggataagtatcggtatgtatgctttaaccttacctctgatagatcatgctttgaactagataaatatcgttgctaactccttttttggactctgtatagtgtggtggtgatggatgaagcgcatgaaaggtcactcaacacagacgtcctttttggaatactgaaaaaagttgtggctcggcgtcgtgatttcaagctgatagtcacgtcagcaacccttaatgctcaaaagttttccaatttctttgggaggtaggttatcatcatccttcacataagaccaatttagaatctgaagaaggattttatatgacagtgtttttgctttggtaatgcagtgttcctatcttcaacattcctggaaggactttccctgtcaatattctctactctaaaactccttgtgaagactatgttgaagctgctgttaaacaggcaatgacgattcacataacaagcccacctggggacattctcatttttatgaccgggcaagatgagattgaggcagcgtgcttttcactaaaggagagaatggaacagctcgtatcatcttccagtagagaaataacgaacctactcattctcccaatatactctcagttacctgctgacttgcaagcaaagatattccagaaaccagaagatggagcccgtaaatgcattgttgccaccaatattgctgaaacatcattgacagtcgatggaatatattatgtgattgacactgggtatggaaagatgaaggttttcaatcctagaatgggtatggatgctcttcaagttttccccataagtcgtgcagcctctgatcagcgtgctggaagagctggaaggacagggccaggaacatgttacaggttgtatactgagagtgcttatttgaatgagatgttgccaagtcctgtgccagagattcagcggacgaatctgggtaatgttgtgttgttgttgaagtcattgaaaatagacaacttgctagattttgatttcatggatccacctccgcaagagaacatccttaactctatgtaccagctttgggtgttgggtgctctcaacaatgttggaggattaaccgacctggggtggaagatggtggagttcccattggatcctcctcttgcaaagatgcttttaatgggtgaacggcttgattgcatagatgaggttctgacgatcgtgtcaatgctttcagtaccttcagtgttcttcagacctaaagaaagagcagaagagagcgacgctgcaagggagaagttttttgtgccggaatcggatcatctgacgctgctgaacgtatatcagcagtggaaagagcatgactatagaggagactggtgcaatgaccattacctacaagtgaaaggtttgagaaaagctagagaggtaagatcccagcttctggatatcctcaagcaactgaaaattgaactcaggtcgtgtggaccggattgggatattgtgagaaaagccatctgttcagcgtatttccacaactcagctagattaaaaggtgttggggagtatgtgaactgcagaaccgggatgccttgccatttgcaccctagcagtgcactgtacggtctgggatacacaccggactatgtggtgtaccatgaactgatcttgaccacaaaggagtacatgcagtgtgcgacatcggttgagccgcattggctggctgagttagggcctatgttcttctcggtcaaggactcggatacatcgatgttggagcataaaaaaaagcagaaggaagagaaatcaggaatggaggaagagatggagaaactgagaagagatcaggtggagtcagagctgagaagcaaagagagagagagaaaaaaaagggcaaagcagcagcaacagatttcaggccctggcttgaaaaagggcaccactttcctcaggcctaagaagcttggactgtgacattgtaatgtaataaaaaacataccgaaaacgtcacccaaacaaaaaaaacggaaaaaacacagccaaaatggagcaaactgtaatcaccatgtatcgttgttcagatatttcttgatgtgaacaatattaaattgttccacgcttgtattgattctttataactaattagttagagatcctctacgtctctagtatagtaaagttacggtccaatttgtgttctctacaactctataataagcaaattactaatcaacagaaatagtcacaatccaaaatggtgtgtttccaccattgatgatttcagctgtttctcttcatagagcatctagattctcagaagatgggttccctcgagagttgatggcatgagtcgcgtctagtaatacacttttgagtctgctttgattgtgatgcagtgactaaaataccttgggagttcttatcaacttcaatacgagattttatttttctatcaaaaattaggaatactacaagatatcaatacttttgacttggttaatgtttttttttcttcttagaactgagatctccggatacttcgaacaaaagggttgatcttttcattaatgtttctaatagtttacattagtaatccttcatagtcgctgctacatctcatccttctagagagctgagttttgcccatcatcttgtcgtctctgaaacattctacatttatatcaagtcttatggattttacaatgcttaagaaccctaatttccaaatccagtttttggagttatgtggtacacaaatgtcatcaaatccccctcctaaacaaaatacattttgccatccatacaagtttccaaatctccctcatcaattcacattttgccaccaccatctacaacacctttttgcaactctaatgctccggctccatcatctgtgtttaagccaaaaatcaaagccacattataacttcaattcaacacacgcattgaacccaaagagcagaaggaagatgtggtgaacctgaggagatttagaaagcccctatcaaatattaccgctttctccatctgatatttcttcaagctttgcgatggcatccataagagctagttcatgatcctaccatttccaagtaaaactatatagtcagcatctcttttcatgatattttggagtaaacaactagattcaacaacacatgtatatagttcttactctcagcactctctttgccttctctacctctgctgggttggggttaactgacccaaaaactttttccacctgttacaaatattcataagattaacaactgtaaaacatttattcccatatcaaaaaaacttgaatgattacctcttttaacaatgtctcagtgtggagaatttcgatttcgcctaaagctttctttccgatgccattctgtgtcttaggttgctgcatcctcatgcttcccctacctctaccacccgcattgcttgcaggaccaccacgagccatggtttttgttccacggccttgcccaggatgtcctcctttacgagaaatcccaggatcttcaccttcccatctgatatctcccggagatatctatgatatatatatatataaagaacattcagaatcatatgtaaccaagtatccaagaatgagatgagctcttaaaacatacttttgagatgatatatatatatatatataaagaacattcagaattatatataatgtagaggatcgagcactaatcatacacttttgtcctctgccccttacagatggcaatcaagaaactgaaccattagatgagaaactaatggatgggtgagggcaactaacaattgtttttaacatcattcatgatccaacttgggtggcagcgaacaagtaaaactaatctctcacttctagtgtgcagaatcgaaatgaattgcagttggtataaaaactgacaagcctctcattgacgtgcaaggaatgtcgaatataaaccatcgagatcataaccaaatagaagaagacaaacaacacatggtctctccaaattttacgacatagcatcatcttctgtacaaatgtgaaagatatattagacaagtagaaaaactgaaatcataattacctctttaagatttacccattcccaggtttcattcgcagagttaatatcatacactaaagcatgacgcccctaatcaatgttgaaaaaaggaaataaatgatatcagaaaacggagatttggcactaaaacactaatatatagcaatgaaagataagatacctcaacagggttgtagtcagttataacagcttcgtagtattggttgtcatcaggccacttcgtccataccttccttccaaccaacgggtcatatgatcccgattcacctggttcatttgttaaagcgccagcctggggccttccagcaatgcctgtagatgggtactgcatcgacttcatcgagcacaaagaatgaaatattcttataccttagtcaatgaagaatataagaacaagattgacggtaccaacaattagaatcaagcagcatcatgacttactgtctttggcttcttggtctttggacctggtggaggacctccccttcttagtgcagatgacgatggttgcattgaagggtgcaaagaaggagatggtgggcccatcgctaatgaggcgattgattgtgatgtcttttgcttcttacgtgatcctgatacagccggactcggagcatcatgaaccagctgaggaacactagactgaaggctgtttgcctttctccattccctgacatgatttaaattaaccttgttggcttacttttgattgattgcagagatttatcagtgatcaattacatatacaacagaccttattcgcctgatcatttcatcagcgttaacccttgataacagctctctgtgttcctcatcagacactcgaagttcttttctgagttcagtgatcaaactttctttctcctgaatattttttttccagccgaaggaacaagaataaaaaaaggacaaaaggtaagcttgtgaagttacataaacatgtactaaactaatgaagaagacaagcaaaatagtacccaggtaatagcatcggactgggctttaaatgcgcggagtatcgagctataagcttcttgctcaatgagatgaatttgagtttccatttcattgtgcacccgtgataaaggagcagaattgagaactgaaggccttccattcccggtaggtctggcgtttctttgatatctaccttgatgagatggaggcaggtcatcatctgtacctgagttcccgcataaaaaaacatatcacaaaacacacggaaacaaatacggaagtaaaataaacttagagaaggaacgaatgcttctaactgaaaaagcacataagactcaccactactatcagaaggtcggtaatccatctgtgtactctcctgattattctttacagtgaacctaagaaatcaaaacgtgggatgtggcctgtctagttgcaccaaagcacgagctgcaagaccaagaaaacaacttcaaaggaggaaaaagccaaagcattcactcacatgcagagcatacgaagacgaaaagcaagaactttgaactttaaaccttgacacagaaaattaaactatccaaaacactggtcaaagttcttaaactcaagctaaacagacaaacatgttgccttctgcagattaaacaacagaaattgaatttctactaaacttgtgaaaaaattatttccaattaaagaacaacactttcctaaaccctaaaattcccgacgaaacctagcacatcaatgctagctttcaagatgaacaaaacttaaattgcgcagaaagaatgtaagatcgaaaagcaaaataccttctttggatctattctcgaaaaattcgaacagccatcgagaaaattactccctaaagatcatatagatttgagcgagaaagcagacaacacaaatctataaattagaagatccgaacaaaggacgattcttataggcaatctctcggctccaatccgaattcaccaacgttagatctccaggaagcagaaagaacgccgtggaattgaagaattacagaacaaatcgtgatgaattttccgagggatctatgagtcgcggacgtgaaacccacattattttgtgccctaattttttctcagttgataggttggtttgagttacacgaacgacggcaagttttgtcgtttcactctcatctttctatctcttttggttctgtcttaaacccgaacttcggtacactttcataccaacacttctgtttttgttttttttttgtttttaacatcatattttctgtgtaataattaatctcaaaaaagcatgttataattcagttttatttaccaacaagaatcgatttggctgcaaataaaaaagacaaaataataaataaaccgacattgtgaaaatgttctgaaccggaaaagtcaaagaatgtcggttcggtccaaaatcgaaaattaaacaagttccaatagaaaaatgtgaacaaagggaaaaaggaagaagaaatgttgttgcgtgtgtgttgtccgtcgtctttcttctacctccgaccgcttcatctcttcagttcaactgcgaaagttcctttttgtccctctcttcccagacaatttcgattaagcccttctcgatcttcttcctttcgtcggatggaatcttctccggcttcttcttcgtctccgacgccggtaaccgattcatctgctgattctttagcgaaagatctgcagaatcaaagtctgggagctgttgatgaaggtgttaagattaaaaagaagctcgaagattttaactgggaccattcctttgttaaggaattgcctggtgatcctagaaccgatgttatctcgcgtgaggtatcaatttttgtttcgatcttcaacggagataataggagcaatcttaattttgtttttttccttctctgtcaatactttgtttgtttttgtggtttattctcgaagcatgaagtagatatttatacttgttggtagagtggattatactcaggctaaagttttatttttggtacttattgctcattttaagactacaaaattgaaagccttatgtgtgaatttgtcatgtctctgtgtgctcattattgtcctctcattaagctatttaacttgagcatccggattttgatagtttattgtactgtgtaggtattacatgcttgctattcaaaagtttccccatcagtagaagtggatgatcctcagcttgtagcatggtctgtctctgttgcagagctattagatttggatcctaaagagtgagtttgattctctatggtcagactaaagtcttaagtgtttggtgcagaagataattgggttttcacggtcttagacagatatagcaagtattcgttataattgataccgttgtttccaattcaccttcatggttacattcttatgtttctcaaaagaagttgtttcatttctgtctttataatattgtgaaactcaagttttaagagtgttttatctttatatctgctgccatttcgaaactcttttttgtctttctgcttttgacttatggcaaaaattcttttttaactttcagatttgaaaggccagatttccctctcatgttgtccggcgctaaacctttaccaggagcgtatgtgttccttacccaagtcaaattttagtctcaaccttcttaaatccaaagtttctaatcgcagttattgatacttttttctacagaatgtcttatgctcaatgctatggaggacaccagtttggcatgtgggctggacaactaggggatggacgtgccattactctgggagaagttttgaactccaaaggtgaaagatgggaacttcagcttaaaggtgcgggtagaactccatatagccgttttgctgatggccttgcagtgctccgtagtagcatcagggagttcctttgcagtgaaactatgcattgtcttgggatccctaccacgcgtgccctttgtcttctcaccacaggtcaaaatgtcactcgcgacatgttttatgagtatgtccaaaacattccaaaccttgtctaattttttcctttattatgttcttcctctgtgtaaaaagttcatgtccccgccaaatataaagaaaattaggtttcataggattaggaactgcacatgcgcatgatctacatggaagtttttaatctactgaactaagcctctagtagagaaatttttgtctataaaattaggcttctaggtggttgactactcctattgtttggcattgtgcgtttgcagtggcaatccgaaggaagaacccggcgcaatcgtttgcagggtttctcagtcatttctacgctttgggtcataccaaatacatgcctctagaggaaaagaggatcttgatattgttcgtaagttggcagactatgccattaaacatcatttcccacatatagagagcatggatagaagcgatagcctatctttcaaaaccggtgatgaagatgattcggttgtggatctaacttccaacaagtatgcaggtaattccctaatgaagtatttgtcaaaatgctgcatgaaacgccactattttcatttgtatcacctattatacttttgttattgccagttgttacattaatggccaatattcgaactaactcttttgcttttttaattatattagcatggatcgttgaaattgctgagcgtacagctaccttagttgcaagatggcaaggtgtaggtttcacccatggtgtgctcaacactgacaatatgagcattttgggtcaaaccattgactatggcccatttggtttcttggatgcttttgatccaagttacaccccaaacacgacagatctcccaggaagaagatactgttttgcaaatcagcctgacatcggcttgtggaatattgctcaattttctaagactctggcggttgctcaactgataaatcaaaaggaggcgaattacgccatggagaggtaactttgtttgtccctattgatttggagcactattcttaattatattttaggaactaccaagtagttgagggactcgtgaatcgtgattcaggtacggtgataaattcatggatgagtatcaagccataatgtctaagaagcttggtcttaccaagtataacaaggaggtcattagcaaacttttgaacaatatgtctgttgataaagttgattacaccaacttcttccggcttcttgcaaatgtaaaagcaaatcccaacacacccgaaaatgagttattgaaacccttgaaagctgtgctcttggacatcggaaaggagagaaaagaagcatggatcaaatggatgagaagctatatacaagaggtatccaattcttttcttacatttttcccaaagtacccatcttcagttcttcttaaactatgattttactttccacaaagttcaattacactgtttatccctgtatctttctggttgatgcaactcctagctgtgtgtggatttgaatttgcaggtgggtggtagtgaggtatcagatgaagaaagaaaagcaagaatggattcagtgaacccaaagtacattctgaggaactatctgtgccaaagtgcaatagatgcagctgaacaaggcgatttctcagaagtcaacaatttgatccgtctaatgaaacgtccttatgaggaacagccggggatggagaaatatgctcggttgcctcctgcctgggcttacaggccaggcgtctgcatgctttcttgttcctcctagttcttctccttcctgcttttgttttgccatttatagaaaggaagagaaaaaagtaatactctcttatatgtgtattggctgtaatgctttaaagagacaagaaaaactttgctgttttcaggattttgtttttacattgaataaagatttgagtacatatagatttccatgagaagctcaacaaaagaacccaagagccaatatcattttatgcgattaaaaagattgttattacccgacaaaacttgatatggaataaacaggtgagagaccattggactaatcttctttcatattttatcatacaagactcaaatcgagtttagtaaaaaaactgaagtgagtggcaactacagaagctgatactaaattagcaacttccagaatgtagccttcaagcgccgaccttcggattatctgagggtcagctccaaacacaagctcctgagctcacatgctaagaacagagagaatcacacaacatagtcagctataaataacagatctaagagacagctaaaaacattttgtggcgtacctctcggtagcacgaggggtgatgggaaccacaccagaaggtgtcacaagggcatcgatcagaacatcattaggtgttacaggaatacttccatcctcaagaatttgaggcgagtatgacaatgcaactgcagtagggaaaagagaacagtgcttagattatattttctattgaaaacgttctgtagaattaatttgattgtggtctatacccataagtggatatctccaacccttctcctttgcacggtcctgatatctcttcaagaaagtgtcgtagtagcttttacccatatgagttatccatataaacaagtagaaaggagttagattagagcatgaaaacagcaatgggaattgctagtatgaaactacattctttggggatggcaagatttctgtgttatgacagaaggtaagagaagaagtgagactaagattgtgtaatcgctttacaaagtagtacaaccgcagaaactgcttaacaaaagcttcatattattaggtcagaccatgatggaaagaaaacttaaggtcaatggaaacttacccacctccacgacctaaacgtcgcccacatctgtcaaacgcaagacctgaccacaaagatttgaaaattaaagttgattagataaagagataaagtaaagttttggaaatgaatcagtttctccatacctggcaagatgaacaaatcgatcggttcatctgcttgcaacactgtcaatatagaaaaatggtttaaatttcaagaaggagagtttgaactcattacgtgaagcttataatggtagcaacatagaaaaaaagaacactaccatcttcacggtcattcccttgggcatcaacaggagctggttccaaaatgttcattgagtttgcaacaaggtcttccatatgagatatgtgcaacatgcgcatgttactgttcttatcctccacccaagggacatatagctttttctgagtatttgaatctaaacaagaacaaaattgcagagaaaactcatcagaaaacaaatgcaggacatatagctttttcatccatatgctacaataagtttctttagtttggttagttattggtttctcttggttccaaaacttatcagatccttctgtgatagagacacgagcaatttgcattgatcataatgagggatatgctattaaaccaagtgatcagtgagtacaatgtaaagcttccttttttattaatctcgtgaggatgaaattacaaagatagatgtacctggatgttgcagaatctcagagaggattttagaagtgtcgacttcattgagagatttgcagctaatgtaagcacacaatcccttacatgatttgaaccagggagcttcaagaacagtcttctgaattgcctcatctacaatcaaggcaacctgagattagtgttgttattgaaaacagaacaaaaaaaagaaaggacaaaaaaaagattgaaccttgttgggttcggagagaagggtccatggcttttagggatttgcggacagtggagcgcacgacccgcttctgcttgaaaatggaatcgagttcctcttggtttttgctggtggtgctcatggcgacgatgggtctagtagctggtgataatctgaaaacgggtcgggtcgggatcttggggaagaagaagattggtgatcttcgtagtgctgtcgtggtgatacaaaagacgcgagctccaatcattacaagttcccgttttttttttgttctttaagaagaaaaaaaaactgcagggaaattattccaaaccataaacgacaaaatgtgaacctaattgctaaaggattactaatagtttcataaaatgaagactaatgttgttaatccagtgtggaaaaggaatatatatgaacattagaacaggaatttagtaaaagtagcctaaacaatatcaatagtgtagtgtgtggctcatatatccaagcatgaaattgcaaaatgtgcaagcttcaaaagattgttctttctctaaacatgaaattgttgctaagttgtatgagagcattgctagcctgaaatgaccatgaaagtaaaaatgggaaatccataaactgcagatataattaatcttcctagaaaacatatttccttaacatatcaaaaaagcttgtgaacaagattttcttacaagtcacgaaacatgtgcttgccaaaatgtgattcataaaaatttacgactcctctctactgtatattctctcaagtaatgaactaaagtttgccaaccttaacttgtacatgtattgggcctttggttagattaaatggcttgaggttctgaactaatatttgcctatctaaattttgtagatatatttgcctcatgggtgaatgccaatagcaaggcgggtataggttgggtgttaactgaagctcaaggctcatagcttctcaagggctcttcctctatagagcccattgctacagctattgaagcgaaggctaaagccttaactgaagcagttctcaactatcattatgtgtttttttgtggcgattctagtatcatctacaaatatcttgagaaagtcatgacacaagaaatcgcgctacctggtaacaaagagatccataacttcctagaagaccttctagcattggtgccaaaagatttcagctttaaatgtattggcagagatcataatcatgtagctcatatattagcgaaaaatgctagaatgccggaaacaccatatataatctgctgggttaaccaaagcatgtagcaaactcttctaatattaataagatatttggccgtaaaaaagtgatatattgacatttggttagattaaatgggcttaggatctggtctaaagtttgcgctttattattctgattacctaaacaccaacgtttgtaacaaaatttactcattaacaattacagtaccagttcaaagagtctattcattgatagtttagtcgtgttcatctgctgattttgttaaacaattctctagatgacgacttaataagagaccaagctgatgtgttaacacatccaatttttgtggtaatcgaaaataattttaataataacacgttggattttaataaacaatttttctcgatcgtagatttatagtttaggcattttggattcacaattgaataagaacacgtattgagacaaatcaaatcaaaaaaccatttaaactgtttttcatatgtgacccttttgaacctttttttttaatgatcaggtataggccatacatccccctagcctggaaccataaaattttatatcaattaaactatttatatttgttgagctttcatttttgaacattgattttatatatttagtgttagaagagttattaatgttctcttatgttcttgtatcattggataatattagtattatgaaaatgacgtgatttaatgtgtataaattgttcactaatgagtaatgcataggtaagtatttttttattgccgagataaatattttttatgttgccaaataaacaataaattagatatcaaaatacaaaaaaagttagaacagagtttatagaaaaacttatacaaataagccaacctagttttactagattcaagctcaataaccacacaaagaatgagagtaatctcaacaacaagtggagaaggaacaagttcactattgaggtatagcgcaatgttaagttaatctaaggagaaaattattgcattggcaattaacatccatgtttattttgagaaatgcaactaattaccatttgttagattaaaattataagtagtaaatggctagggatttcatgataatccatgaataacaattgagtgcataatagtttttcaaatatttcacaaatttgaaatttcagaggaaataagatcttgattctcatatttgatttcgacattgcatcgaggttagttagacttcttttgaactaacaatgataagtagcttgtgaatcaatgaggcaaacgcaaaatcaacaattgggtaaactagaaatttgttttatatgaattctattaataaatttacaaaaacacgtaaaacaatctttgatatatttgcagatctaaattgaatatgtgatcattaaaatcaagatatctgaatccaaaacagtttttcgataaattaaaaattttaccatccgaaaactagattatatttataaaaaaatattcaatttgcgctgcaattggactggatatcaaaagaaaattttcaatttcaccatatgtgtatgattttttttttttttttttagcgtttttaactttttttttgtgttttaaagattactcaaatttgcgctccaagtggaacgagggcgctccaagtggaacgagggaacaaatttaattttgcctcctaaatgaaaaccaaattttaaagaagctacaaatacgctagaattcaggaatcaccatatgtaatctcctgggttaaccaaagcatgtagcaaactcttcttatattaataagatatttggccgtaaagaaaaaaagatatattgacctttggttagattaaatgggcttatggtttgatctaaagtttgcggtaatcacaaataactttaataataacacgttggattttaataaacaatttttctccatcgtagatttctaagtttctaatatagatcttttggattcaccattgaataagaacacatattcagacaaatcaaaccaaaaaccaattagactgttttttcatatgtgcctcttttgaaccttttttcttaaatgaacaagtctaggctatacatcccctaaccagggaccataaaattttatttcaattagactatttatcttgttgagctttcatttttgaacattgattttatatatttagtgttagaagagttactaatgttctcttatgtttttgtatcattggataatatcaatattatgaaagatgacgtgattgaatgtgtacaaattgtactaatgagtattgcctaagtaaactttttttttattgtcgatgtaagtattttttatattgacagataaacaacaaattaaatatcaaaataataaaaaatgttagaaaagagtttatagaaaaacttataccaataagtcaacctagcgttactagattcaagctcattagcaacataaagaatgggagcaatctcaacaacaagcgaaaaagaaacaagtccacttttgaggtaaaagaatttcataataatccatgaaaataacaattgaatacatcatagttttcaaatatttcgcaaatttgaaatttcagagcaaatttgaaacacacagcaacaacaaaaaaaagattttggttctcatatttgattttgacattacatcgaggttagttagacttcttttagactaacaatgataaataacttgtgaattaaatgcaagatcaacagttagatgaactagaaatttggcatgaaaccatcaaaaagagatacttaactatatcaataaaacgtgttgattacgttatcatctagtttatatgaattctattaataaattaacaaaacatggaaattttttttttgatatatttgtagatctatattgaatatgtgatcattaaaatcaagatatcccaatccaaaacaatttttggatgaattaaaaagttaattatccaaaagttagattatattttttagaaaatatattaaaatttgtgctaggacaatatatcaaaaataaaattttaatttcaccatatgtgtaggatttttatttttagtttagcctttttattagtgttttaatgagaaaataatttaaaaatctttttgaccaaaaataacaaaaaaaatggaagaaaataataaattccctctgagtggaaggagggaaatttggctcccaaatgaaaaactaaatttcaaaaccccgccaaataggctttggtattataaagaaaacgctctctccactcctgatgataatctcaaaatcgttcaaagcaccgctcaaattctccgtcaaatcttctactgcgccggtgatatcaaaccatccgccaatggagaaccatcccaagcgccagcgaacaacacgcctcgccgccagaaacttgaagcgaaaactcagtcacaacacagatggagcgccaatcgtcacacaacttattgatattgacgacgaacccatagatctcgtcgtcgcgattcgccgtcacgtcgaggttcttaactccagcttctcagatcctgattttgatcacgaagctgtcaaagaagctgctgctgatatcgccgatttggctaaaatcggtaccgtacttcttcattttacctctaatcggcggctaaaactgaaaacgtgttactctctttgcttgttcgtccttgagttgctcaattttgagtcaattctcgacaacggattcactctaattttggattctacatagaaattgttttgttcttgcccatagtactttgattttcagtaaggcgagacctagaagtgtttttttttggcttaattgattttctcatctgtttatatagatgaaaatgttgaaatcatcgtggaaaatggagcgatccctgctttggtgagatatctggaatcccctttggtagtttgtggcaatgttcccaaatcttgcgagcacaagctagagaaagattgtgctcttgctcttggacttattgctgcgattcaggtaacccttctttcgctgtttttgatgaaattgtggatgagatgttgtgtaatttcaatctctgttggaagttaacattagaatttttgaaatgggcgatttgcaactatcttagatgtacttagcttggattgatgtatattgatattagctttctctgttaaatagcctggttaccagcagcttattgtggatgctggagccatagttcccaccgtgaagttgttgaagagacgtggggaatgtggtgaatgcatgtttgctaatgctgttattaggagagccgctgatataattactaacattgctcatgacaatccaaggattaaaacaaatataaggtactaatatctcatgatccttactggttatggtgatgactagctgttttcacttgacaccttttaaaaatgctttacagggttgaaggtggcattgcaccacttgttgagcttctcaattttccggatgttaaagtacagagggctgcggcaggggccttgcgaacagtttcatttagaaacgacgagaacaagagtcaagtatgtttttactatgattatgttttgtttaggcttatgaaaggcatgattctcacataatgcgcaactatgtagattgtggagttgaatgctttacccacacttgtattgatgcttcaatcacaagattctaccgttcacggggaagcggttagttcttcatcttgctttagatcgttgcaattggtttgatttgttcagttctttctaatgtactatggactttcagattggggcaattggaaatcttgtccactcatctcctgacatcaagaaagaggttatccgtgctggtgccttacaaccagtaattggtctacttaggtatgcttattttactttctttctacttctgctggaacagatgctagctcttgaaattttgaattatgttttgtaactgtttttcatgatatctgctacagctccacttgtttggaaacacagagagaagcagcattattaataggtcaatttgctgcgcctgattcagattgcaaggtatgggattgtctctttcttgttgtactataatattagcacatgttatgttcactcaaactcgtttttttctacgatataactgaatggattctaactagagagaacatatttaacataactggcaacatgatcatgcaggtgcacattgcccagagaggtgccattacaccactgattaagatgcttgaatcatcagatgagcaggtcgtggaaatgtcagcttttgctcttggtcgtttggctcaggtatatatgtttttgaattagcatgtgaatgttttgttgcttttaatatctgactctttgtagatgattgttaaatcagaccttttgtgataaaacaaaaattgtatgttttgaatgttgcaggacgcacacaatcaagctggcattgcacatagaggaggcatcatctcactactaaatcttcttgatgtgaaaacggggtctgtgcaacacaatgctgcctttgctttgtatggccttgcagataacgaggtaaactcgactcgcaatgaatagtattatatgtagctatactctttgcttacttgacataccgtgagtacttaattaattttcccgtcaataggaaaacgtagcagatttcataaaggctggaggtattcaaaagcttcaagatgacaactttactgtccaagtatgcatttgactgcttatatttgcaaaaccaatctaataagaatttcaaactttaattgtaagtaatctatttgcagccgactagagattgtgtggttcggacattgaagaggctgcagaacaagattcacggacctgtgagtacctacttctgttagaacttctgggtctcaattatgttttgcgatgtttctaatcccctgatgtctcaaccttcttaggtactaaaccaattattgtacctaatgagaaccgctgagaagacagtacaaatacgaattgctctggctcttgcacatctttgtgaccctaaagatggaaaattaatctttattgataacaatggtaagcatctcatatattcagaatttcattttctaataaaattttctgtggttttttgtttctgatctattgaagtattacttatgcaggagtagagtttttgttggaacttctctatttctcaagcaataagcagcagagatatagttcaagtgctttatacgagttagctaaaaaagctacatcctttgcaccagaggattcagctccttgttcacccacacaacaggtaaaaaaatctccatttcttctttcaagcatcaaataatttgtgatttgaggtcttgacttgttgttattgattattatactgaaggtgtttctgggtgaaaaattcgtgaacaaccccactatgtccgatgtcacattcctaattgatggtataacatttaaccccatttatgattctatagaatccaccggtgagaacattctttaatgagtatatccatgtcctatgttaggtaaacaattctatgcacacaagattggcttggtagcttcctctgatatatttcgtgcaatgtttgatggtctttacaaggtaagctactgaatcacgattgtggtaacttatctcatcagaatatcatctaactaactttgagaactggatataggaacgcaatgctcaaaatgtggagataccaaatataagatgggaagtgtttgagcttatgatgaagttcatttactcaggaagaattaacatcgccaaacatttggcaaaagatctgcttgtagcagctgatcaatatcttctcgaaggtctcaaacgtcaatgtgaatacaccattgcacaggtaacaaacgtaaaaccaaggtcttaatttttctgcacagaaggactaatctctcttgtgtgtttttaataagatggactttacttgtgcaggaaatctgtctggataacataccagagatgtatgagttagcagatacattcaatgcttcagccttaagaagagcttgcacgctctttgttcttgagcatttcactaagctcagctctcaattatggtatgcaaaatcattacatcgttataatttttttgggaaatttaacttctatttcactcatcaagtttcgattgatttacctaatgcaggtttgcaaagtttgtcaagcaaattatacctgaaattcggagttacatgactgatattctcacacggccggtcgaagctagtcccccaaccgtcgtataaaacatataggattccggtttgaagtagttgatttactttacttaggtaaaattgtttttcttttgataaccggtctgtattttgttactgctatatctctaatataaactgcttaactcaataataccaaagaggctctcaaacatagcttataaaatgactttttttacaaatggctgagaacatcagactacaaaatacaaatggtcgagaaaacatggctctaaagcggcatagaaagttgcttaggaaaaatcaaactcaaaatgtgtaacattaactgcaacatgaatacttcttgttaccttcagatcttgaatgccttgaaacagtaacacaaatgtctggtttttgtcccttgtgttgaaaatgtttgaaccaaacttaacaaaaaccacattggacatccatgcttttgcctaatcctttttttgctgcatgcatttgcataatttgcataatctaagaaaattagtataattactatgtatataagaaaatgagaaaaacatttaaggaaaaaaagtcacagagtatgacaataaattatgagtttttcaacacaattaaagcccaataatgaatgaggtctctgaatagggcttaataaaggcccaaaaactagtgccgtctacgagagagactgagagagagaaacatcgtggttcgtaaacataagccgcaagtctctctctataaacaccgccattgattagcttcctctctatttttactctcgtcacgtcctccacttttgggtcattattacttctcgaagctcaccaagatcttgaatttgccgacctctcaaggtacttctctcctcccaatttccacaatctcctttaaatctcgattagcaatcgagtcaactgttaaattacgtttctttgttcttctgtttccttcaattttgttagcacagtaccaaaaactgccattcttctttcgtgtttcttaagtgcgttttgattcacgccgatgtcggaatcgttgaagaatattcccgaatttgaaattagaatttccgtaattagatcaattttatttacgaaatcaatgtttaaattctccaaattgttagtgttcttcgtctttgtttgttgaaatttatcaatcctcatagctaaaaacaatgttttgcagaccaaatcatgtggttagatccttatctgagaaatcttttatttgttgtagtaaaatatctcgtttacactttcacctattcacacaaaacattcatgatttgggtttagattcttgatggtaaaagcatacagacaagagcatgtttacaagcatccgtgggagcgggtgagtgctgcttcatggaggaagtttgcagaccctgaaaacaaacgcatcctttctcacatccttgaagtcgataccttgaacaggaaactcgacactgagaccgggaaactccacaccacgcgtgctctcaccatccatgctcctggtccatggtttctccataggatcattggtcaggacatctgtcactgtgttgaatcaacagttgtagatggcaaatcacgttctatgcaggtatcatcggcttttctctatgctctgattgggatagagtatttattagtagatacaaggcgtaaacaaccgttgatgagtgattagattagcttatatagcaaccaaggatttgttctagtaagaagttgcctaatttgtaagataaggaacttgttttagtttgctgtgatctgtttcattggaacttgattagcatgccatgaagtatctcttagtagttggaagtcataaacaacaatccatagatgagtgtttggattagctaagatgtctcaactatttcgttttccagctaacaacaaagaacattagtctcaaaaagttcattgaagtggaggagaggataagatatgatccgcatccagataatccatcagcctggactgtttgtagccaggagacaagcattcggatcaaacccttgtcggctctggcctcaatggctgagaaggttgaacagaagtgcgcagagaaattcatgcagaatagcgctaaaggaagagaggttatggagaggatttgtaagtatatggaagcagaatccgctcggatctaaagatcaaaacttcttagattccagtatcttcttggtttgtgattcttgaatgttttgtaagtcaagagagctacgtttttggagcatggttataataagtttatgaaacagtttagatcaaattggtgtttgtttcagtaactcctgttttgtgttagcaactgaaagttgaattgtgaagcttttatccaaatttttgaatccaaatccaaacggtttgcatcttgatattgataataaagatttcaggctcaattacatacatttacacgaagatggttggttacatgcaaaaaagacactggattactcaagaactgatgcgacggtgctgaagaacaatgactctcttgtcactgtttcaagagcatcattgctgatagcagaattaactagcaaaatgggtttattttgttactgatttaattttaagaattgtaaagtcattttctccgttgatattttttactttcttgtcacttacctagctaactttcagattcccatacctcatgtagttttcttacaactttcggtgggtagttagagactatgacatatcttattaacgcctaaccattagtattactatttatcagataaccgtaataatatgtttagcaacagttgtttgaaatttaatatgtgcattatatgctgctatcagtaatagactacactcaatttttgaaatttttattaaaaattattaggatacaaacttcagctgatcatcagatcatgcatggtttttcttttcaacacacgtaaaatgtaacattctaatttttgtaaataatttacaacatgagctctaagaattataggctctaaaataaggtataaaagattttgagagaattaactagaaagaagagtagatttgcatttgagtgagaatatgctcgaagttttcggtggatttctcgatgggatgcgaatgcactccttcgtaggttgtcacgaccacttcttggtccactgttaatctttgcacttgcttcttcacattgcatcctccatatgtacacctatagtaactcctgcacatttatatatataaaccattagttatatttcaaaacacttcacttctctatatgcaaataactgtttttgaatctcttagaagagtaattaactgtcacatatatgttcccgaatccaaattataagaagaaaaatgtctaccaaaagactttcatttttaatcgctgattgttagctacatagactagaaaaaaaaaaaatcaatatccatatccatatcccaatcaattagtaaagatcaatctagaataaaatgtgaataggatatacatatattcatcgagtcttttagaagagtaattaatcatcaaatttcttcacaaaagcacatttctatgatttgttgaccaaaagtgtatttatattaaatattgattaattattagatagagaaacaaatagatcatgtatctcggctagctatagaagatgaaaacgataaattaatcaaaacacatattgcagaatagttaagatcaatctagggccgatgtgaatgatacatatacacattaattggagattgattcgaattggctaaagcatatatatgcatgtctaactcttaactctttctttatatgttcgataaaatatatagcaattgtaagcaatgaataaataagaagggagaattgaagaagaacctagggaacttgttgttcttgacggccttttggccatatttcctccatcgataaccatcatcaagaatatccacttggctccttgtttgaaacgcatacctttgtttcttccccttctttttcgacgactccacgcttttcgaacaaccttctgatctaacctttgagctctcttcttcgccttgatgcagctctggtttcgaatgagatttcaacgacaaaaaaggagcatacaacgacccattatcatatccctccatattcctaattatttgtggaatcttgattataacaacgagacagaccgatccacctgaattccaaaagaagaagaattttgttcctctctttttgtttgataattgattggagtttgttaagatatctttgtgaaaacataataaagtttagtctaaaatatatagacatatttatggtagactatgaagtcaaagacgaagaggcggccctctgctaatcgttaaagaggggtagtgtcgtagacgacacgtaaggattaaacattttacataattacatttgtaagataatgttttatgtacccctaatcttatttcttaaaagatataggcaattttctcaagatagtttactgagttttcacgagtaataatcaattaaatgtatatatatatggataaggatcagatctacacaagaatgtatgctattgagagtgctttgaaactgcgcattaataaagattttgtaatagatattgcaaattaggaaggaaagacttattggtgatctgacgtaagaatcaattactcactctgcttttcgcgattcattgaagtagaataaccaaaaaaacgatgcatgcaccgacgtagaacacagaattttggattgtggaagattattacgaacggacgaatgatctctccaatgacgtcgtgtacgtgttacgtttttcttttatccgaacgtcatatgaggtttacgtttttttttttgtcgaacgtcatcattttatccgtgcatataataaatgcatacttctttgaattgatcaatcaaagtcttcaatgtttgaatccacacatataaaattgttagattggctcttaaacacactacaagtcgttttcgatatttgtatatacaaatacgagtttatccttggaccatctaatttattgactatttacacacgtggaaaaaagagaagtagtttgaatctgttcttcgttccattgctttctaaaacaaagaataaagatgttgatgtcgttgtggtgagatacggttataacttaatataataccgattccatgatgaataaatacagtttttgatggttttattgaataaataccaagatataactaatgacgtatatcgacacaattgacagagagatcataaacatgatcaccacagacgcaaacgattccgcaacttttttggccaaagattcaaaacaataggcccttactcagtaaagctaaactcttttaatttttataatgataacaacattcatagcaaaaaaaaaaaagcttaggacgagtatattgctacttttttcttcttcattggcttaatgagaagtaaagtacttttcatggtttgttttcggacgtcagtgtatattcattcgtatgtagttgaggaattttggtcaaactttaagtccttgtagaaggtaaacaaagaggcgcaaacgtgtttgatgattattcttccgaggtttgaagttgaaaccatttaccaattattaatcaatttcaattaggaaaacaaaagtagctcaccatttactgttgttagtccatgtttgattgaccattcaaaagcacaaagtaaaaagaaaaggttggacaattatcaaagagatcaaatgtttgaatattatataacccctaagaaaattcttggaagacgcacgtgttcttttgcaatctcactttttttctttcacatctcgcagcctctatatctttttggaaaagaacattaatgaaaaaagtactcaagggatgggtgctaaaaaaaaagggttgggtgctttgtaagatttgggcctgttatgtgggccaatatttgttgttaggctcaacaagcctttggcagttaagtacaagtttatttcttgttttgggttgagaatcagagtttttggtgagtgatttaagaactaagtcaaggtttgtgacaattgacaaagtaagaacagatttgattggtaaaacaggtagctttgggcccaacaacaacaagaaactgattaaagttttgttcaagccttggttaaatttggcaattttggtttcctatataaacgtaaccaaatgttttgttgctttacgttgtaacacggtagtagaaacagaactttgatttcatcttcttcatttctggagtcgtaaaaataaataaatgataaagcagttacaacgtaactattactaatgaaaccacataaaccagttaacaacacatctatctataaatggatagataaatagaagaatgagacacactctctcactatgagatgaggatggcttaatcacaaggcaaatatttgttggcccactcttcgaaacagtctacctaatccacaaactttgttcctaagctaaaaaaaacactcaaataaaaaaatctcaaattcggtgtacagcgcctagaaagagtagagtctcaccaccaaacacaaaaattgcaagtcaaaagaacttgaaaatgcaaaacatcaactacattgcaaatctttcatgtatatccgcagaaatagttttggccaacagaacaataatcacacattgttagagaatttcataaagagaaatggtggctaaaagagctgcattttttcaaccaagaatattaaacataaccccaaagtagtcatgtatttttcgagaatagaagaacaaaatgaaagcaaaagatgagattatttttcctgaaaacagcaacaacaaaaaaattaaaaaaagcataacttttttccggtcgatgcttttacgcgttcggattccaaagcctccaaaaattggaatggaacaaacccaacacgtccggtaataccttcctcgccaaccctttgtgtcccgtcacattactcgccgccgccggaaaaaccaccaccgtcgattcttcttcttgtccatcttcttcaacaacaatctcatcctccggttctccttctgccacctcagcttcactcaatctaactggtgacgacacgtggctactctcggaaacagtggtctcgttcattggctccacgacgggtttagaatccttatcaccattatccgtgacccgaagagccggtttactatccgaatcagtgacccgacgacccggtttctctttcttcttacctctcttagatttgctccgagaagcagagttttcttcaccgtgatgattctcgaaagcttcgatgatttcatggataagctcacgattcggcgaagaatcccaacgaaaccagtagttagtgtaacaatcgaaacactcacaatcgaaaactggtggcttgtgatttttgctagatttgttgctcttcttcttcgtcttattctttgaagaagagtttcctctatcggaaatggtggttcctcttgtgattaagtaagcaagaacctctctttcttcagaggagagaacagaaacaagaaccaaaatcgtcgctggaagaagcttcaacacagagagagaatcatcatcttcttcgttgagatggttcgaagaagaagaagatgatgaagattgaggaggaggaggaggagatggataaacttttcctttcttcttcattttcatggtttttcttgggagagacgatgatgatgaagaacagttttttttttcttttttctatgcctttaccaatgtcagtggagagaagatttatttattttattttttagataagtgaagacataaaataattatttaagaaatttggactccaattatacggcccacctttattttttctttctataaaccaatttatgtaagttcttgcttttttctttccatacttttttttgtgtgtttcgtcgtattctttggatacgactgaaaaataaagataaaacttaccacatttatgtgtttttttcttaatacaactgtttattcgttcatgtatatacagaaatttactatttttatgtacactttatacacgagttgatttgaaaattttaattgtatataagaaaggttggtaaaataatttataaactcagcattatttgttattttttcatgaatttaatgcaaactagtgtttatgaatgtatacaaatgtgaacaagtcaagttgcggatactctggcatagtgaatttgtcttatcaatctttatcactgtttatagaaaatgtcttacagaggaataaatgttgttacagtaaataatttattgaagctattcatatgttaaacgaaatagaggaggtcgtttccaattttttttaatacattttgggatctttattattttcaagaagaatgtgttaaatacttaaacacgtactattgattacacatatcttctgtttttgtttgttatctcggtcatcaatcatagtgtctgcataagtgcatatgatatgagagaccattgaacattttttgctaataggttcttaatttcttagcagcaaatctattaaaaaatttaagctttaccttaccaagattccaaatcattcattcagagctgctcctaatgattagcttgtcttctcaaagatgctctttatcctttttgagattcggatggatttgagtacagtatttaatatatgtacctgggctattggggcataaaaataggcccatgtatatatgggctttcaatattaaaacccatctttactctgatcacatatccaatagaaattttgtaaaacttaaatgtgactgggcataaatttggcattggccttcaactatagggaacctaagatcttcactgacgacatccatcaactcagtcatatttctacaacattataagtccattacaacattctcaactcggaaataaatgctcttttggctttcataatcgatcttgccatctaaaacaatcggattcactaaactattttcgattaaaagagccacttcaaaacttggatatgaaatacacatgaaaaatatttagttgctactacttcaattcgatattttgtacaagattaaaaacaaagacaaaaaaaacagttctcattttatttcatttgatgtatacattattaggagttttatccctatattataacattaactctggatctttattctacaacttcttgtccttaaggttattcaaccaattttttttttttcatcaggttattcaaccaatttttaacactcgaataggctaaaaaggggaagaccaaaagatttcctttttactagccgttataggtaaaaaataccgttcccgtactttaacgcgcgattcacgacgttattcacgccgtccaagacaaatcagcacatgtggcgcagctcgccccatccctgacacaactcatacgtgtgagcgagctctctcattggtccaatccgttactaaaagctgatgtgtctctctataattggcaatctaccaaaaaggagtcaccatgtgcacgttagagtatgatgcgccagctaataaaacgacaggatttagttttaaaaaattaagaattagggttaatgtttttgagtggcgtggtccaccggaacacggtcaagcctcagccattcgttagtcagagcgggttaaaagaagccatttaggtaacgccacgtgttattctttcctctcccgcgtttagtctccttagatctgaccgttaacttcaacagtcgtgttctctcacctcccatatctagccgttgagcccataactgtacatttctctctctctcctcttctctgtttctctctcttcttcttgcagttttggtttggaagaaagagaacgaagaagacgacatctccagagtttttggcaataatcttttaagaaatgggaaagcttttgtgtgattcaacggcgacatttcaatctccttcaccaacggttccttggagagaaccttctacagtcgccgtgtctctcgaagatgtagatcttgttgaccaatccgcggctgctgcggcggtggacgcggttgagaagacaatggccgccgcaactaccaccgcttgggatgaggtttttggattggaggaggcgcaaagacggcatctgagccggctacacgcgagaggtgtgttgtggaaacatcctggtaaagatgaatcctctgcttccgtcgttttccgtctctctcacggcggagaggtttcttccgacgggaactgtttgttcaccgcttctcagaaggctatggaggcgcgtgggatcgacgcgcgagatttacggcggcggacggtgaggaggtttttggaggatttcagatctgctagcgaggaagagaaggaggttattacggatgcgattaggcatatgtattcgccggatctgaagagtggttgggggattcatattgtccaggaagagaagttgttggcgaaaaaagatgaacgtgagagtcttgattccgccattgaagagcttttacagattgggatgcataggtacttttgctaactatggactcagatctggtatcgaccttgatgttttgtttttatgattaggggaaataggaagcaaaatgtagcattattgttcttcttgttatgattaagaaagatataatcttgaggtgacattgtgttctataatttctagggtttgtaatgtttattgattacttttcttcattgcagagaaactgctgcagagtcaatctatagagagaggtgtcttccggtgaatgatggacttagttggtctaagtacatgtcgatttcaggctcaacagaggatgagtatgatatcattaccttgcagtatacggaagatgggttgttatctgtagatgagaaccgagaaggacgtgcagctgcgtttggggatgacatagcaatcgagtgtctagccactgagttcaaacgagaaatctatgtggtgagtagttatctgatgtaacaagtttgttactttggttgtgtttttttttcccaaatgacatctaagtaaagttgtgaaatgttggtgttataggtgcaagcgcatggatcagatgggatggtagaggaagagaactgtgtgttctttcttcctcacaaaccaagaagtgaagttcttgaagtcccagtctttctattcatgaaaggcactggtaaataactaaacaccatttgataaaaagtcttcaaatctatctcatatttttggacttggtaattactaaactcatctcactggttcaggttggtgtggtggtggagcagaccattacgagcccttgatagcgaatccatctcctctgatatctcatgagaaagtcgccctcgttctctgaattttggagcttcttcaaaatcacagtttttggtagttttttgttattgtattggtagagagaatcaatcatgttagggaggagagagagatgaaattcgctcaggttattattagcctgcgagtttgagctgttttttttatcaattgttgtagtttgagaagaagagtatttgattttttgttcgttattggggatgaaaacgggaaattctctttgtctgtttcagagttgtggctgtaatgtaaaagagtgtaaactcataagttttgtttgaaatgaaaagttctcagaacagagcaaaatcttcagcttccaactaaatttgcatcaaccataatgatcatctacgaaagtagctaaatagagaaagaaagaaagcatctttgagaaaacgtatattcggagatgtctctgttatgaaaaaaaaagaaagagaaagagaaagcaaaaaggtccacttgaggtattggttgaattgaatattatttttgtgtgcagacgggcttcacgtagccataccagcacaccagtgagcattttaatttagacaacaaaagacttaacctttgggagatctcaaaaggttctcttatttgcagtatcgccccttaaatcctttttcgatgtttcttatgttcatcattattttttaactaaaaatctcatctttagacaacaattcaatttgccatctctctgttgtatctttgacgatggcggctttgtcttcctccgtcaccacccgatcatatcattccggttatttggcttctttctcaccggttaacggtgaccgacatcgatcactctcgttcctgtctgcttctcctcaaggattgaatcctcttgacctctgtgttagattccagaggaagtctggtcgtgcttctgtctttatgcaagatggttagtttcattctatctttgttttccggattagaattgaccaaatctaaaaccaagcttatttattaactgcacttgaatctctgaatacaatttcattaggcaattaggtgtctatgtgaattaaatgtgatattgatatcagtagaagaggggttgttctgacatttggattgggtgttaggtgcaatagtcactaattcaaattcatcagagagtaaaacttctcttaagggattgaaagatgaggtgctatcagctttatctcaagaagcagccaaggttggagtagaatctgatggtcaaagccagtcaacagttagtattacggtggttggagcctctggtgatcttgctaagaagaagattttcccggctcttttcgccctttactatgaaggttgtctccctgaggtattgccaagaagatggttttcttctctatgatttgctattttgatcgcctgtgtgtgtgttttgcacattaaagtctagtgattgacaatttgattttgttgtgtggcagcattttacaatatttggatattctaggagtaagatgacagatgttgaacttagaaacatggtcagcaaaaccctcacttgcagaattgataagaggttagcaattgtagctactgaaaagtttccggtttttgtttgtcaagacaagtctttatgcttcaattcagttggatatgggtttttgaagataattaactctgagtattatgtcattgttccatttggatttcagggcaaactgtggtgaaaagatggaagaatttctcaagagatgtttttaccattctggtcagtatgattctcaggaacattttactgaattggataagaagctcaaggaacatgaggtattgaacatttgttctcttcaaatcagtaaactagaaaattggagtctacttcttttacatagtggttcttatcctttgtatttctgtaggctggaagaatctcaaaccgcctcttttatttgtctatccctccaaatatatttgtagatgctgtgaaatgtgcaagcacttctgcttcatctgtcaatggatggactagggttatcgtcgagaaaccttttggtcgagattctgaaacctcggctgctttaacgaaatccctcaagcagtatttggaggaagatcaaatttttaggtgaaagataaatgcacttatagctttgttttgttgcaatgataatactattggatgcttggctgatatgatattttgttgcaatgatgatactattggttgcttggctgatatgataatgaaaatgtgttcttacaggatagaccattacctaggaaaggagctagtcgagaacttatctgttcttcgattctcaaaccttatatttgagccgctatggtcaaggcagtacataaggaacgtgcaatttatattttctgaggatttcggcactgaaggacgtggagggtaaagtgcctgtttaccattatctagctattcatgtctcttctgtattgaaagcttatgtttccttcctgttctcttttgcttaattcaggtactttgacaattacggaataataagagatataatgcagaatcatctgcttcaaatcttagccctctttgccatggaaacgcctgttagtttggatgcagaggatatcagaaatgaaaaggtatgataatttctttcactttgcaatttgggtttgattcaagaaaacatataatgaaagtctcatgcacaattcaggttaaggtgttacgttcaatgaggccaattcgagttgaagatgtggtaataggacaatacaagagccacacaaagggaggagtcacatatcctgcctacaccgatgataaaactgtaccaaaaggtagtctgactccaacatttgcagctgctgctcttttcatcgacaatgcaagatgggacggtgtgccctttttaatgaaagcgggcaaagcactacacaccaggaggtaggtacctagaacttcgcacttgtggaattttgtatattgactcttactgataagtaaaattacagtgcagagataagggtgcagttcaggcatgttccggggaatttgtataaccggaatactggttctgatcttgatcaagctacaaatgagcttgtgatccgtgtccaaccagatgaagcaatctatttgaaaatcaacaacaaggtccctggtttaggaatgagattagatcgcagtaacttgaatcttctatactcagcaaggtattcaaaggagataccagatgcatatgagaggcttctgttagatgcaatagaaggagaaagaagattgttcataagaagtgacgagcttgatgcagcttggtcgctattcactccattgcttaaagagattgaagagaagaagagaatccctgagtactatccttatggtagccgtggtcctgttggtgctcattatctagctgctaaacacaaggtgcaatggggtgacgtcagtattgaccagtaaaacattttcttgtttgtattctcttttttttacattgataatagatttatctaggattcaagctttttctacgcctctttttacagctttaatttgtgcaatttggttatgtaccatttaataaataaataaaccaaaggggtttctcttattctctacaaggaaaatgtcttctttttatggtgtgctcttctagtattcagagatatcttgtatctagaaaaggttgaccaaaaagaaagaacactaaaatacaaacatgtgataggtacaagtaattatattgttcattaatctgaaagcagactttatatacaaattgatcggatacatgttcaacaagtccgctgtagcacacatgccaatttcacaacagaatttgaaatccgggctcaaacctcggcagcgtaatactttttggttcaattagttagttttcaataagatatcagactttaaatacaaatcactcatatacaaaaccaaaaagtccgctgtagcacacaggccaatttcactactcaatatgaaatccgggatcaaaccccggcagcggaatacttattattttaattagtattgttttcaataagatatcagactttaaaaacaaatccctcgtatataaatcaaacaagtccgctgtagcacacaggccaatttcactactcaaaatgaaatccgggatcaaatccgggcagcggaatattttttgtttcaattgttgttcttacttttttatgaagagatcggactttaaatacaaattgctcgtataccaaaccaacaaatccgctgtattacacagaccaatttcacaactgcatcgactactcttgaatcttcagattttgtatcttagtaatgcaactgaaccgctataacacaatggttaatttcgaaacaaaccaatgaaatgaaatatgagttcaacacccggcagcggaatactatttctttcttaaatttttggaagaaggggatacaaatccattacacaaaagaaagggttgtaaaatgcaaaaacaagctccatctcatgtctacaagattttggttaaatgatcttacttttaagcttcagacattggaagttgaccacagtctgctatcaccactttctttctgggacggtctcctctgtctgtctcttgttcctctatcagcttcaccacttccattccttctattacttgcccgaacaccacatgtcttccgtccaaccatgacgtctgtccacatcgttatcgcatattaatttgatatacactaaatttcccaacaaagcttggatggttcttcgtttccaatttcaaaactctactctttaggttatattattggattctatatactgtaatacctgtgttctttattgttgatgctcgcttgcctacgtataacttctaatttaacaataggccttaaccagagggagattttaccttaatagtgcagataaagaactgacttccatttgtattagggccagcatttgccatacttagaactcctggtccgacatgggatactgcagcgtatagcacattattactttcatgaattttataaaactgaaggtttggtatatattatactcagctcagctaaaaagagaatgcagaaatgtttagttaaaatgcattaccactgataaatatgaatgctaaagcacagctggggagaatgaagaagaaggaaacaagtgaaaaaggatagacttacacttgaaattctcatccttgaatgtacggccatatacacttttacctccagttccctgctcaacaattagacttctgtatcattattatggaattctcctagcagttactagaagaatcttcggtaactgagatgggcagaaacagaaaataacaatatatttctaccgagctacagctagttgcatacccacgaaccagtatataagttccctacagcccaggtattatctatatagaaaagaacaaaagtctaagattaacaggggttgttcttctaaagccactgatctacaaatcagagagccagctatcagaaagattgtctgtagaaagctctccaaaggtcaggctttttcctattaatgtacccaaacatgtgctttcaagagcgactctaaatccgtacaagtaagaacttaagcatccttccttatcgagaaagatttgacttatactatgtaccacatccaagaaattaataaacatcctgccatcctgatatgagacagcttactttactttgtgatttggcagaaaataagatgaaccaaagtaaatcaaaagaaacataatatggaccgcaagtcagctaacaagaaactggtgctgccaaggaattcagccagaaaaactcacattgcccttctcaaagtctcctccctgaatcatgaaatctctgatgacacgatggaatgtagaacccttgtagccaaatcccttttcacctgtgcatagagcacgaaagttctccacagtttggggaacatcatcaccatacaatccaataacaatcctcccagctaacttccccactggattgccaacacttatatcgaaatacaccttgtgtgttattttcgattgcggttcagtaaccacctggaatacaaaatccacatcatattatgattccatagcttttagtaaatctaatggaaaaaaaaaactaagagtaagctgaataaaacaaccaattccatcaaatgacatcagtgactaacaagatatgagagaatccctaacctcagcattggattgaacagagaaacagcggtggtttcttttggtataagacgtgtgaaggaggagcgatgaggcggagaagggagttgaagacgagaacgagattgaatcgaaggaagatttggtgcgcaatcggaaagaggtagatgtgaaagcggaggtattgatcggagaaagtcttcgtggaggagctgagagcgacttcggatttgactatgatgataaccgaaaattagagcaggagaagcagaagaagcggaaaggtaaaacaaaatcaaaagtacaaaagggaaaaattaaacgcaccagagtcatcgacaaggtcgccattggagctcaaaactcttgctcgcgtttgttggcaaaaatggtaggtgaaggtgaaggtgacgatgagcgagtgatagcacgaaagagtctgagaaatacattccatggttatttacagttatgcccctgccggttacgtggcttcgcatcgagtcaattttgagtgggtcaggtcagccgatcctatgaagcatatttacctgtgcaaagtgcaaacaaagaaaaactcatcgtatcaaaatgacactaatctcataaactaaaatacaaacctactataagaaaatagtgtgttcactatttctgatatttatttaatataagaaaataaaaccataaatacaaatcaaaaatattttttcaaaacaaaatatgcatcgcgcggaaattaaccgagtcatataaaaaaattataaattaatacagttataagattatatgttgtcattcattacggaaatagaaggtagagttgatcttgggctcaagcaagtaaaaggcatcaacaatatttatatagtagtaaacgacatcaatttttttgtaccatgtataatttaacggttaaacgaaatatagttcagtgttaattccgtataacatgaattggtaacatgctcaattctcaagactgattatttgcaatttttttaaaaaaattgggctttaagctttttaaaaaaaatctaacttcatgttttaatccatattattgatacaaattttctcttaaaattagtatttatatggtaaaattttgaaaacatattggaaatttcttagaagttacaaaagtttagtgacaatatgacgaaatttttcgatgaacagttctaaaaaacaacaaaattgtgtaaatctaaagaatatttatttcaaaaagggagaaaaagagggaatgtcatttgttactaaacaaaatgtaataaagttatagtagagaggctttagagcaagttaaaactaattaaaccttgtatctgagaccaactccaacggcagcctctaaggggcttttgagggttggtcccttgaattatatagcccaaaataaattagaaatcagtttaattgagagggttgtttctctcttacggtatttttcaaacaacaaagggaccctacatggcaaacttctattggtggagagggaagagaaggaaaaatatgacccaatttttttcttttcatttcggttgaattgttttcatttcgttatttccatttacgatggcgatgtcaatgttgatgaaagatgatatgtgtcgagctcctcatcatagggcgtaataatcaaatcaaagactaaattgaaaaaaatcgtttggtgcatctaaattcatactaccagaatcaaccatctcttcacaagttattttaactactctacagatatgtcttcaaatctcggtaattttatggtctctcgtgctcgagttcgtgatcgggctatgcatcaacaattgaaaggtgatttggttgagcatatataacacaaatttggtgggaatcaaactaactactaattgttattccgattctcaatattcatttcttgtaggtttaaaattttagtatttgtattaattattaaattttataaaatagaatatttataattttcattttaataatattttttactataagaaactcactaaaaatttctaccattaaaccaagaaaaattaagagaccaacaaaatctcttaaattcaaatctcaaattttaaaattaaaaaaattggaaaaaacctattaaaagtttaaccattagggttgctctaataacacagatgggcctgtgagttacgaaattggggccgggaagctggacggttttatttgtaagtcgcgccactcacttttctataaagacgctcccactacttgaagagtctgtgtgtcgtgcgtgtctcacgtctctctctcctctctcccacttcaagctgcttcaaaaccctagaagcttctactgcaaccacggattcttctcaaatcaagtccaataaaccactgttagtgatcggagacatggccgaatctggcagtactaaccctaaatccccatccgttgttcccgattcgactctcggtggactgaagagagatttaagaaactatcacgacggtgatgattctaataacttgtctatcaagaaatcgaagaccacgaagatggagaataactgtcgagaaatcgttcctttggatgtaacaccattgtcgatcgtgccaccggacactccaaagctctctagacagttttggaaagctggcgatgatgatgaagctgcgcctgtacctctttattgtaattgacacttgatctcaacctattgtgaatttcagatctttcttgggattcgaaaccctaatttgtgtgttgcatgcaagtaggtagcaatgatgcggcggttagggttcatcctcaatttcttcatgcaaacgccacaagccacaaatgggctcttggagctttagctgaacttctagacaattctcttgacgaggtttgtatatatttcatctttattcaaaacattgataatatttttcttttagcaagaaatagtctttcttggtcaacttgttttcgcaaatttatagattttgaaatcaagttttgtataacataagtttatgtttgataaatttgcaacacaggtaagtaatggggctacatatgttcatgttgattcgacaataaataaaagagacggaaaaagcagcattcttatagttgaagacaatggaggtgggatgaatccgagtacgtttagagagtgcctttctttggggtattcaaggaaacgcaatatggctaatagagttggtcaatgtaagcatctcaaattcattgtctttattagttttagctctgctcgtggcattaactaatcttcaaatttgtaaaacaaacaatgaagatgggaatggattcaaaactagtacaatgaggcttggtgctgatgcaattgtcttctcacgttctcgaggaatcaatggaaataagtgagtcatttcacaacatctttatgttatctactcttggtttacgcgttttcgatcttaactgtgtttcttatcactgtttcagtccgacacagagcattggtatgctatcatatacgtttctttacgagacaagaaaatgtgaagcaattgtccccacggtagagtcgtagagataaaattacttcttatgcaaattgctcttcttctcaaaacattaagtctaaaactctttttcttttctctgcttaggttgattatgagttggtagataacaaatggaaggagatagtttataactccacaaatgagtggcttgataatttagagactatattgaggtggtcgccttatctatcccaacaagatttattggaccaggtttgttgtatatacttttcttcaatcacaaaactatcttttatcgtatctcatacttgttaaattgtacagtttaatcacctagaagagcaaggtactcggatcgtgatttataacttatgggaagatgatgaagggaagatggaacttgattttgatacagatcctcatgtaatatcacttaccaagactttttttaatacagtcacttttaggactaatagatgtaagtagtaatgtaacagatggtgatgtgtgaattgtctacaggatattcaactcagaggtgtgaacagagatgagaagaacatcgatatggctaaaacttatcctaactcaaggcatttcctgacttatcgacactcgctacgtgtatgatgtttcatgtttcttaacacaaatccaatttgttatttcttcttctttaagttttcattcaccattgtctggtttttgtttttatgtagagttatgcatcaattctgtacctcaaacgtccggataatttcagaatcattcttcgtggcgaagatgtcgaacatcacagcgtcttagacgacatgatgaagattgaagagaaaacatacaaacctatgcgttctccagaatggccagatcaagaagaggtattaccttaccttaccttagtctcacttttcataatcttaaaacactctcaaaaatttctcttatgttttcaaaaaatactccagatggttgcttctctaaagcttggctttgtgaaagatgctcatcatcacatcgacatacaaggtttcaatgtttaccataagaaccggcttatcaaggtgactgataataattccagccgagttaggcttgatattgttagtacttatcttaacttcattttcttcagccattttggagggtttggaatgctgctggaagtgatggacgtggcgttattggaatattggaagctaatttcatacaaccagctcataataagcaaggatttgagcgaaccgtcgttcttgctaaactcgaaagccgattggtcacacaccaaaagaactattggtattatcatcgtatattctcgccactactactattagatttgaggttttggactttctcttaagttattattatctttctgtttgataggtcttcaaggtgtcacgaaattggttatgctccaagaaggaaacaaaagaattatgaaagtagcgttacagaaacccctcgacctttcaacaacataaacgttgttaagggatcttcttctagtactccagtaccagttcgagtattcaggccaaatgttgaaccatctggaagaaaccaaatccctcaggttgaaataaacttcttttagtaaccataatgtgttataatatatgagtctctaataaaatctcgcttcaatataggttgaaacacgagaaaggagttttgacatcaatcctgagatcggggctaagaacagaagctattatgggcttgggataaggtgttttttctctctctgatgtttcttctgattctgaaataatgttatcttcggtactaatttagtttaaattctctcttacagtagtttcaaagaaacaggctcagttaatctagaagcagagttgcagaaggtgaaacaggaatcagccaaactagtctctgagctgcagagacaaaaacaactgcttgagttgcaagtaaacctttttttttttcttacaacattagtctttgtttttttttggcgataatgatcttcatcgtttgaatataatgaaccagctccaggagtcaaaagctaagatccaaaacttggaaaaggcgcagagggagaaagaagtgcttgagttgcaagtaaagattcttttatcttacaaatttctcttttaggtcattttttggcaacatttaaaaaatgtcgttgtttaaaatgatgaacccagcttaaggagtcaaaagctaggatccaaaacttggaaaatcggcaggagggagtaagtactatctttcaacaagaaagagcccgcagagatgtaactgaggatggcttaaggaaaaaactacgggttagtcctattgtaattaccatatagtggaaatatcccattttattttagacatatccacgcatactcaaatcatttgataatgtaacaggaagcttctgatgtcatcgatgggctaaggaagcaagtggataccttcaaaggaaaacgcattttgtaaacacagtttcaagatcagtactcttttctagtttgtttttttggttttaagttttaagggtttgtacataaacttctctccttaagcagaatgtaatgtatattatgtagacttagggacttttgtgaaagaccccaactcaaaatgtaagcaggcagtggttttttgctaatcaaggtcaagcatgcatatcttatatcaaatccatcaaaactgtcctccttaaaccaattcttaatcttctgtaagtgaagaataattacacattaataagtaatcatatcacaaacacatacaatcaaccctaaacagaggtgatcaccaagaaaataaaaaacagaggaatccaaatatggagtgtccctaaggattatgatctcctggaggaaaacgtggaagataaggtatccaagtgaccggatttttccaatcgaaagccggcaatgccagattcgggtttccgaaaggtaaagaagggaaagggaaagacggaaaaggcggtagagttggcaatggaggtagatccggatatggccaagggaaccaatacggtgccaaataaggccagaagaatttcgaatctctaaacttcttctccaccttctcgtcctttcggtgatgtttcttccctccgtttccacacaatgatgtgtttttgtgaggaggtttatagcttagtgcgcttaagctgtagatacagacacgatcttgctttgatttgatggatacttcgttggttgcagtttggaaaacagggatgctgcagcctccgttgtcgtcagaggaggttttgagtatcttggcactgcattgtgatgatatagcgattccgtcgacacaatcgatgccatctacgtgagggatctcgagcttgtacacgccacttctgtttgttgttctgtttactgatatgttcacttcctctgctgtttttggtgaacttgctttgaatctacatgtcacatgaacttccacacctgagagagaacagatccgaatcaaatcggaactgtaccgaaaaatcaatctgaaaaccaaatcaagataagattgttccatttgtgaccttgcaagaaaaatagctctgtttttgagaaagtgttcatggaaaccgaaattgtaccaaaccgaataaaatggttgtcagtttctatattcataaaccgaaagttgaataaccaaattgaccaatactaaatcctaaggacagttcatgtaaaaagctctgaccttgtaagaaatagctttgtcttgagaaagtgttgatagaacacgtgtcacagtagacaactccgactacggtgatgcgagaagaaggatccaagcttccttccggtgatggccggccacgaccacggcctaaagcttgatgtgtcaagcaagaagccagaaacagaagatagaggagaggaagatacattgtggctaatcctcactcgctctctctattgttctttttgatgataatgtatgtgtatgtatgtgtgattgcaatatattcagcccgtgattgatttttgaccccaaccacactgtttaaccaaaattctttttccactaccaaacaaagacatgtgaagagcgttttttggctcattctggtgttacatagtgagaaatgatcatgtagaagaaatttattttggatcctttactcaaaagagtttctcttttcttacttatacagatctgtaacccaacatcttatgagccaaacctcaattatttttaaattgtgtccctacgtttttgaaataatgacagttatctacatacttgtcttggttgatttatgggttttagtactttcttgtgaggcaagtcttttagctaactccactcttgggaagacttgaaattctgacaaagtcagataatgaccatactttgcgtctacaaatgtatgaagctcgtggggttgtgtgtgtggcttcagagccttcaataacgccaaactatcggccatctcatataatttggatccaagcccataccttccgaaattaagagaaatgtctaaagcctatcttatttctacaaaaatgttcaacatcaacatctttcttgatattttcttctttagttgtttctgtttgattctgtttgaatcgattctcccatctctagtgcctaataatttggccatggattcaagatccatgctattaccgcaacacttcaccatctatcagtatttatcgaatatactaagtaaactttatcacataatcaagttttccatataagaataagatcaccaaggatcgttacaacaaaaaactcaaatatatcataagatcaacttaatcatgaattattatcatttaaatcacaaattttcaaaatacattttaaagataatttcgtgcctttaaccctaaagtagttctaaacaatttcgctcacaacctgttcaaacaggaaatcaaaacatagacatatataacagtaagaaaaataataaaaactcaaacttttaaaagtaagaaagaaaagaaatcaaaaagttttcacggtagcttctcatgggttctataaacaagaaggtaatgaaagataacgatagaagttttgaggtaaaaaaaaagaagcaaaaggaacaagtagggtttttttttctcctcatagcttaagagacaaggagttatctcttgcgtgccatagaagttgggttgccatcaaacaagtcatcaatgaaagattcaatatcctcaggctgatacttaacatacttatccgtctgtttccctgaatcaagatgttgcttatacctcccaaagaaagaccgataagccggaatcaccaacgacgaaatcgacacccttagctccgattgcatctgctcatcactcacaatccaagtgctctgcgtcttgtgaatctcatcgaacatagcattgaaaatcttaaacctctccttcaaaaccggcttcgacaccttcccgttcacctgtaacccttcttgattcatacactgtaacactttcccccaagtctctctctggtaactcttatgatactgtctcagctccgtagatctcttcctcgtccatgactgtcccatcaaatcccttatctcgatagaccctttaatcttctgcaaaatgtatcttccattattcatcaagaatataaatctcagtgatgggtctctgtacagtctcgatttgatctcaagatttgcgtcaagcaattccatcacccttatcatttgtctagcgaaagctgaaactttgtactcttcatcgtcttctcgttgctgctgcctaggtttggtctctggttcaggtttgttatctgtttgattcgcttcatagtgttggaacacttggtctaatgtttctttatactcacaagcgtatttgaggtagttcatggtgtaacgtgttaatggatgaactgcgccgctcggtaccggagttcgtccattatcgctctttatcgacttctctagctctccgaatatcgtcactgctgcttctcctagccgcgtctgagccagtttaatctcctggatcaaatctgaatcagattgttccaccgcaggaatcaaatcacgaagcgtctcgtacatgtctaagaacttgaaaagcttctccgacgaccgtttcgtcagcaccaccgcaccggagaaatcaagaaaccggattgtaacagcggagaccaaaccggtgaaaagacgtttacggacagaggaatgatcttgatccggaaagacggcgttacagagagaaagctcgccggggaaaagcacggtggagcaacggcgaacgattgagatccacgaagcgatttcaccttcgagagattcccaacctattctctgcacgtcttcaacgttgatcccttcgaatccaacctcggttagctcttccttgaacgcgtgccgtctcgacatttcgtatgacatacaacactctgcttcgtaaccggcggagatcatcgctccggcgatctttttcaacgtcgagatcgattccggtgaaaaatcatggaaactttcttcctctgcctcctcatggtcttgtaaaacgcatcgatctgaatcatttgttgaagaattgttgtgatcggaattgctcccgtcgtggtggttgttgttgttgttgttcttcttctcctcctctctggaacgatctagaagatgacgaaactcttcgtcgagaagagaaacagcacggtgttgaaccgaactcgcccggtttaaccaagaagaaaccggtgttgaatctaatttaagctctctcaatctcataaccgatttcgaaatccggttaacggcgtcgatgaatacagagtcctctgtttcgtcccgcccaagcccggaagattccatttttgacaccaatgaatccaccgcctccgggaatgactccaccgctggtgagatctctcctaacggatctttctcggaagaaagtgtttgaatgaaatcgacgacggcttccatcacctcgacgaggctatgttcggaggattccgattgtgattccggcgtcgatgaatgcagttcatcggaatgttgtttattctcgtgatcttcagatttgtgatcatgattttccgatgattcatttgcgtgatggtgatttccagatttctccatttttcgccgggaaaaattttaaaaccctatctaactgtttttttctctgtttttgttttttttttgtcttttttttttggtgtttttgaggaaattaagatggggaaaaaatgggaagaatggaggagattagtgtgaggattattcttaataatccattattagagtttctttctttcttcttcgaagatactaattgtgaatttttcttctctgttttagttattatatattttctcttttatttctgaggttcgtttttttgggtatccattggccgttgaccgagaagggaaaggttatgcgtctcacgatctctccaatttttttttaattgtactttatatattaaggaattaatcaaactcagcctgatcaaacttgaggtttatttataatgtgttggaaaaattatgtaatattatgattcagcaatttagtttatatttgggcttatgtcatatactctgtgatccaagggtatattgtgtgagtccagggctggaagcctaaagctaaatatatttgatgaggcctttgtctgtttctttcatgtttgttttataaagtctactatgctttgcatattttagccaatgaccggactcacttgtatgcttcaaatctggattttgctctttgttccactaaaatcatgcaacaaacaaacaaacaaaattgctacaccaaaattacttcttatgtttttccgcaatttaagcaaattgtgcatctaagttttagtcaaaccaatcatgcatttgacgagcatggtataatcgttgattgaggctgacgatcaaggatctatgaaatatgtttacaccatcatttgattggtaaatgacacgttatcttaaccagaggttgattgataatagtttgattgatagttaatacttttgattgataatcagttaatgctgattgtcaattcctttcttttttaaatgactatataactaaactgataagcgctgctaaatatttggttctcgcgtatgagactataaatagcaatatctagcaagacatgaaaatgcaagctatagtttcgttctctgcttcaagaccaaagcaaagttatctttttgtagtgttgtggtatagagtttgctagagaaaaaaggggatatatcctgagttttacaagtcatgttgtgcaatcagggggaaaattaatccacttgtacaataggtgaaggtaaaaattaagttttgactgagagaaccaaaaagacttataggagattatgagttcaagtgtcaacactatcatcactttaattttacaagggtaaatgagtttaaaacaattgtttggtgattaatgacaacatttctatgaccaaaaactatttatagaaattcaaaaaaaaaaatatatatatatactctcaaaaagttttataaaaagaaactgaagaaatatgattttatgtaaagtgattaaaaataagtaataagttttttttactaattttgttattttgacagcagaaagaagatttgtttgcttaaattaacaaaaagaaaaagaaaagaagttaatttgcttgtattgaagataatctcgtcaacgagaaaagtttcgaaggaaggatttactgagagtttcagcaacgcgtcattgttaattcgcaattggtaatagtgtgaacactcgtggacgacaaaagaagctgcttcttcatctctctctctctccttctctttctctctcaactccaattcgtttttaccagtttcgaatctgaacaaagttgggttttttattggtacccagaatctcaattctccttctttccttctgggtataggaaaagtctcgcctttttttatatttatccaatcgctcctgttcattgattccccagtaggattgtagtttttggttattgggaaaattgagtaaaggaggagatgggttgtttctcgtgttttgattcgagtgatgacgagaagctgaatccagttgatgaatctaatcatggtcagaagaaacaatcacaaccgacagtatccaataacatatctggactcccttcaggttttgatttactcatttgtgcttttttatgttttaatccactttcgttacatgctcataagatctggttatttgatcctctggttaagctaacgggacttgatctcaatcactgttactttggttttatgagcttgtcagatgtttttttaagctattgggcatgttctgattcaactgtgtttcttggtgaaagtgtcattctttgcttcaatttcacttgttttgatctgattgggaagtctctagcttgtgctcagtgtaaattttgtgtcttgaaaaggaatcgaaccttgtgaggatcaggatcacgtgatccctactgaattaggattaagatcttagatttggttatttggggattgtgccttggagacattgatacaagttttatgcttttagggtgatttgttattggagtttaagttggcatgaggtatgagaaggctgtgagtggatgtgtttggtaaattgattggtcttgatcatgacgttgcaggtggggagaagcttagctcaaagaccaatggaggatcaaaaagggagctactgcttccaagggatggacttggacaaattgctgctcatacatttgctttccgcgagcttgctgctgcaactatgaactttcatcctgacactttcttaggcgaaggtggatttggacgtgtctacaaaggaaggcttgacagcaccggtcaggtattttttgtttcgtttgaagttaagtaaattacatcgcattcctatttctaccattgttgttattcattttagtgggagattttgcttcatatattgaatgagtcttatctaataagtgtcactttaggattttttttgtttcataaggagtttcgtttgtacgtttcaaatgctaaattttggagagaattccaattttatgtgtagtcttggtaaatgacaagagacatgcttgaaattgtttcttaatacgtgtgaaatttcaagaatgacgctctttgtgaagtgagtgtagggtaaggtcttgatgttctcttggccttcaacatttttcttgaatgatgaatatgccaggaaatgaatatgcaagatactgcttgccatcttccggttgtacatatgtttacagtgttaaaaagatgactgactttttaattttgtatatatgttaacatgaattctgcatacttggtgaacagttttacatttatgtctttacttttgatccatgtcacctgtgtgtttcagatcacttgtttagctcgatgatttcgcaatacataatgttgtacctctgatctatttttttttcaatcattttcaggttgttgctgttaaacaactagacaggaatggtctacaaggtaacagagaatttctggtagaggttcttatgctcagtcttcttcatcatcccaacttagtcaaccttattggttattgtgctgatggagatcaacgcctcttggtctacgagtttatgccgttaggatcattggaagatcacctccacggtaaatctctcgccagcccttttctaatctcttaccattttattagacctcagagattccttgtgatcaacatcaatccaaagattctttcttatcttagtcaatgtcaaccctaactttaacagattcttcattcatttatttatttgttataatcattacctataaattatacatgtagacttaagttgagaagtagtagttgcttgttttctttggcagcctctaacaaataattttttccagatcttccaccggataaggaggccttagattggaacatgagaatgaaaatagctgctggtgcggcgaaaggattggaatttctacatgataaggcaaaccctccggttatttatagagattttaagtcatcaaatattttactggatgagggtttccaccctaagctttctgattttggacttgctaaactcggaccaacgggagacaaatctcatgtctccactagagttatgggaacttatggttattgtgctcccgagtacgcaatgacgggacaattgacagtaaaatcagatgtctacagttttggtgtggtttttctcgagctcattactggtcgcaaagctatagacagcgagatgcctcatggagagcagaacctggtggcttgggtaaatcaactcgtcatcatcttccaattgatttgccattattctcgtatgcaagaagtcttgagaatttttttggtcctaatagttaacattttggtggtaacaggctcgcccattgttcaacgacaggcgaaagttcataaaactggctgatccaaggttaaaggggcggtttccaacgcgtgcactctaccaagctttagctgtggcatcaatgtgcatccaagaacaggcggctacacgtcctctcatagcagatgttgtcactgcactctcctatcttgcaaaccaagcttatgatccaagtaaagatgatagtagaagaaaccgggatgaaagaggtgcaaggttaataacaaggaacgacgatggaggtggctcgggaagtaaattcgatttagaaggttcagagaaagaagattcaccgagagagacagctcggatattgaaccgagatatcaatagggagcgtgcggttgcagaggctaagatgtggggagagagtttgagggagaaacgaagacagagcgagcagggtacttcagagagcaacagtaccgggtagaaccggtttgggtcggtcttgacccttttttgttcttatttctctcaagactctcatttattgtcaaacatagaaaacaaacaaaaaaacattgggacgacgagttgctgtacattatatatgtgatgttgcaatatgggcacaaaggttaataaccaaaactctctaattgagattctggagagttgtgaagattgttcatgtaaattttgtagtctttctatttttaaattttgacagatatgtgtttcatgatgagtcacatgtggcgatgtttacgtctcattgaaagattgaatagcaaagatccaatattaagtgtttctggactctattcatgtggttcagtagtgtggctaatgtccacaatcgcggagtttcggacaacgtgggtcacatgccctcgcaatctgacaattattttaaggatggcttattcagattgtaagattttagttggtcttatcaagtttttgtcgggacttttttttactattgacagtgtactgtgtagtctattgaaatggatgtcgaaacttcccgtatgttttagttttggtgaatatcatttcttggcctctaaatactcggagaatctattctttactagatagtcctaaattttagaattttttaagtaagaggaaaaattattaactaaaaacctctgtctttttttccatcaagagacatactaattttataaattacatagcgtatcctacactggcatgcgtaatttgtcaaaattcgctataatatatatgattctttgtcggattttgtcgttacggtttaaaatgtaagttagttaacaagtatatatatttcatattattatttcttacgagttatttatagttatattaaaatattttggggtaatataatcataggatggttataatatttgtagataactaagtaatcttgtatattttgttacgaataagcaaataatatagtgattgtcacttggaagtgtgagatatgcttgcaatacattttcatcagaccattgggacgtcttgacaattttttattcgtttccaaaactggacggtgatgattttttgtacacttgaaaattagactctacaaagaaaaacacaattcgtttaaaaaagaatataatctgctttggttgtatatacttgatggggacagtttagatcacaaacttatgtacatactttttcttctgactcatgagttttatatatttgttaattctcaaaatcgttaaacagtatgtcgtcaatggcacaagaccattcgttatctaactgacggcgacatctttaagacaaatgtaatcaatcataaaaaaaaagggtggtcaacaagcttattagttttaacaaaaaaaaagcttattagtaggagtaattaagctattgaggtttattatatcaaattttccaaagagcactagttacaacttacacaaagataatatattcaaataaacacaaaactttatgcaagtagtacatcatcaataagatacgaaacaaaaatggaaatttaacaaaccaccccgccgataatacaatttcttcctttggccggccctgacgagccgagagaaagagagtgaaagagagagagagagagagcaatattttgagcttcacatattgacacttcaaacggtttcaggacgagtagcctccacgtagcacttgccgttttcaattgacggctcctccactttagtaactttggacagatcctcatgatgaacggcttcagagagtgggtccaccgattccgtcacaactgggtgcacttccgacacacctaacggactcatcacgacaatactcttaagttgttgttctgacgaattaatcttctctggtttctcatttgagttcctgtaaaccaagtacaaaaccatttgcaacagccctagtacgaatcccaccacgtttggaatctacaaaatatcatcaaagccatacaaaataggtcagttataacctttttaccgaatatttaaaaaatttagcaaacggtaaaaataaataataatatagatgcttaattgcttaccgctatgcatatgtcattgaggaataaaccataagcgaaccacataacggcgcttatagtgaggaagaaagaaagcgtgaagggcatgtactccacactctttgtctttatcacacgagcctattcacatcaagaatttatatttaacattttatttcaaaatataatgttctagaaataaatttacaaattaaattaaataacgctagcttaccacgatcattagaggggcagcgaaaacagaaacagaaatggcaacacaaatccagccgagtacagagacttggaggggaggagttttaaccacgaaatgtgttaccattagaatcaacgagaagaaggcaacgttcattgctatgaacaacttcatagccgatatctgccaaaaacgcatattattcatttaatattcgtatttaattacatagcggaattaaggaggaggagaggggaataattttacccttttctccctggtggcgtaagcgaagaacatggctatgtagagagtctccacgacgcagccaaaggagttgatggtaattaggagaaaagcgtctttcttaatcaatgcgtagtagagccatagcatgcagctaaatagcgacacttggtacggtagcgactggaaactttccgtcgattttctcttgtatattctataaaaagttggcctgaatattttgaaaaacgaaatcatcagaatcattctcaaaactaacaaataaataaaatgaaataaaaaaaagtaaattgaatctacttacactggagcgaggaatacaaggaaggatatcacgtttcctgtaattccatgtaaaaataaaaaaatgagtcaattgtataattaagaggcttctagttttgtggaaacataagtacatatgaatcagtacgggttctctaaccaacctcagcggggaattaaattgtgcattaaccactatacacgtattgagtatgatataacatggacaacaatgcgtgacgatttcaatttaattaatagcttacgtattgatttattttttggtagtttgggatttaactaaagaattagaagatcatttataatcccaaatgacttagtttagttaatgaagaaaaaacttgaaacttgttaggtgagtcatgatgaacactacagaatttcaattcatttcttagtactctgttgtttaattaactctaagctagaactacaatggaaccctacacatagtatatattgttttgaaaacagaagcttagatgtaaagttgcaacattatagttgctgttgcaaattccttttgttaacaagtaaaaaacataagaataacagtaaagacaagagatgatgaacaaactaggatttggctttgtggatttatcattacctaagatgccgaagataaaagcgaggaaatggtgattgatcatgactcccattttctatagcaattgagaaaactttcctgttaggagatttctaaagggtctctttttttttttttttgaaaccctaaagctttctctctctttctctatatgtctctctctagaagatgcttctttttatttcatggaggaaactgaggaggctcaggtggtttatatatagctccaaaataaccattgtagtcaaaatattttgattttaatgtttagagtttattagaagcgtgtaacgtgttgagtagaataaaaaacaaaaaaataagactcgaaaaggaaaacgaactcagtctggttgcatgacaagtggagatattagtaggtagcgtttgcattttatcattcactcaatcttacttctttcctccactactctcatctcgtacgcgcgtcgtctattacgatttcattttcttcacgccttctttttaattagctttcataaatcacatttagtaccacagttttgtactttatagacgatagataaatatcatggtgaccaaaagtctacccaacatcaacctatatagaggaaatcatcactagattacattacgatttgtacattttctttaggctttatcgccctctctttatttttaatctacatatatatgaactggaatccaaaatatcccacgtatctattcaatgtacataataattatagacactgttttcaaaaatgtaggataattaatttcattgactatattttcaagtatgattacaatgaatttaattgttttgtctgtattctcgttacacaaatatatactatgacttaaatgagaggggtgggactggtttcatctatattggtttttgtaaaggagtctaggtgagaatgattaaagatctaacatagctagaaatatacgtgtgatggctagattaaaccaacacatttataggtagcacaaaaaagtaccagtaaagatatttctttgcagaaaattgacgccgttctctatataattattggcatttgcaatgattaaccaaagtaggaatgaaaccattcacatctcctggtccagtttctcatttctctctaactcttgtctagaggtacacgtttttttttttccttgtacaaaaagaaaacgttaacaatcatgcatgttttgagcaaaaactccacgcgtcgaaacggagcgtcgcgcgtgagaataaattaaggtaaattaaacgaaaaaaatgatgcgttacgagagagagtcgtgattaataatacgataataatagcatgaaaacgaaaaatttgtgcaaatcacgtgacctctccaaacgcttccacttatagccgtttctttagagtttgtagagacacacacacacgagagctatgccacgtcatcagatgctgactaggcaacaccctctctttggtttcgtgtctttagagtattttctgtttcttgctcttcgtctcctgttttaatccctattttcaggatttcttatattagtatattaaataacaattagtcctttttgttgattccagttatatataattttctaaaatgtttataaactttttctcgttaattttttgaaataaggatgcatgtataatgatctagttatgcagtaatatgcatattattcagagattggttgaatattacattttcttttgttacgtttgtttctatagttatgaggaaaggaatctgaatattttggagaaaaggttgagaaaattacgaaacaattctccatttttcgagggtaagttaaaacagatattaaaagtgggaagaaatggacaaaagaggagtgacgtggtaggctaatgataacaatgatcatgggtttgttaaatccttcttgttcttattcgtgagtatttgtttctctctctccctctttcttttatttggtccataataatttaaaatatgagaggtgccacttttgtggttctcctccaccttaatttccccatctctaattactattgaagcaactttggtttctcttaaaaattttgattgattggtgcctaatatagttttggttcatcgtacgatccatacggtgtatgcaaatttgcaatcacattcccctgacttctttatattatttactataaatatatccatggacatttatagtaatatgtatacagtagtcatgaacaatagatattcataattcactagcaatattgcatcacatcacaatttctcgtttatattttgacatttctcatcgaataaaatttctgtaacccatatatgaaatgttttttcgtttttaatggatgatgctttaaatgaattatgtggaaaatcaacccaaatacaacaaacatcggctgatcaaaccccaataatataggcatctaggtgacccacattgatatatgatggatgcatataaatttgtgtatgttgctaccacataaaggaaaaatgacaatcatgtgggtgaaattaaacctcccccgatcctatcgttttctgatttcaatcggttatacgaatctagctttacacacacatacatttatctagctatgctacatatagctttcaatgatagatacctatctatgatttgttagcgaattaattaatgtttaccaaataaatactactatgtcattatgatcggtctattgaatctatattagccagaataccataaattgtgtatgtattaaaccatgttgttcaaaataattactcaaataaatttcttttcaatcatacatatttataagaattattacagcgttgtgataattaaaataaatgtaatgggatggttgatatcatcaccttattcacatatggccaaagtgctaaactatttttctgacagaaatatactacgtgtatcacttctagagaaatttcaatcatacatgaaaattaacaataacatttctcgagagataattttgaattgttaaaaaacttgatgaaaattaattacttaaatataagttttaaaattttctagtacatatattaagacaaacttgcatgtataaagtacgccttttgccgtctacgttatcattttctcagtaaccaaacaacatattttgatgcaagattacaaaccttagtcgctgaagttagtggacacatatattaataaccataaatgataagtagatgaaattaatttaatcaaacggatgttccttagacgaatcggtcttctgcctcgagaatgggtcaagaacacaagatattttgagaatgtgtcgttcacataaataaactatggtccaacaaattaaatatggagggaatgaaagtaaatgacgatatatgaaagcaatatagtaaaggatgaagaaagctaatgtaagttggttgaagagcgattatatctcctagaactcttttttgtccttttcaatgttctcatcaattaatcatcccttcttaatagaatcaatcaaacagacccattctcaggttcctacatttaataacgacctcttattggacaccatccttttatggacttatatgcaataaaaataattataagttgcaattaccatacgtgaataaaatatatgtgtgattgcaaattttcaatagaaacagaagtaaaccaatatgtgataactcgaaccagattgaacttaattaaaataaaaatatactatttgattcctaaactttaataaaaaatttagatcagcttttttacaaaaacttaaattttactaaggctaccttagtaaaataagcaaagtaaggctaatatagagtagatcggcattttttacaacagaaacaataactgttaattgcggatatatactatttaaaaaaaaccccagcatattcgttctggagaaacaaaaaaaaaacgataggtaaaataggccaaaatatgcgtttatatattaatcacataattgtcaccaaaagaaaaagttaatgccaattttgttgtatttgttatttctcaatatatatttttaatgaaaaaacgtatgtcttttatatatatatatatagtggtttgcatggaaaaatacacattttctttttctgagaatagcaatttccctagtctcaatcgtatggaatgtgcttttgatgtatccatgcagccaatttgggacgtctcttttctttcatatattgggtttcggcgttcgttttttttatttcaaaagaggtaccattttatatgtatgataactcaagcaaatacagatttgattagagtactagatacctatttagagcaaacactcattttacaaggagcacttaaaataggtattgttctttcatatacgaatacgatgatattcgtatctttccaaacttgtgtttcccattggatacaggtctcgatactttccgagtgtgtgattttcgtggagttgctggtattcctttcatgagattttattcgcatgaaatagttttgactacgaaaaattatgttcatatcttttgtaatggcgaaaaattgtattcattataatttataacaacaaaataatatatacctaattacctatactgtatattgatacaaatgaaatattcaaggtatagaccgtagagtcacgctcaaatcaaaataaggaaatgactataccagaaacagaattaatgactcaaaagttttaagggcccaaaaggcgtggcgttctatagtgtttgattagaacttgattcatatttagtatgtttcagatacaaagaaatgtggtctagtggtcagaacattccacacgtagccatataattattgtcttctggatacacctagaagtacaaacgacatctcctttccaaaaaccccatctctatgttttctttttgttaaaataaatggttttctccgtttaaaaacaaaagaaaatctatacactagttctccagaaaaaaataagtgagaaaatgagagaagaagaaaacgtgaattctttttttcttaagagcgttcatttttacgtacaaagagagaacattgtgtccttcaaaaaaaaaaaaaacatattacagcggcattataaattttctttatacacataatattaatattcatttgcatgttttcactttttatgggattttttccaaataatataattaacccctaaaagatcatgtgccaatctacctattttttattattatatatcactctacatttcactttgggattacggattaatagttgattacatgttatctgttaccgcaaagtcagtttcttaataaaatttatcaaacagtattgaaatcgcaatagcttttttttttttggttcatttttaaaaaatcgcaaagagattcatctctaccaaaacatagttctgttgcatgaaactatatactgtataggtaattagcagtgaataatacataatcatttttggtaaacctatttcgtttatcctataaaagaaatattagcagtgaataataatactatgaaaaatgagtacagtggattgatggccaaaagattaggttgctagttgatacttgatacgattggtatttgtagttgtatatgacttgaggaatacgtatttgtatggtagagaagtggaagaaagtacccaaaatacaatttgaagatcgatgcattgaacgtttacacatctcattccttttcaagtaaaggcaatggcaggttttctgctttttggacgtttctgtgacgtggcaatacgtggggactcttttattcttattttgtgttttctttcgtgaacgtatttgtttgccttacttttgaattccaactaattaattgtcgtgttcaagtcattgagcattccaattaatggcgtcattaggaaatttgtaataatcagttactaatgcgtactattgatttgtcatatcttcacattcataaagacttcctaagatccttaaggcttaacagcgtaatgagatctaatcttcttctttttgtgaaccaatgagaacgaatcttaacgttagatgttctacgtcaatttcattgcacatataattatttgtcaacacacacacatattttgttttattccgtggtctcatcattttactttaactgtattgccaatcaaaatgcaagtagccatgcattaatgataataatgtatttatctttaaaaggaaaaaaaacttagacttgatcaatcacaaatttccgaagttacatgtaaatgaatgattggcgtggcgataaggcaaggattgtgagacgacatctaaacccaagacatggaccacataaagcttatatatatatcatttcaaattgtttgaaatgatgagctggctgctttttttcccaagttagtgtcgtcgaatataccaaatgtgtcttatcgaaaagagaaaaccagcttatttcatccaaacatcccaaacaaagaaacatttgttcttaaccttgattattaatttgaaccacaataaaatggcttagaggtacggcatcgtcattaaaaatagttgatttactcacaaacaaaatcgtactacaattaaggacagcttgggcaagtcacttagaccaaataattaaatccctttttttgggtaaaatcattacttgtttacggaagtattcacgtgacatttattttcaagatatcttaataatacaaataaagaaattatcagaccatagcatttacagagctatagacccgtggagttcgaaggagacaatcaaatcattcacagactaatcgatggcaatgcggagaatctacgactctactgttacatgacggacatccaacaatggaaaacagcatttacaggaataaagactaactgtcaacacctatgtgcggatttcttagcgaagacagtagtatcatgtaactaacaatggtctctataccatagctgccctcgttttctaagtattttttaaggaaaaaaaccaacttttggtaatacatcacagagagagcccaataagtcgtaatgggcctggaacctagagtattttcaaaattttgaatcattaacccaaacttaaccgaagtcctcaaacaggcccatgctaaacaacacttaagacatttctccttcttcttctactcaaaacataatctcaaacccaaaccaggatggaccaaaccagaactaaatcaaatggaagtatagccaaactaaaataaacaagtattggtcttatttctgtaaatttctcttcagttgaaacagaccaaaccgaacgataaccaaacaaaaaattgattctaaaccgatatgtattcactaatgagaataaagatcatctctagtgtaatttttctttcttctttttaagatttgagagcaaagaagaaagtaaaaactaaaaagtgatgaagatgaaagtctaacctttaattggctggaatttgtgtctttcaagtttggaataagcatcacgaaacaactttttttttcttatcaaaagcccaactattttctctttcccgaaaaaaaagaagagaaagttagcacacggattagtagtatcacacgtgagagaataaaaaaaaataactttttataagttgttcagtcacatgccataaaaagccatacaatgttcaaggccacgcaaaatttgatggaaagcaatcaattaaaacatatttcaaaagtaatgaagaaaagaaaagaaacttcactcttcaggtttcttcaccttaaaggattcgtctatctttttgtgggttttcttcaacttccaagctcacatatgtgacaaaagcagctgcagtaccttgctgtgtattttttaggtttcgtatagccaatgaaatgattataagtaaaagtgatttgattttgcttttcgtacccatgtctgatgtctctaaaaagattgtggaaacaataatattttgtaaaagcattgagatatgtcctgaatagtagtacatttttgtgagtacatttatttttggatagttcatatgacaatcacacgttctggtctatcaaaattaatttgaaggcataaaaattcagggtaactaaagagagatttaaaagtacttaaagacttttcctttttccgtgctagaaaagcatttgaacttataatgtatgtaaataaatgcaaaattttaattaaaagtttctttatcaaaggagatatgcgactttgaggttgacaaagtgtagcttcaaaatgaagaaactgatatcattagatagaataaaagcaagagctagcgcctccttaaatactttaaatatagaaaatattttttagtcaacttcgttatcgattacgagtgatgactttgaattttcagtttgtttatttcatttgtcgacaaaaatgtatatatttatttgattctagaaactaaaaatcctttaatctgagccaaaaatacttaaatgtgtagacgatgtacttcaaataaaaacatgcattacgtaaatttgaatatatagatataaaatccctaatttcttgtcttgatgagatatacaagaaaaattatataagataacacaaataacttagcatgcacacgaataaaacgaagatgttaaagaataaagagtatcaaactatcaattgttttgtacaccaccaactattaagtaaagtaaaaatgttttaaaatactactattgtatttgtacgtataagtcatatgctcataatttatcctcgaacaatactcatggttaaaatttgaacacttagatgggcgctaatctttatattggattggtcataaatgtcatatgattgcttgtacgtgattttatgcagggttgagaaatcattacatatttattattttagttggatttctgaacaaagtaggaaaccttccaactggccggcaattaaatttatatgatcatcatcgcgcctttgaaaagtaatataaagtttacttattaattaagacgtattgtttggagtcttgaactatggaaggtctagctagtagttcgccaaaacaccaagaatttttttatatcatatacgaatattgtagattcatggaacattgaattttcgtggtatgtgtgtaagctagattttatatatataaagagattttttttccaaagttttatgtgtgtaattctctaattcttttttggatccacagaaattgtagctctgagttgtataatgaatcatttctggcgtttctttgtagttttcctcagttctttagatttgttcaacataggatattgatatttagatttactattaaagtagatttctattacgattgaacataagattcataagtgtagtttcaaaaccggttcataactagcaatgaagtttgttgatcagttcaagtgcttataaattactataataattttaaagcatagagtaaaaatattcttatagcaaatttgttgtacctacataattgttttttacattttttgttttacaaaatatcacaattttctacatatatatccatctacttaaatgcgtaactaattttttcaaaaaattatattacaaaaagatagcactttttaattaattaaacatctcatataatgtgacaaaatattttacagttctttctaattaaattcaaaatcaaaacttttatattttgtcgcacatcaaaaactatatacaattaaaaatataaattaatagttcgtaggtaagttcagacaaaacacactagctcgtaagaaaagatccaacaaatacaaaaccatatttctcggatttcacataaaagaaaagtcaaagttatatagtgtaagaaaaaagagatcgaaccctcaacaagactattagaaaattgggttgaggacgaaaccatgaaacctcaaaattaagtaactattaagcatatttgttggattcaaaatcatgtagttatagttgcatcctttgacgtttctcactttctatccaacatccccacgcaaactccgttgacgctctcccacgcatttctcatattaccacagttattactatacggtatgcctaaactacataagatattttaaatattacaaacttaagggaaatttattttaaattgtaagaaaaaaaaaacggagccgcaatacttacgaaacgaaacccttatttgatatttctcaatttagaccattgatgactaagtcgcaagtggggtgcgtgtgcctgctttttctttttgcttgtgggaatctctcatctatatttttccctaaatttcattctttcttaatgtaaaaataagtaaaggtaacaacacagatataggagggcaagcaatatgtatattgacttctatcttctttttgagaaccaatattttcaaatttttaccccgaaattacatattttacagaatcatttgtagggaaacggaaagggttgacgattagataattaggttgagtctctgagactcaatcactagagacctttttgttctttgtgtaaaatatattagaaaatgtttttaaatcaatcattcgaatagatttagatgagtatttcccgaataaaataggtcgttgaatatattggagggtagttttgtcaatttggaaagggaccattcattgaatgtgattagaaaatttgagacaaagaagatttgggaaatcggggagagaaggagagatcgtatatagagatggtttggttgcattgcattttgtgtctccaagagtttaaatccgacgtgtgaggctgtcgttttggaagcatgtaggacccttccctcttttattcccttcatccacttctgtcatatattaaccataatgcccctcatcatacaacaatgtacatactaaccaatagtgaaaatttaaaccgcagcagtaatgactagatactctttaaactgacatcaatcaaatgagtagaagtaatagtaagaaattctccgttttgccctaaaatctattataaatactttgttggatctcggcatcaacaacatataaatattcgataaaccgtatgtaaaaagtttatattcactgtaattgctactgaattgtaaaattaaatccaacttttggtagtattgtttcagataaaaatatcaggtttaaaaaataaaataaggaaactatcgtaaaataaaacaacaacaacatcatatagaggtaaaaatgatatatacaccttattcttctaaaactcatatcataatattggatgatcgaaaacgacgtgtagtacaagactataaatgttatagtattcaagtaaaactaaaagagtggaagttatcgttttaaatataacagcgacgaagatatccttaataaccacgacgacgttcattgtataatgaaaactcttttatttgggataaatcttaacattaaaaaacaagaaaaaaagaaccatgatattctatttaaatggatatatattttgttaatccttggtttcaatagagaggtaacttgtagtgtcgatatatagtgaatattattataccgacaataacgtcacgcctttgttattttagagataacatatatttggacgaaatcgatcatttttttattttaatttagcaataaagaaattttcatgtgatctatacaaacaggaaggttgacaacgggattggaggaacttacagcacactgtcatcttcacggaccccttgacattgattttattttatctatatttacatgaattagttttaattactaaactgcataatttagatatatgttattaagttattttggttgccggttcttgatttctatctcatatactatgtacatgtatattatatatggatattgttgtctcactggtctgtatttatgcagagcatggtccatacacaattaattatcaagttggtgattgaatttatatacatagatatattctgttctttcaattgtatggaaatcattgacttgcttgggatatttcagatgggatatcaaattactcagagttccataatttcttcctttggtggtggtttgagttgtcaatattaattaataagattgataagtctagaccttagccaagggacatatgctttaatagtattcaattatatatgtaaagtaaaactcttttaagactataaaatatatactgataaatttaaaacattgataaaataggctcacccactccataaaatggacgaaaccaagtgattcataatcatttgctatctttttatataaataataattatttaaaaaacacataattttattcgatagatagataatatataaggaaaaggaaagatagttgcgtcacttagtgaagaacactaaccacaaatttgaatccccacaacacgaatggaaagcacttagagggataatggagcaaatatataggatgatatattgcgtgcccattggccatttcccatttcacattagttactctccttattcttccttaaaactgtacgtatgtgtatatgcattgttttctacaatgtaacgtgttgaacattgtagaaaaacattttcgtggttcgagaagccttatcaaaacaagaggcatacaattcttttgtccctctctctcatgcaggcacaagacgaatccccatattattcgtgtttctctctcactttcacaaattactgacataattcatcgaaaccaaaaattaaaaaaaactactactaaaatcgaaaatatttgttgagatataaatagttttaaagttggtatctcaaagaggggtatatatgtaaatatagacgaagagtgcaagatccggctgtcagcatgacataagctgacttcagcaacaccgtttaagccgcgagcccgcgaccgtccggaatggacccaacttctcacttatacttctccggctccctcaaacctgaatcactataaatgaccatattgcccttggatctataaaataccaaaaagaaaatgatcttaaatctaaacaatacatgaaagcaagcaaattgaagaatggacgacttagctaggttggctaatgtttgtagtgaaaagaaatattattttaacctccacgttatttttgtttgagtgtatgattaagctataatttatttcattaaaacgaattaaaataacggagttgtttaataaagtagtccttttcatttgtacatacaattatttatggtaaacaaaaaaattgttcgaagagtttacactttacatatcaaaaaagaacaaaagaagaggaggtagataccgactaaaaataataattgagagacataaaaaaattacaagcaatgaatgaatattaaaagaaagaaaagaaaagatagatttgtgaaaatggcgtcaaaagaagagaggaaggagattgagtatggtttacgccaaacgaaatactaataaataataataaagaaaaggagttgttcgtatcgtcttctaccttataaaaccccacaccttccttgtttccctcttcctacaccgcactctcttcttcttcttcttcttcctctctgttttttctctctctttgtttggaaccaccatggataatgtcaaacttgttaagaatggtgttttgagattgccacctggattcagattccatcctactgatgaagaacttgtggttcaataccttaagaggaaagtttgttcttctcctttgccagcttcaatcatccctgagtttgatgtttgcagagctgatccttgggatttacctggtaaagctttctgattcttgctatatttagtaagttttcaatttagagtctctgtgacctttaaggctcataagattctcttatgtttttttaggcaatttggagaaagagaggtacttctttagcacaagggaagctaaatacccaaatgggaaccggtctaaccgggcaactgggtctggttattggaaagctaccggtattgataaacgggttgtgacctctagaggaaatcaaatcgttggtttgaagaaaactcttgtcttctacaaaggcaaaccacctcatggctcaagaaccgattggatcatgcacgaatatcgcctctcttcttctcctccggtacatattcccactctctcaattcccggtttaagctccggtttaatcaccaccactaaaataagattctaatattttgtagagttctatgggtcccactcagaactgggtactctgtcgtatcttcttgaagaaaagagccggtaacaagaacgacgacgacgacggagatagccgtaatcttagacataataataataacaattcgagtgaccaaattgagataattacaacagaccaaacagatgataaaacaaaaccaatcttctttgatttcatgagaaaagaaagaacaacagatttgaaccttttgccgagctctccttcttccgatcatgcttcaagtggagtcacgacggagatcttctcttcttccgatgaagagaccagtagttgcaatagtttcagatgaaatctttaatttaattttaatgttgactatcttaataagttattatagttttatattaatacgactctctttcctttttattccatttttacttgaaaacgaatctttgtcctctcttttcgtttcggtttttatatgatttcgtgaaactttgttggagttttatctgagtgattaaccacccgtttcaagaaaatgtatgttaactttattctctagcgaatttcaattcttctcccaacggtccacttattgcaataaatatatgtttataagtcattgtacaaatttagagtataaactttatttggagatgctaccacaaacggaaaatatatattttatttgaaatttttttagaaagaagaggtagcttgtttatacacgttcgtttgggtttctctccatgacatgacaatcccatgccggaattattaaagagtattcacacttttaaaatgataataatcttgttattattaataaaaaggtgtgtattattattaaagaggaaataatttcctctttgcacgtgacggtgagattattaaaatatgtgtacataatacttacctatttagctgtatttattatgtaagttgtgtttgtatgattacaaatatgcatggaggattacaactaaaaagggtaataatagcacggagaggctgtcaaagagagctttttgtcaaaagtgcacaaaacgtaataagagtgtgatgagtagttatctcttttaatgtcaaaaaggtcataattattcggtggaaacaacacaattataaatttacacatttcaaacacaaaatcttaagaaaaaaaacaaaactattcatggtttacaatgatgcgatctaatttcaaattaggtccccacaaagaaatgccaaagctgagattgtataagtcatttttataaaggctcctttcaattttcttaagtgccatgtaacaattatatgtataattagctcatttaatttaggggtagtgaggagaaagaacgtttaaattaagggaaatagaacgaaagtgtaagcttggagaaagatgatgaatatgagcgtaaaatgagtgacatgagaccaaaaatagagaaatgaactaagaaatgtacaataatcctaatattagtgttatatatatatatatatatatactagcattatggcccctgctttgcacggacaaaactatatgaaagggtatttatattttaaatttaacaatttgtggacatgagttttgtttgttttaaaaagccaagatcaaaaataagaggctgatgaatctatgaacccatgaaatgtgaacatattcttgcttgggaatttggaaatcaaagcaaatcctaatagctcctcatctcccgagcccttcttgtcactgtgtgaataatctttcatgaaaaccaatcttcaatacttcctgtaagagtattcattttatattaccatgatatttgtaaatttttaatagatgtttactaaaatgaatagtacactaatttttgcgtatagaagacttgagtttcgatagaaaggtataaaacaatttaaatagaaaaaaagaaaaagaggttgaaactgcagagattgtagaagagtggaagtgatcaaccaaaaaaatagttatctataataaaaataatagaattgtggattatgaaagtaaaaaagcaaaatttgagagttttgccacatgtcaaaaagagagtgttgcagtttttgttaaaatgactgttgatttagtaaatatagatatctaaaattacataaaaaaagaaatcataatatttgaggcactcacaatcctcagagagacgaagagaagaatgacgtacaataaaggtgggaagtagtagagagaaaaacagagaggggaaataggagtggtgagcagcatcacgtctctatctttcaacgatgtatttgttataaaaaaaatgagatgtatttgtcccaaaaaatggaattaatcttacaacaaataaagtaaatcgaagtgctatttcggaaatttaaacaaccgaaaatattgttgacaacaaaaaaaataacaaccgaaaatagttaatattctacctgcattttctctttctagtgtgtccttactgacgaattaataattttcctactaagagattgtaaaaatactctaggacaagtaattcaagaggatttggtgtaaaaaacacctcttaatagtttaatttgctctaagaccctatcttgctataatttcattagtaagaagaagaaactcgcacagtggataatctatgattatttcatatatttttaacaaatgagaaactaatctttgtcgtcataggattctaacatggaaggactacaagaaaaatttatgcaagaatcgattcaaattaaaaaagtaaataaaaagctataacttattttatgagcaaaaagaagaaacaagcataagagcttgagagaatcactaataagaaccaaattccgcaaggataatatattcgaagaggatcaaatctctttctctctatcttaagattccattccaatcttcaaacctactccaattgagagaaaaaaaaaaaacattctttgtgagttactgaattctgttttaacagcatctgttactgttgtctccatcgaattactatgccttacgtaactgaattgaaaagttaggtaacggtctgataagtgttcgagctagtgagacacaaaacctaccaaagaaaaactacgcattaaatattcgacttaattaagacaacttcgttaaagtaagataatatttttaactcttaatttcatcaacatctgtatgccttcgaaagcctaacctctgtatagtggcatttctccacaaaacaattccgatgttataatctgactcataacaaaattcttctatttttatacctcatgtaaacaaataaaccgatattgttttctattaataaaaaaaagagttggtataggcattttgatttatgttgaataactagtcaattaaaagactaagtcacctaaacaaatagtatcctatatttgctttctttctagttcataacttcatatacatattcgattttagtggtgtacgtagaggcatatagttacgatttcttgtacttgcaagcaatcccaatcaacttagtgattatcgattgagtgaaaataagtaacaactttatcagcatcttttaatatttttaaggattgttttcatgttccgtatgccacaaggaaagataaagaataattttcccgacccaaagagagaaaacttccatttggattcttcgtacggcattattgctattagtcattagatatagtggatagtggatttgttcaaatgttttgttctgttttccccacaagttactctatcaacaatatcaaatatgatactacaatcaaataaaagagaataatcatgaatggcgtatacattcatgtgtttaaaatatatctatttaatttgatcttacaacaaatacatattgtctaattggttacgataccgtgaatacactaaatatattttttctgaaaattgtattgaaacaacatcgtacaaaacattatatgaataatttagttagaaaaccataaaagtataggatgttatacaaacaatcatttaaatacgtaaaataatttttaaatttgtggttatgtaacctatatttcaatatttaattatattattttaaaataattgatgatttgacacactagatggtgagaacttattttgcttataaatatgtgtatatatatgattagagataagtggtacgataaagagtgatatacaatacgagagtagtccgataatgagatttgactttcgtctctacatttcccctagttcacagtacacaatgacgatcgtggtcgtgacatttatatgcatatataaatacaaataaaaattgcacgtattaattcatatataattaattatttaatccgaatccattcgagttattcacgtcaaaagtttttcccgttctaagcacaatcccgttctccggttacatttggagataaagaagcaaagtgcatctcaaaaataccttttttttgtagttgcagttttagctatatttcacaaaataaaacaccaacctaaatacacatcatgtagaaaatgattaaagaaaagaggagaaaataaagaaggaagagaaggtggaaagagtcgtataatgctgacttgtgtttcgtgagattcaaatttgtataaaattccaagtgggctgcgacttggaagacgtgggagacccacacactttcacaaatcatccattacccacacgcatttttcttacttatattgcatggttatgtgtcacttccaccaaccacattcaatatgtatgtatattcaccttagatttactaaatccttgtcttaatattagactaaatattaggaaaacatctctaactagtagttgtaagagaaactttattttatattagtccattaactcgactaaattggttatgaacaaattagaggagtgctcttatggtgctaccagatcgagtttgagtctgtggtgagataaattacgtttgtagacccgttacaagtattatcaaacctagggtaactatatatagggaaaagtccagaatattctgatcacaaagaaagaagaaaaaactagtaacagcagtcaataagacatcttacttattactattgcatgcatgtcaatcgtaaatgtgaattctaccacaaatgacacacactcaaatgctaaatgcatatacacaaatgtaaacgtattgttgattcgaaatcagtgaagtatttagctacataaaacaaaaaaacgattttttttttccaattttcctaaactccatctccaaactggtcattaattaaaaattaaaacgtgcggaagcgtagtcaacaaactcctataagacttgatccaaccgatccagatccaaacttgatataaaatatcgaccatttaccctttcgtctagagataattagccaaacaaaattgagaacaaaaagaaaaaaagacaccgcataaaacgagatttagtataaagaacattttcacaagaaacactatgaatgtggggaaagtgcatcatcatttatcaaaaatccatataaatctcttaaaatccaattattttcattttttttttctcccaaccaccacaccataattaaactacataaaacaagaatgaacctagttgggtaagcaaactcaaataaacccaattgcaagagaatctacctataatatattcatcaatatagttttatttaggtttaagagtcagaatctctttatggctcttgcctgttcccataagccctattacgaagcacttaaaagaagagggtgacgtcagtccccaaagacatgttgcctagactctaagcaaacttgagatgtgatgacaacacaaaccttaattacttaattaagaccccaatgtctattttgatcaccagtcggatacaaaacgttaagaaggaaactttgaagttggtaattcaaccggttaaatctattgtgggaggtaggccaagttaagtcttaaaccaaccaattgaaaaagagaacaaaattacaagctttgatctccagtccaaagacatttttatcagtaagattcggaatctcttggctactaaaatataaagaaaaacacgcgagaaaaagatagtgtttgatattttgtgtagaggttgcgtgcgaagaagcaaaaccccttgtgagggagtgacttgaggatcagcttcagctttctgagacataatgacaaataacaaatgggtttgatatagaagcagttttacttacatcacatgtttagctttcctcttgtggtcctctttttttctccaatctctaagcaaaatcctacacatctcttgaaaattttgtaaacccatggaccccattaaagattcagttgtatcttccttaattgactatttttgaggcatgattagacatttatagcaaagaactaatcacaaaacttcatcaaagccttaaaattcttgctatagatagacatctaaaaaactggtcccaaagaacctaacaaagccacttcacacgctgaagaggcaactctcactgttaacagattccaacaaaacagaagaggcttttgtgattagaagctattgaacatttaaaccagcagacaaggcatatgcttggtgacaactacagttgcacacctgtactgcactaaaaattatctgcctttttacctttgcacgcaactccctattcatcggtctatcaaactccaaaaaagaaaaaatcaaacttcttcaagttgctgagggattatttacatgacttgatgttactttaatcaaagactcatacgagaagtgttatacttttctaagacccttcaggcagaacagaagagtcaaatttatgattcttcaaaatttagcaacaaaaaattctttgttgctatagagaaaaatctaagaaaagagtaataaatatctttgcacatatactagaaaccaagattgaagtagtagatatttttaaatttataaactccaaatactaacactaactaattttatactgattttaatatctttgcacatatactagaaaccaagattgaagttgcccacaaaatttagtttgtgagaggcccaaggagatgagagaaaatgcgattatcttaaagtgctagtttcacaaagagccatggcaaaggagggcttagggacttgggacttatgaattgagatagttctaacttgtaaggctactatatctgcctaaactgattataggttttaggtatgtatgatcaacctgtaggctgtagcctgtggaccagccccgtcctatcccgcctgctgatcagtttttccattttgcaacttcgaaaaccagtctggcccttttgtacccaaaccccaccacatctggtctagtaaactgtaaacccaatgaatccgtcattttcctatgtagtttctagattaaccaagcactgtccccatcgttcatataccaaaaaccaggatagatcttgaacactcaaaccagagagccgggttcaaactgggcagcttgttcgtcactggcccatcacacgattcacaccatccctgcctgtgaaatttcaaagacgaataatctctctacgtgaagataagagccttgttgagtcatagccaagaaggcacaagagactagacaatagacggttcattcatgaatcagtgaaacgatacagaagaataaatatttcatttctcacacattctatagggttattctggatcttagtttttttccagtacatgcaacagaacgactcaacttcacaagcaatattaatcacaagagaaaagaatgcatcttatcatgctgggagtgcgaaactaggttgcttccactgtggcggatccatcaccaggcagggatctgatttctcaaagtcagcaacctgtaaacaaatcaatcatatgaatgaaacaatcttccatacagagaaaaaaaaaacgcacacgagtagcaggcatgaagaagacatataaaagtaccttgttcccacactgagggcaatggtgctgtttgttccagaggcaatccattgaagggcagagaaagcagaaaccaagcataaacggcatcatgcaagcaacaacagcagctacaccaggtttcgatctgtttcacatccataaaaaaaaatatatatcacaaacaaagaagatgtaaaccacaggttgttacaatgaatattttcacataaaaccacaggttatcacaaaggaatagtacagtctcatgctcttaaaattgtttcggtagaatgaaaaatgtaagccctaaacatgaatgccgagaaacgagaaaacgtaaagcagactaacttcattaaaaccaatcaccgccagtatcaaaatagaagagatactgaagtgaagcaccatctaaataactccactactaaggaaaagatgttgttaccaacagaaagagtcacaaagcaggtagctttatctttgcagcttaagtatatttgttgagaaagcttaacaataacaggctggatcaatggagttctttcagccttccttttaagtgatttaagttttataacagcttgttcatatagaagtatcaaacattctatagctaatgaaacacaccaatcaaaatgaacaagtttgagaatcctgaaaccaaaaatccaatactcaaaaccttaaaccactggcaatgattagaggcgctaatttttctactatattgcttccaagtatgagatcaattgacatggatccgaaattgccgattgcacatttcctcgatgatttcttgtaatcgagtcatagaacgattcgcgaacaataaactctaaaatcgtataagtgaatatacctgagattggtgagaccagtgttgccgcaataaaggcaattgaaaggagcaggagtgtctcgataaatcgtttgctgaatcggagcacccaacggatcaccatagatagcattcggcggcacaattccggcctgatacggattctgccccgcgtaatatggaactccgatcaccgttgttccctctttcgccatctcctttgtttttagtttttacggtcaaactcaacgatttcgaagataaagcaaatcaatcacaacgagagaaacagacgaagctgattcgaagagtatttatttaattccctttccgctatgaaaattcccagggaaattacgcggaagacgatggagattcaaggaaagttccaaatctctgacgattacgcgtgtgtacttaatttgagattaatcgcaattttgatttcaacgattctttgattctttctttcctctagaagatagagactccacacttaatgggccttttgtttataaacttaaatacttaatacagatattgggctcaaaaggcctaataattgtcttagacctgttcgttctagctttcgtctaaattgcaaggttcgtttttaaaagtgaagtttgagtttgacggtaacaaacaagcgatggactacaaaagaagaacgtgttggactacaaaagaagaacgtgttgtttaggcctctttgccgacatagcagagagtccatgtcacaatcaccttatttattatcttcttcattactgtaattacaagaagattcagcaaaatgtaatcattgaatgacacagagacttttctaaaatcttgtatttatcaagaacattctaaaaccattatgtgttcttatcttattggttaaggattaaactaaatgtcaaaattcagcctaaaatagtccaactcttaatcccaaaggtaacatcatcaaaaccgcgttttatatatgtataatccaatcttataaattaaaaaaccaagttcaacacaatccatcacatccatttcaatagaagacgaagaacgtttcagaatcatcaaccaaattcagaaaatttcagccatgacaggatcacaagaagaccaacctaagatcatcattgatcaagagcaacccaaaactctagaaacagagcaccaaccagaaccttcttcatcgtctccggatcagaagaaatggggtactcacgtgatgggagctccggcagctccagttgctcatcccgataaccaacaggcggcggcgtgggtcgctggagataaccagcagacgcagtaccaaccgtacgtcatctactctcctgtcgaacatccaacaactaacaaccctctcgagccagtcatcggaatgttccatacctggagtcgcaaggcagaaaccgtcgcacgtaacctctggcacaatcgtaagtctccttccacttaattggagcatttggacaaagcaagtttgagtctttgacgaattttgttggtttttttttttttttttgcagtgaagacaggaccgtctatgtcggaaacggcgtgggggaaggttaatttgacggccaaagcgataacaaaaggaggattcgagtcgcttttcagacagattttcggaacagagccaaacgagacgctgaagaaaactttcgcttgttatctctcgacgacgacaggtcctgttgctggaactgtctatctttcgaatgctcgtgtcgctttttgtagcgatcgtcctctgtacttcacagcaccttctggtcaagaatcttggagctactacagggtaagtaaagtcttgcttttgtaaaagaatgaatttggagattgtttttaacgtaggtctaatgttgtttggtgtttggttttgtggcaggtggttgtacctttggcgaatgtagcgacggtgaatccggtggtggtgaaagagactccacctgagaagtatattcagttgacgacggtggatggtcatgacttctggttcatgggttttgtgaattatgagaaggctacgcatcatctgctgaccagtgtctccgattttcaaaccgcacacggctctgtgtctggttaaaactgttagagtaaaattcttttagaggtaatggagaaagtgtttaagtgttttgagagagttttttaggaaatagaacttttattactttgctttaaactttgaatacaacttcacaacattgcaacatttgagagggggaggaggtatttatagcctccaaactacaaaatatctaaaatattttaatcctaagtctagagagttcttacataagatctagattacattattcaaattatctagattattctattagagtatctagattattctattagagtatctagatttttatgtttaaggaggtggaagatgattctagaaaatttctagaatcttttaaggaggtggaaatgatgatatttctagagaaaactctagaacttggatttggccataattaattattggataattgatccaataattaaacttgattcaaaatcaagtttaactttcaacaccccctcttaaacttgattttgctactccaagcaaactcctcatcttgataaagttttcacccttgagaggcttggtaaaaatatcggctacttgatcatgtgtcttcacatactccaattgcacgtccttcttgctaacacactctctaatgtagtgatagcgtgtgtcaatgtgtttacttcgatcatggaagaccgggttcttcgccaaagctattgccgacttgttgtccacaaagatcttcgttggttcctcttgtggtaagcttaactccttcaagaggtttcttaaccaaatagcatggcatacacatgacgtagccgctacatactcc

SEQ ID NO: 1427 - DNA, 82612 bp, Arabidopsis thaliana
aagctttgatctccagtccaaagacatttttatcagtaagattcggaatctcttggctactaaaatataaagaaaaacacgcgagaaaaagatagtgtttgatattttgtgtagaggttgcgtgcgaagaagcaaaaccccttgtgagggagtgacttgaggatcagcttcagctttctgagacataatgacaaataacaaatgggtttgatatagaagcagttttacttacatcacatgtttagctttcctcttgtggtcctctttttttctccaatctctaagcaaaatcctacacatctcttgaaaattttgtaaacccatggaccccattaaagattcagttgtatcttccttaattgactatttttgaggcatgattagacatttatagcaaagaactaatcacaaaacttcatcaaagccttaaaattcttgctatagatagacatctaaaaaactggtcccaaagaacctaacaaagccacttcacacgctgaagaggcaactctcactgttaacagattccaacaaaacagaagaggcttttgtgattagaagctattgaacatttaaaccagcagacaaggcatatgcttggtgacaactacagttgcacacctgtactgcactaaaaattatctgcctttttacctttgcacgcaactccctattcatcggtctatcaaactccaaaaaagaaaaaatcaaacttcttcaagttgctgagggattatttacatgacttgatgttactttaatcaaagactcatacgagaagtgttatacttttctaagacccttcaggcagaacagaagagtcaaatttatgattcttcaaaatttagcaacaaaaaattctttgttgctatagagaaaaatctaagaaaagagtaataaatatctttgcacatatactagaaaccaagattgaagtagtagatatttttaaatttataaactccaaatactaacactaactaattttatactgattttaatatctttgcacatatactagaaaccaagattgaagttgcccacaaaatttagtttgtgagaggcccaaggagatgagagaaaatgcgattatcttaaagtgctagtttcacaaagagccatggcaaaggagggcttagggacttgggacttatgaattgagatagttctaacttgtaaggctactatatctgcctaaactgattataggttttaggtatgtatgatcaacctgtaggctgtagcctgtggaccagccccgtcctatcccgcctgctgatcagtttttccattttgcaacttcgaaaaccagtctggcccttttgtacccaaaccccaccacatctggtctagtaaactgtaaacccaatgaatccgtcattttcctatgtagtttctagattaaccaagcactgtccccatcgttcatataccaaaaaccaggatagatcttgaacactcaaaccagagagccgggttcaaactgggcagcttgttcgtcactggcccatcacacgattcacaccatccctgcctgtgaaatttcaaagacgaataatctctctacgtgaagataagagccttgttgagtcatagccaagaaggcacaagagactagacaatagacggttcattcatgaatcagtgaaacgatacagaagaataaatatttcatttctcacacattctatagggttattctggatcttagtttttttccagtacatgcaacagaacgactcaacttcacaagcaatattaatcacaagagaaaagaatgcatcttatcatgctgggagtgcgaaactaggttgcttccactgtggcggatccatcaccaggcagggatctgatttctcaaagtcagcaacctgtaaacaaatcaatcatatgaatgaaacaatcttccatacagagaaaaaaaaaacgcacacgagtagcaggcatgaagaagacatataaaagtaccttgttcccacactgagggcaatggtgctgtttgttccagaggcaatccattgaagggcagagaaagcagaaaccaagcataaacggcatcatgcaagcaacaacagcagctacaccaggtttcgatctgtttcacatccataaaaaaaaatatatatcacaaacaaagaagatgtaaaccacaggttgttacaatgaatattttcacataaaaccacaggttatcacaaaggaatagtacagtctcatgctcttaaaattgtttcggtagaatgaaaaatgtaagccctaaacatgaatgccgagaaacgagaaaacgtaaagcagactaacttcattaaaaccaatcaccgccagtatcaaaatagaagagatactgaagtgaagcaccatctaaataactccactactaaggaaaagatgttgttaccaacagaaagagtcacaaagcaggtagctttatctttgcagcttaagtatatttgttgagaaagcttaacaataacaggctggatcaatggagttctttcagccttccttttaagtgatttaagttttataacagcttgttcatatagaagtatcaaacattctatagctaatgaaacacaccaatcaaaatgaacaagtttgagaatcctgaaaccaaaaatccaatactcaaaaccttaaaccactggcaatgattagaggcgctaatttttctactatattgcttccaagtatgagatcaattgacatggatccgaaattgccgattgcacatttcctcgatgatttcttgtaatcgagtcatagaacgattcgcgaacaataaactctaaaatcgtataagtgaatatacctgagattggtgagaccagtgttgccgcaataaaggcaattgaaaggagcaggagtgtctcgataaatcgtttgctgaatcggagcacccaacggatcaccatagatagcattcggcggcacaattccggcctgatacggattctgccccgcgtaatatggaactccgatcaccgttgttccctctttcgccatctcctttgtttttagtttttacggtcaaactcaacgatttcgaagataaagcaaatcaatcacaacgagagaaacagacgaagctgattcgaagagtatttatttaattccctttccgctatgaaaattcccagggaaattacgcggaagacgatggagattcaaggaaagttccaaatctctgacgattacgcgtgtgtacttaatttgagattaatcgcaattttgatttcaacgattctttgattctttctttcctctagaagatagagactccacacttaatgggccttttgtttataaacttaaatacttaatacagatattgggctcaaaaggcctaataattgtcttagacctgttcgttctagctttcgtctaaattgcaaggttcgtttttaaaagtgaagtttgagtttgacggtaacaaacaagcgatggactacaaaagaagaacgtgttggactacaaaagaagaacgtgttgtttaggcctctttgccgacatagcagagagtccatgtcacaatcaccttatttattatcttcttcattactgtaattacaagaagattcagcaaaatgtaatcattgaatgacacagagacttttctaaaatcttgtatttatcaagaacattctaaaaccattatgtgttcttatcttattggttaaggattaaactaaatgtcaaaattcagcctaaaatagtccaactcttaatcccaaaggtaacatcatcaaaaccgcgttttatatatgtataatccaatcttataaattaaaaaaccaagttcaacacaatccatcacatccatttcaatagaagacgaagaacgtttcagaatcatcaaccaaattcagaaaatttcagccatgacaggatcacaagaagaccaacctaagatcatcattgatcaagagcaacccaaaactctagaaacagagcaccaaccagaaccttcttcatcgtctccggatcagaagaaatggggtactcacgtgatgggagctccggcagctccagttgctcatcccgataaccaacaggcggcggcgtgggtcgctggagataaccagcagacgcagtaccaaccgtacgtcatctactctcctgtcgaacatccaacaactaacaaccctctcgagccagtcatcggaatgttccatacctggagtcgcaaggcagaaaccgtcgcacgtaacctctggcacaatcgtaagtctccttccacttaattggagcatttggacaaagcaagtttgagtctttgacgaattttgttggtttttttttttttttttgcagtgaagacaggaccgtctatgtcggaaacggcgtgggggaaggttaatttgacggccaaagcgataacaaaaggaggattcgagtcgcttttcagacagattttcggaacagagccaaacgagacgctgaagaaaactttcgcttgttatctctcgacgacgacaggtcctgttgctggaactgtctatctttcgaatgctcgtgtcgctttttgtagcgatcgtcctctgtacttcacagcaccttctggtcaagaatcttggagctactacagggtaagtaaagtcttgcttttgtaaaagaatgaatttggagattgtttttaacgtaggtctaatgttgtttggtgtttggttttgtggcaggtggttgtacctttggcgaatgtagcgacggtgaatccggtggtggtgaaagagactccacctgagaagtatattcagttgacgacggtggatggtcatgacttctggttcatgggttttgtgaattatgagaaggctacgcatcatctgctgaccagtgtctccgattttcaaaccgcacacggctctgtgtctggttaaaactgttagagtaaaattcttttagaggtaatggagaaagtgtttaagtgttttgagagagttttttaggaaatagaacttttattactttgctttaaactttgaatacaacttcacaacattgcaacatttgagagggggaggaggtatttatagcctccaaactacaaaatatctaaaatattttaatcctaagtctagagagttcttacataagatctagattacattattcaaattatctagattattctattagagtatctagattattctattagagtatctagatttttatgtttaaggaggtggaagatgattctagaaaatttctagaatcttttaaggaggtggaaatgatgatatttctagagaaaactctagaacttggatttggccataattaattattggataattgatccaataattaaacttgattcaaaatcaagtttaactttcaacaccccctcttaaacttgattttgctactccaagcaaactcctcatcttgataaagttttcacccttgagaggcttggtaaaaatatcggctacttgatcatgtgtcttcacatactccaattgcacgtccttcttgctaacacactctctaatgtagtgatagcgtgtgtcaatgtgtttacttcgatcatggaagaccgggttcttcgccaaagctattgccgacttgttgtccacaaagatcttcgttggttcctcttgtggtaagcttaactccttcaagaggtttcttaaccaaatagcatggcatacacatgacgtagccgctacatactccgcttcacaagtggatagagtgacaattggttgtttcttcgacatccatgtgaaagccgtgtctccaatgtaaaacacaaaaccacttgtactctttcggtcatctacgtctccaccccaatcgctatcgctatatccaacaagcttgtaatcactagtagttgaataatgtaagccaaagtttacggtacctttgatatagcgaagaatcctttttgccgctttgaaatgagttgttgttggatgctccatgtaacgactaacaactccgaccgcatataaaatatcgggccttgtgcatgttaagtatctcaagcttccaaccaagctcttaaaggttgttggatccactccttccccttcttctttctttgatagtttgattccgcattccattggtgtacaaacgggatttgagtcatccatcttgaacttcttaagtacctccttagcatagccttcttgagttatgaatattccattgtcttcttgttttacttcaattccgagatagtaagacatcaatccaatgtccgtcatctcgaactccttcgtcatctctttcttgaattcttcgaatatgcttggattgttacccgtgaatatcaagtcatctacatataagcatgcgatcaatatatcttctttttgaattttgatatagagtgcatgctcatatggacacttgatgaaatctttctccttgaaatacttgtcaattcgagtattccaagctcttggggcttgttttaatccataaagcgccttttttagcctcaagactttctcttcttcacctttgactatgtagccttgtggttgctcaatgtaaacttcttcttcaagatctccatttaagaaggccgacttgacatccatttgatgtatcttccacttgttttgagccgctagtgagatgattagtctaaccgtttctagacgagcaacgggagcaaatacctcgtgatagtcaattccggctctttgactataaccttttgcaaccaatcttgctttgtatctttccacttctcctttagagtttttctttgctttatacacccacttcacgccaattgccttgtgtccatttggaagtgaagttaactcccatgtgtcattcttttgtattgatttgatctcttcatccatggcatttctccaagtcttcttttcaatggcttcttggaaatccatgggttcgcactccgcaaataaacaaaataaggtaaggttttcttgattttcggttacttcatagagctcttgtatacttctaaaacgcggagtcctttcactcgaactttcttctatttgagaacttgttggtgaagttggtggtgtagtaggctcttcacttggtggctcctctcttgttggctccggctcatcttcttcaaaatgtggaaagaagttataatcttcttcatttgagttccaatcccattctccttcttcatcgaacactatatttcgactaataattgtcttcttcgtatcgggattatagagcttgtagcctttggagttgttatcataaccaatgaagatatacttctcacttttgtcatctagtttgctccgcttctcatccggtacatgagcatgagcaatacttccaaagactcttaaatgagaaacaccgggctttcttccgctccaagcttcttgtggtgtttttccggagacactttttgttggagatcgatttaatagataaaccgcacacgcgaccgcttccgcccacaactcttttggtagtctcttacttttgagcatgctccttgccatctcaagaattgttctattctttctttccgctacaccattttgttgaggggatcttggcaccgttaattgtcttcgaatgccgttgtcttcacaatacttaagaaactccttggatgtaaattctcctccacggtcggatctcatggttttgatcacaagaccactctccttctcaacatgggctttaaactttttgaaaatttcgaacacctcggatttttctttcaaaaaatatacccatgtttttcttgaaaaatcatcaataaagagaaggaagtaattacttttaccaagtgatttcggcttgatcggaccacacacatcggtgtgtattagctccaacggtttttgtgctcttgaacttgactcctttggaaagctcattttgaattgctttccaagtagacatccttcacacacttgatttggatgatttatacaaggtagccctctcaccatttccttccttgaaagcaactccaatcctccaaaatttagatgtccgaatcgaagatgccatagccaagactcctctttgtaacacatcttaagacattgtgcaatgtcatttcgaatgttgaggacaaacattctatttttcgacattggcaccttggtaatgagattgctttcttggtctcttattgaaaggttattatcttttaatctaatatcataacctttctctaagagttgtccaaggctcaagatgtttgtcttcatgctcggaatatagtaaacgttggaaataaattgatgatctccattcttcaatcgaatgagaatgtttcctttaccttttacctccatcttcgattcatctcctaaagccacatttcctctcaccgattcatcaagctccgcgaacgtactttttctcccgcacatgtgattacttgcaccactatcgaggtaccacttatgattctcttcttgttcatctttcttgtagctagccattaataacatgtcttcttcttgaattttttcttcaacgtagttggccttctcctcaaattttttgttgctaggagctttacattcagaagcataatgtccaaacttcccacaattgtagcatttgacacttgatttatcgtatcttgattttaggtgtcctttcccacgacctcttgatgagttttcacctctttggtttgtgttgtcttcatgtggcctccaaccacgtccatttccatatccaccacgacctcgtcctcgtacttgaccaccacctcttctttggtaactttggccgttttcttcttttgtaatttgcattttgaagacttgttcgacgatatcttctttcttcttcttcttttcttcataagcttgtaatgacccaagaagttgctctattgtcatagcttctaaatcttttgtttcttcaatgacggtgacaatatgttcaaattttagatccaatgatctaagaactttctccatgattctcacatcatctagcttctctccgtttcttttaaggttattagtaaccgtcaacactcttgagaagtaatcggagacgagttcaccttccttcatttgtagtgcttcaaattctcctcttagagtttgaagacgtactttcttgacttgatcggcacctttgtaagaggttcgaagcttctcccatgcttctttcgccgacgtagcttcaacgaccttctcgaacgtatcttcatctaatccttgatagattagacagagagctttcttgtctctctttcttgagtctctcaaaccatctttttgaatttgagaaagactaccttcattctccggttcaatgaaacctttctcgactatctcccacacgtcatgtgctcctaggatagccttcattcgtagactccaattatcatagttgctctttgtgagcaccgggacttggaagggaacattgttactcgccatctttaggatcttcaagctctgataccactttgttagagtaaaattcttttagaggtaatggagaaagtgtttaagtgttttgagagagttttttaggaaatagaacttttattactttgctttaaactttgaatacaacttcacaacattgcaacatttgagagggggaggaggtatttatagcctccaaactacaaaatatctaaaatattttaatcctaagtctagagagttcttacataagatctagattacattattcaaattatctagattattctattagagtatctagattattctattagagtatctagatttttatgtttaaggaggtggaagatgattctagaaaatttctagaatcttttaaggaggtggaaatgatgatatttctagagaaaactctagaacttggatttggccataattaattattggataattgatccaataattaaacttgattcaaaatcaagtttaactttcaacaaaaacatactattcctctaatgtttttctttagttgtgtggttggtttctgctgcttctcatgtttctatatgtttatgtaaattatataccagagctggacttttgtgtgttgattcagagttggtttcacttattcattgatttcttttgcagtacttgtttctttttgatggttattgcatacatttgagctgaattctatacattaataatttctcccaagctacagtcactattagttttgacaatctttgtatagttttcaatttttgaaaggtcacagaaagctcattttgatcttttgcaatgctgattccttctaccttaatatccatttccagtttttaaatacttgaccagcctccacattcacatgtacagcagagtaatttctgcaatctcatcagctagcatcgcaggcaatataatgtttttaaatttctgtaaatataattttctctcagtgtcctttccacgttgtttcctgtttgaatccttaaaatactcgaaaatagtacatcataatacaatgtcagattcctctggagcaaatattagagcatcattaacggtagtttcttagtataattttaatatagttcttatgaatatttttgtaattgattttgaaaattttgaagttaaaaatttgattaaaagattaaatttttggcaatatgcaatggtggactcttaacttgagttcttaaaaataaaaaaaaaattaaaaatattctaatttttaaaaacttaataattattacaactcataaaatttgatatatataggatataaaattttaaacaaatatgacaaacaattagatttaatatttactttatctaaaaattaagattaattgaattaaaacattatatttaatatctaatttatctaagaattaacctaagaaatattagatttgactcttatataagagccatttttaacatttaattgaattataatattaaatttaagatttattttatctaagaactaacctaaaaaactatcaataatgatggttttatagtgcttgagatgacaagtggtcgactgaatcctagagatattatttcattaataaatgagacttttaaacttgttgattctttcgcctccacggaaaaaagggatctctaaccaatcaactttgacaattataatacaaatttaaggtaaaaaagtctttccatcctaaaaaaaagaaagtctttccaaacaacttgatccccaagtaagtgaattgcataaagaccgacacaacctctaaggataactttaatatactcatatcttttgtgaatagatgttatccttattagtttgtgacaactttcggaagccctagctaaggtagtcggcttatttcacatctatattaggtgcagcctctagtctcctcaattcaataacacaatcttcttctaaatcattttttgtcatctatcacttctaatttctaaacaacaaaccatgtctccttctcctctgcttggtccacctgagctcagagatcccaactctctcctcccaaaacccaccacaacttctggtcccagcgaccctttcatggacgctatggtttcaaatttcaacaactcagctagagtcaacaacgtcaactctcctccgatgggctacaccgagaataaatccgccacttacctctcctcaggcaacccctgcctcgacttcttcttccacgttgttccaagcacgcctaaacactctctcgagcagtggttacaaggtgcttgggaccacgacgccttgaccacactcaagcttatctgtaatcttcgtggagtccgtggcaccggaaaatccgacaaggaagggttttacacggcggctttatggctccatggtcgtcatcccaaaaccctagcttgtaacctcgagtctctttctcaatttggatactttaaagattttccagagcttctttaccggattctacaaggatctgaaatccggaagatccagaaatcagaaaggttcaagaggaaaagtgaagctctagatagaagagctccttatgatggtcattgttatcatggtcgtctttatggtggtcgtggacgtggatctagtcgccccagtagtaaaaggaagccagtggcgacgagggcgttgagagtagccaacgctgagaggaagaatcaagccgagaaagccagagcaagcttggatcggaagaaaaagaaggtttcgatggggaaggacgcgtttacaagatattcttgcgatccagactatagatatctccacgaacgcgtctctgatctattcgcaaatcagctaaagaaagatcttgagtttttgacatcggacaaaccaaacgaaatctctcttgctgctaaatggtgtccatcgcttgactcttcgtttgacaaagcaactcttctctgcgagagcattgctaggaagatctttactcgagaatcattccctgaatacgaaggcgttgtagaagctcactatgcatacagagttcgtgatcggctaaggaaagatgttcttgttcctctgcgtaaaactctgcaactgcctgaagtatatatgggagcgagaaactgggatattcttccgtacaaccgtgtagcatcagtggcgatgaagtcgtacaaggagatattcttgaagcacgacgcagagaggtttcagcaatatcttgacgatgcaaaggcggggaaaaccaaggtagctgctggtgctgtgttgcctcatgagataatcagagagttagacggtggagacggtggacaagtagcagagctgcaatggaagagaacggtagatgatatgaaagagaaaggttctttgaggaattgtatagctgtctgtgacgtttcagggtctatgaatggtgaaccaatggaggtttgtgtggctttgggtctgctagtctctgagctatctgaagagccatggaaaggaaagctaataactttcagccaaaatccggagttgcatttggtgaaaggagacgatctgtactcaaaaacagagtttgttaaaaaaatgcaatggggtatgaacactgattttcagaaagtgtttgatttgattcttggagtggccgtacaagagaagctgaagccggaagagatgatcaagagggtgtttgtgttcagtgatatggagtttgatcaagcggcgtcgtcgtcacattattcaagaccaggctatgcatttttaaggcagcctccaagtaatccaagtaatggatgggaaacggattatgaagtgattgtgaggaagtataaacagaatgggtatggagacgttgtgccggagatagtgttttggaacttgagggattcgagagcaacgccggtgccgggaaacaagaaaggagtggctttggtgagtggcttttcgaagaatttgatgaaaatgtttttggaacatgatggagagattgatcctgtgatgatgatggagactgctatttctaaagatgagtataagtcgcttgttgttgttgattaagaagctttactgtttttttgagtttggttttgtattcctgtttcatggttgaagcttccattgcaattttattttaataaatttggcccattgattttactttttttttctgaaccaagtaatcgatacgagaccactaacctggcttttattcatcaatcgatgctctctctacacgtaacctgcttcaaaacactcatagttcgccggaaacaatcactcgtatcatcggatctcggcgtttagaattcagaatccgacgactttggcgagcaaaccttacgcaaactatggatggtattggaaatgaacgacaacaagaacaaccgtttcatttacagatttacttcttcaaatgggcttttcttctctaaatgggtttactaccttaaggggcttttcaactataggttcaattatattcttatgtaagggtactaactagtgtgggctgtaaacgacttaaagtttcggccatttagttttatgcaagaaaaaaaatatagataatacagtaatgatgaatccactatacatgttaaatccaatataataaatccactatacattagtgttctcatatttcgtttcaagattcgattcaaaaaatttgaaaatgttaaatatgtgtttctgagattaaaggccaaaagaagggtaaggtcgtatatgaaaggtggacagaggggcaaattagtcagcttgaaaaatacatcgacattaaaaatcggcagcactgacaaaacgtgtgataacacaaataaaaataatcggaagaaaaagaataaataaggcgtattgactctggaacgtgagaagatgaaagagagcgacgaaaacctctaaagacttatcgagaagtgcaccttagcctagtgaataatgatatgtattgacattaactactactactacagctcccaacacgtgaaagacatgcatctaactctttcactttcggttgccaagaaaaaaaaaaaaaaaaaactttcactttcggcatcaaatatatactactaaaaaagttttttatacgtaattcttttttaatatttgattagttcagaatattaattaaaaaaattacttttcgtaatcactacattttgtagttatatgatttttaatttaaaatagtaaaaaggagaaatgtaactaattaagctaacatgcgcgcgatagaataaggtgaagtttaaatttgagcacaagatagaaaattgaggtcaatttaattcggaagtggttcaaggtatattttcacaagaaagaaaaacgtgagttcattgaatccctctataactttacttgagaacaatgtaataatatgtaaatctgttaggaaacgagcagccacatatgctttaaacaagagaacaagaaaaagagcggccacatgtgaaaaaaaaacaccagccaaaatgtgaaactaagaaaagaaaagaaaaaccatcgacatcgtccaaaggatcgacccgtcttttctggtttggcagaaaacaaacttccaagttccgacttgacctagtctttatgcatctgcagtggtgttttctttaaatctttttttgaatggatttgaaaatcttattttttcttcttctttcaaaacactaactgtgaatcaccaccaacattttattgttctaaaatccctatttgtatgttttattggttactttcccaaatatgatgaaagtttattggtgtactttagtttagaaatgtaagaaatttcagttgtattattaggtcaaccaaatattattcttgaatagtaatgtcaaattttgtttatattgaaaaatcaataagactgatatctactaaatgtgatttgctatactagtagagctagtagtagcaagattaaaattcatattaagaaaaaatggaaaagaaaaacatgtttcgagaaaaatatacagatcagagactagagtagaaaacaaatataatgtcagaagaacccaatgtgacgaacagtaacagaaacatgttaccaaatttttgaagatatatttttataaaacattacaatgttcattggacttccgttatttccggatataaaatatcttctttctgcgtagcaagcaattacattacattaggtatattaagaatttaaacatgtgttttgaatcattaaattaattagataagtaagagaagaggttgggagcctaataaaaacaaaacaaaaaggaaaaagtggataggttgccaattgtgccgaaaagaaagagaaagcatgaacctcgtgcgttaaataagtatcagagacatactacattttaaaaactctcacatgagaaatcagaatccgttattattcctccatttattcatctcaaaacccatatctctctgtcttgatctctctctcactttctaataagatcaaagaagatgtcgaaagctaccatagaactcgatttcctcggacttgagaagaaacaaaccaacaacgctcctaagcctaagttccagaaatttctcgatcgccgtcgtagtttccgaggttcgtttggtttttagtcgctctctcttttttttttcttgcgataaatcgaatttattcatatggaactcctgcagatattcaaggtgcgatttcgaaaatcgatccggagattatcaaatcgctgttagcttccactggaaacaattccgattcatcggctaaatctcgttcggttccgtctactccgagggaagatcagcctcagatcccgatttctccggtccacgcgtctctcgccaggtatttttgtctttccggtaaagttttttttttctttctaacttttttggcgctaccagaaaagacgaaaaaatttgaaattcaaattttcaaaacattcattttcctcaggtctagtaccgaactcgtttcgggaactgttcctatgacgattttctacaatggaagtgtttcagttttccaagtgtctcgtaacaaagctggtgaaattatgaaggtcgctaatgaagcagcatctaagaaagacgagtcgtcgatggagacagatctttcggtaattcttccgaccactctaagaccaaagctctttggccagaatctagaaggaggttagtataataaaaataaaaatcacttagtgctggattcttctagaattttagttacatattattgcatgtagagatctaagaagagtttgttgttagagaggaattggttgctaattagtttggaattagatatcaaagagttaaagactatagtttatgtctatacgtattaatatacgttattaataaaagtataaacatgttgtttaatttctgataagaaactggtttatgcgtgtgtatgcagatcttcccatcgcaaggagaaagtcactgcaacgttttctcgagaagcgcaaggagaggtaatgattcttcaacaatccaaggatttttacccccaaataattaaagaaaggtttttatttttctctctctcgaccttttttttactataagttatttaagatagtaattatgggtcctgcctcttttactctcacatacaacttaagattcaactagttttgttcaacaacgcacatgcttatacgtagatagataatggagatcagtagtaatatcggtatacgtaggttactattgtaatggaacttttaaaaagcgcgttgactttgagtctttgactctagttctgtttgctacaccgacaagttatatttttcaaaatgatgagaaaacgaggagaaacaccggaaaaaaatttgaacttttacttttatcagaccatacggccaaagaaagatctgtatattatataagttatcacaaaacgcggtttcacattttctttttcgtcttgttgtgtttgcagattagtatcaacatctccttactatccgacatcggcctaaacgatctctttttagattgggacatggaccaaatttgtctttttcaatcggaagacatccatgttcgtttttggatttggcttatttccaatcttcttttgaagccttcttcgtcgttgctaaatcgtatactattcacgacaaacgtttttaggagattacgttacctactaagattatatatattggtttgtttttaaaaatgtctattatctttattgtcattgatagcttgatttaagaagctctctcttatcccgtgaccttctacttttgttttattttttagtatatggtaaagaaaattataacacgcctcttttagcttctcatgaagcttccgtatcagagtattattaaaggaaatgtggccattcatctttgattatattggttggtctctagcttgggttgtcctaattgttataatggaaaacagtttaagaaacacgtgagtattagttatataatactatcaagtctacccgactaattgtgtctttatgtcaaaagtcttttaacatgagtttggtggaatttgtacattggaatgaagatgaaaagaagtggtaaagtgaacgtactttgtgtggcttcttttagacaattacccctttcattgaatagtatccatcactagtactaacaaaaaagggatggctggtccggatttaagaaacaaaaaccacacaaccattcactgcgtcttctttatcattgaaaccaagatactgtagcttattgatatgaaataaataccaccatgtgcatacgtgagagtttttttattacatgtagtttcttaaaaatgttttcgtgtctctttaagttgtgtcaagtaaattgcttctcatttaatctactgcgatgacataaacttagtttgcacattgcaatggctaatgagagtactaaacttacatcatgttgtttaagctttgaagatggaataccgtatatcaagttttaattagtagctctgattcagatgtttggtttagattcagattcagattagtcaagtgtttggctttggtcaagttgactgcataagccaatcctaatatctttgattcatcacgagtaattcaaattaattatttgattcgatttggtccaacaccaacagtttatcctgttcgtctggaaaaaatctaatatatcaaccagctatttacatagcattcggccaaatcattccaatagaatgaaacatcctatatcaatcaacagatcgagaaaatgaatgtccaaaaacaaaacctgtactaactgattcacatcagtttggaaacaaacttaagaaacaggaatacttaatttgaggaaaatccttgtaaatttgattataaaaaaaattacttgctagatggcaatacaatctgcggaactgagagatttcataacccaaaaaaaaaggaaattgcataatttaaaattcaccattatcagttttgagcaaacaaaacagaagttagaaaagagattgacgaatcgggacatcagttttaaaaagctcgatttatataatccgcatgagttataggaaagcaccgttgtagtgcaaaatattcatcatctgctccgattcgttcaatcaattttttcagttgaaattaagattcagaaaaacaagaggaaaactaaacaccaacttcaaaacaaattctagcaatcctagcttagaaattcagatcttaaacatggaataacaaataacgaagagtattgagaaggagagctaacgaaacgaatctgagtctgttgggtcatcacagctacagccctcttttatagggtgaagcctttagactcagagaaaccctagttttgaatttggttatcgaatctgggccacatgggtcacactattacacattattgggccggcccatatctctttaaatttggtttatccagaatcattcgatctcagttgggaaaaaccggttttgaataaaccggattggacactactccactacttgtctccactctgctcgtaatccgcatgatcgtgttcatgagaataattcatgttgcgcagactcgcagattgatgatccgatgcaatcgcattcgacaatgtgggttttctgtgaaaactgcggcattggatttagaatcgtcggattcgataatcccaggcttagactctcatgcttacggtgcaatgctccgtcgctgcattcagaagaacgacccaatttcagcaaaggctattcattgcgacatcttgaagaaaggaagctgcttagaccttttcgccacaaacattctactcaacgcttatgtgaaagctggctttgacaaagatgcgttaaacctgttcgacgaaatgcctgagagaaataatgtctcttttgttactcttgcgcaagggtatgcgtgtcaagatcccattggtttgtattccaggttgcatcgagagggtcatgagcttaatccacacgtcttcacttctttcttgaagttgtttgttagtttggacaaagctgagatttgtccatggttgcattctcctatcgttaagctcggttatgattctaatgcttttgttggagctgcgcttattaatgcttactctgtctgtggttctgttgatagtgcaagaactgtttttgaagggattttgtgcaaagacattgttgtttgggcaggaattgtatcttgctatgtagaaaatggatatttcgaggattctcttaagctgctatcttgtatgaggatggctggtttcatgcccaacaactacacctttgacacggcgcttaaggctagtattgggctaggcgcatttgatttcgcgaaaggtgttcatggccaaatcttaaaaacatgttatgtgttggatcctcgtgtgggtgttggtttgcttcagttgtatacacaactcggagacatgtctgatgctttcaaagtgtttaatgagatgccaaagaatgatgtggtaccttggagttttatgattgctcgtttttgtcaaaacggtttctgcaacgaggcggttgatctttttattcgaatgagggaagcttttgttgtccctaacgagtttactttaagcagtattttgaatggctgtgccatcggaaagtgttctggcttaggtgagcaactccatggtcttgtagtcaaagttggctttgatttggatatctatgtctcaaatgctcttattgatgtatatgccaaatgtgagaaaatggataccgctgtgaagttatttgctgagttatcaagtaaaaatgaggtaagctggaacacagtcattgtcgggtatgagaatctaggcgaaggaggaaaagcgttcagcatgtttcgtgaagcgctcagaaatcaggtgtcggtaactgaagtaactttctcaagtgctcttggagcttgtgcttcattggcgagcatggacctcggtgtccaagttcatggactggcgataaaaaccaataatgccaaaaaagttgcagtgagtaactcattgatagatatgtatgcaaaatgtggtgatatcaaattcgcacaatcggtgttcaacgagatggaaacgatagatgtcgcttcatggaatgcgttgatctcaggctattccacacatggactgggtagacaggcattgagaatcctcgacattatgaaggatagagattgcaagccaaatggtttaacatttcttggtgttctttctggatgcagcaatgcaggattaatagatcaaggtcaagaatgttttgaatcaatgattcgtgatcatggtattgaaccatgtttggaacattatacgtgtatggtcaggcttttgggaagatcagggcagcttgacaaagcaatgaagctgattgaagggattccatatgagcctagcgttatgatctggagggcaatgcttagtgcctctatgaatcagaacaatgaagagtttgcaaggagatcggcagaggaaatactaaagatcaatccaaaggacgaggcgacatatgttctggtatcaaacatgtacgcaggtgcaaaacaatgggcaaacgtagcttccattaggaaaagcatgaaggaaatgggtgtcaagaaggaacctggtttaagttggatagaacatcaaggtgatgtgcattacttcagtgtggggttatcagatcatccggatatgaagctcataaatggaatgttggaatggcttaacatgaaagcaactcgagctggttacgttcctgatcggaatgcggtcctgctcgatatggatgatgaagaaaaggataagagattgtgggttcatagcgagaggttggctttggcgtatgggcttgttcgaatgccatcatcaagaaatcgcatactgatcatgaagaatctacggatatgttcagattgccacagtgctatgaaagtgatttcaagtatcgtacagcgagatctggttataagagatatgaaccggttccatcattttcatgcaggagtctgctcttgcggcgaccactggtgaatggtaactgactacgtacataaacacaaaatctcaactttttttctcttcagttgaatttaggtacattagattacgacaatgcctgataagtatttgcacatgacatagtacagagtattattagtagtcacgtcaactacacagataaaggaaagcgaagagcttaaccttggacttcgactcggactcatacaagcctagagactagagatcacacatagtcacatagatacaggtttccacagaatatgtgactcagcataacgatacagagatcacatatccatgtcggcaaagatctcttcatcctcttcatatggaggactgtcagtgagaaatgcatcatttgccaggttactgcaacaaaacatttttcgagttggaagtactttttaagaagaagacagtgagagagaaagacaacttggtaggatgacaatcatctaacctcgtgcaggagaaacgaaaacccgcaacgcgcttcagttttcggttgtagaataagaaacagaaagaccatctggatgtgaaccaaaagaaaaagaaagcagccttttagttgacagtcaggctaggatctctgaataggcttttagaaaaaagaaagttgttgtaactcacattgctccttcctcgaggaaaggatcagcattaggatttggattgtaaacatatatctcacattcagctagttttacgacctgtatcacatttgcatgatttagttctttccattacacttgcccaggttctaagattccttattacagggaacttacctcatcaagagccttgtagatcacctcaagaagggaaccatcctcattcctctcagtccattcctatagagtaattaggagaatacatatattctacataagcttatgtgcatcacaatccattacattatcgtcctttaaagaaacttgatggaacatcgaatcggattgttgaagaagggtgaaagtgattctcccttgcaaaaacaagctttttctagtttccatccaaacagaaaataattaacacttaagagtaccttagaagcttcaaacatatagttgttaaaaatctgcttaaaggtgtcccagctttcctccgagaaaaactgatgtgctttgacagcgctggaaacgagaaaatagaaagaaaaaaaatgcgatggtgatagagttatatacatggacgtagttcaatcaaacacttgagacacaacaagtttgttttagattttgggaaatggagagaattgaactctcagcttctacagttcaatgaaccgttggtcaaaccttatgacaacactcccagacatatttaaaggggggattatatagcgggttgccatatcgcccaagaagctgacaatgacattacccataatcccccccttcataaaaggaaacatagttttcccttcaggtttacaacacacacaattacctgaaatcgtagtccggatacatttgatagagcgtaagaaccaagtagatcaaagcctttcgactgaaataagcacccagatataagacgttaagacgtataaatatcatttaaaaaaggggtcaaaaagaaaaactctgtaacttaaactcttaccttgatctgcttaacaagagatcaacgggtgaagaagagtcggtgtcagaagatttcccaagataatcaagcatctgagttcaagggagaggagcaacaatagataaaacaactaggtcaacgcaagcagcaactgtacacattcaatgattcaagtccaaaacacatgcttgattgcaattattagatgcaagtcaattgcaatcaaatgaatacctcattctccaaactaagagacaatcttttatcacttcctgcatgtttgcctatcaaaaacaaaaacaaaaagctttagcttgttttccttgtagcccagaacaataattgatagagagaacacaaacaggtgcttcttacaagaataagcttccaagcaacctttgatagtcctttccccgagattaagatgacccagaaaaacattcaatctggaagcaaaggttttcaatatcatataaatattccaacataggaaaaatctgattctcataattcacaaaaaactagaaataactcaaaaaaaaagaaggtttaacctgtctaggttagtgtactccaagaacttcatgatagcagcggctagatcctccagaaagatgcgataaacaatgataaacctaagaattttagacagagcagataatttcagcttatgcaaaattatcacagatctagctgaaactaaagtttgaagttaaacaagtccaaaatctgtataagagcataattgaagaaccagaccataataacatgaagaacaccaaatgaatgcctcgatttcgaaaccctaaattcaactaaaaatgtaaaatacgagacgcgaaagtgaaatatatagactctcgactacaaaaaaaaccagatatataaccgaaaatttgaataaaaacggtaatagaattggaattcgaaataccctgtaattgctagacactagagagaaacgattacctgaaaaaacgatggtggaaggaaaaggcgtaaattgctccgcttgtgtttttctctttctattacgaggctaagatctcccacgtgcgaaagatccgtatatgctttgtggacagcgaagcatctgaatctcaatgatgaactgcgtgccgtttccatgatattacatgggccgtctgaaattgggtcgttaatttccaaaatttgtatttctttgaaccgattcagtaacaaaacttggtaaagagtttctcccaagaaaataaattcgttatattgttagataggtaaacacgagattcatgttgtataccttcgaaattaattgatttatccaaactggacggcattacatgatggcctcaattcaggtggaccacgttaacgtattaataaaccataatactttttgtaagattttcttattttgttttcacttatcaaatcagtggcattgattttattttgtgggtttgatttgaatgttatggcattaggttttttcgtacttaaacctacttagatattgtctaaaggtaaaacttcaaagacatgagcatgagcaataagacgagttaggatttcatttgaaatgaaaattctattggtattcgtgattttgtaacaattaattattttcatttcaatatcttgctattcgaatttacactttctggtttgacctaaaattaatttattatctagcttattttggactttaatttaaccgtgtgattctgaactttgtttcgggtttaggaacggaaaaagtgagaccatgtttcagtcgaaaccaatttaccaccttgaacgaaggcttacatatttttagttttatattttttataatctgagcattttcttggagtagaaaacaaaataacgtgtactggaaaagcaagatatgtatcaaatttaaaataggatggaagtggcagatggtcatgattgcgattctggatggacactctctgtgttataggctccatgcgaaaacaacaaccaaagaataattttagcttatggttttctgtcttagttcgtttcttgtcttttatgtcttccaaatattctctctgtatatatattatataaaacaaaataaaaagatacttaagacattatagggtaagtcattgtaaaaaaatagacggcatccaatgatatgcaaaccatgaattgtcgaaaagataagtataaaaattggaccaaaataatgatttatttcagtgcaattttgagttaccatatccaactttagacatgaaaaaatatatgtaaatactatcaatgttgctattatatgaatatcatcgtcaacaatttaccgttgtagcagagggttaattagctaaaggagccactaaggtagcagcagaagctacggcaagatctctttggaagtcacaattcataattactcgggttaattttctattttggttgtctcctctttataattttgtatgtgggaggttttgtgttttacatgagcattacaacaaatatttgagtccatttgtgtaaccatttttcatccttttagtaataaatttatcaaaagaaaaaatgtattgttaaacaaatatcaacgaagtgaacacaacagtatgcatattgttggtttgttgttgtttgacgaattaccatgacttagccacatcatatacatatgacatttctagtgctttgatttgattgttcacttatttaggcagtcattatttgtaaacgtatacatgtgtgtgtgtgtgtggttcagcataatataataacaagagaaattaaaatagaaaatattgcgatcaactttaatctacatatgtcagagaatgaatatatacctaatttagtggagttttgtatagataaaaaaaaagagagagagagagaatcccgcgtgggccgcaacttaaaaacatgaaaaatacttggaatcaaaagaagtaagttgatacagaaatttgatttgaccattgaacgagagagttgataatattctatgaatgcacatgtatcggtgtatctctctatgtatttaagttgtaaagtagaatatattcgttaagacgtgaagaggaaagaggtggttgtaaataaaggggacatgcaatgcagaaagagagagaaagttttgtttcttttacaacattggaatgataactcttccactcaacttcacaatatgcctcaaaatttacttgtcccaataagcctgcctaaaggcacctttcttccaatatgcatgtccaaatttatacataaaacaacaaatactcgcataaaaaatttgatgatcaagcgatcgatactgttacgtctacggctatatatatatttttttcatatgtggactacaatgtatacaaaaaatgtgtaacccttttttgtcatgtataaagatttgtttccaactcggttgttatgtcaaattgtaattttgcaaatttggtgacaattaattacaaacatcaactccgcatcccaactcatgtattgatcaatttagcaaaacaaacatcattttgagtaaaaatctttatccaaccttaggatcatgatgtacaaacgatcgatcacttagccaactctttttctcatttctgttttcagtaaatgatcttggaaataaacaaaaggaatctttgctttatttgtatctgagattttgtcttttcccttacttggccccatgaatattatttcttagtacacacgtatacatattgttatgtatatattagtgatttagttctaagttcaaaagtttattggaatagatatagtctgcaacattagctaacatttttctacggttctaccatctactacaaagtataacttcactctaatgtatggaaaataaaataattaaatggcatagtcacgtaagcgaaaaaaaaaatgaacaacccattcaaaaatgaaataaaatcaaagagttattgtttgtgtagacatccaagctcaaacagttttacataattctattttggtgtatcgttcctttatagtaacaggactttgatgttatcattttaaaaccttttgttttcaaacacaaaagggataaagcttttttgtggtttgattcaaaggctaagtcatttcatgccccatgcaatgtcaccaaaggccacgcctctcaaccttttcattccccttttccaccaaaagctgattctctccctctctttgcatgtatatatatgtcctcttgatgtaatacactgttctttattgaccatgcactaatgttgatatctaagagtgtcttgaagaaatatttcttattagaaaagctgaaatgtgcatactggcaacaagggaaacattcaaaactaattgaggtggaaaaactgttaagtctttatgatcatatcatactatccatctcaaatgtgatatgggtctacggtctacctcaattgtttgtatatacttttacgtttacatttagtgtgtaattgtttcagataaacccaaattttcaccacatttaaaacaaattttcttaacctgattttttacttgggagagtcagcttggccgagtcactcgtactagatttgccaaaaacactattcttaacctaacttttctattcgaaaaaatctttttaagatctaaagaacgcttagaacttatagaggtacatcttgaaacactttctagctagccaatataaagatatttccaagctagaaggagtggaaaatgaggtgaagatactaagacatcttttagaaactcgttctgctgttttgttttttgtttcctattcttatgttttttttttcttcttttaaatgatgttattgtttttactaggggatatatgatcactagtaagggcttgctatgatacgatctatacttatttagagtgtgatcaactatctcattgaactgtgatatgagcttttattctagtttgactgatgccttgttgaggatttaagtaggataaagtttcttaatgaacaccaatgtgattgggatataaacaatagtggaccaaacaaaggttgaagatcatctatgagcagttggagaatccatttgaatattaatcatcattaccacatgagtttccaccagagaggtccccttattcatataactcttctaatattaattgcacattttgatcagctagccagagtcaaagttctagatatatatattggagaaccaacctaatcgaccgtttttatacatgcatgatgaaatgagagacgtacgcacttgctcctcaagtccctttacatccccaactcgtacgaactactccaaatgttctttttactactatcagattttgagctctagccttaaagccacagagaatgaacgatgagatgtcttgtagtacttgagaccattcagaatgagctgaagtcttcactttacttttgtgtcttaacttcgatagattagacaatcttgttaacttctgagagagggtctctcacacttaacattttctagccacttagttcaacaatgttgcactatcaacacgaggtcatttggagcagattgggatataaattggttttcctattttattaggaaatgtactagctcaagattgttggggagcacatgcttcttaatagaagtacaattccatgagaaaccaatgtctctcaaagcatcacaagtctgtatgttttgctgtatgatctcgggaaatgagcttttaacccaaaacatcatcattttcggtgcatgccaaactccttcaagtgtctttttttttttaattctttaatcagtgacttaaatattcatagttttcatttaggaataattaagtattagtcttgggattattaaacacttcatatctaaataattgaaatttgacaggtctaatgtcatcatgcctcgcactccactcgtctcgttttctggctttactgataaacccagcttttatttaattttaaccgagaaatacccaaaacaaacatatttagaaaggggaagttctttatctgtttaaagacaacacacattagaaaagaaaaaaaaaattgaacttcagaaaaacgtaatatgcatatataatttgactcggtcaacttattgaaagtacgtcaaatcaaacaaatcatggaactaaaatgaaaatccgaagttataaaatggtactccggtcctcaattttatatatatatttcaatgtatatctcttatcattacaactaatatattttcaagtttctaacaaaatcatgggagacggaaaataaaaattatatcacgtttatacaacagattacatatataagtctgtacgtagttcctgtcatgtaatattacgttgaaaagatgttcgaaatatctgaaaactttcgttggcttgttgacgcaggaaaattacttgttatattcgattttagattattgcgggtcgggtcctccatgcagctggattggttcattattaacaattatctatgtaatttgtacattcaatattaatattatcatgctcttggaatcagtccaagtaatttggagcgatttgaatgaactcgctagaaattctacataatcttatatgatattgttaattaagtgacttttctcgtaccgatcgatatatcatatatgtcaacaatatgtgaacaagttacgtcgtaaacactaccaaatatatgcggcaaaagaccctggccctccccagggtgacaaatgtgctactaatttgacggttgtgtacgtaaaacaaaatccattgcattcggaaatgcacaaaaaataaatttctatttaaaaaaaaattgaattttctcatcatctttataaacataatttttttagccttttattgttaaaaaatgttattaatgaaattttgttaaaaaaatgtttagccttactgtcaaaattttaatgttaagaaattcaaaattttgtttgaaggccgtgtatatgaattggctgaaaaagaaaaggaaatacgtttgtgtatgaaactatgaacgatgtaatacggaaacatatgtaccggattgacctcataaaaagcttttcgcataagtaatttagagcgatttaaatgaactttctaaaaaacgctatagtcttaaataaaatatttaaagtgactttcctcttaccaatatcaagaatatgtggacaagtaattacgtcgtaaatactcccaagcataggcggcaacaattcttggccctccccggagtgacaaatatgctactacgtactaatctgacggttgtatacataaataaatttatcgcattcagaaatgcacagaactaaacttatattatggatttataaatatattttttagagataatttttattgtaatgattcaatcctactttgccgttatatatctaatattattaaatcacatagtttcaagagatgcagataataaatctcaatttctctatctggaatctttcaattttgttttaaggccgtgtatatgtggtcgctgaaaaagaaagaaaatacgtttgttttgtgtaggaatgatgtaatacgaaaacatatgcaccgttttgaccgcataaaaagcttttcgcataactagtgcccattactctctataattgcaacattgacctttccttctctctctctttttctctgcaaaattttcatttccacaagattccaaacaaagagaattgatagaaagtgagatttgcaaaatttattctatccctcctcttgtcctctcttatcattaaaacacatataatctctctctttctctctctaactagcgccatgacttctcatgtctccgaccatgcctcgagttctcgatctcttgtctccatctaagaaccctaatttatcttcactcctccgtctcccctgatgttgagatcatcaataaccctttgcgtcgcttctctccggctttctttggcttttccggtcaccggactctgccatggtttctgctgctgaatcctcttcctccacgtcaacgcttcttcttccatgtgcgtttgccaacagttttgcttttatgaggttattacaaaaaactcatcacttctctgccgtctctgaggacgacgacaacaacaaagacattcacttaggatctgatcatcatcaggcaaaagataataatcatcaccaagtttttaggagagagtgtagtttcatggccgatcaagaagagccgaggagtactacttctaggttaagctccaaggaggacgaccacgacaacaatagcaataacaacaatattaataataataacaacaacgaagccgaagatcatgagatgagacaacaagggtggctccggttaagcttaggtcacgaggaggacgttaaaccggatctcgaccatcggcagcaacatcaaactgatccaacggctaggagagactcttttctagagcttaacctttcctctggcggttcaaatagagaagaagaagttggtcttccattgtcatctctctttcatcatcagcatcaagccggagggatgatgattaatccattgatgttccatacaaggcctcaggatatgattggtccttgggcggcggctgcgtttagaacgccttttgtcccacaaaacctaacacaaccatcatcatcatcatctggttctttgatgatgccattgatgggacagtactttggtcgctctagttttcagccgcagttaatagggaatgataacccggatggggtggcaggtccaagctcgagtttaagagtcattgatcctcccagacgaccccattccggcatttggtttctccttcaagcttctcaaaaccagtaagtacccttaattttaatttgctagagaccatgttatgtaaggtccatatacaatcggttttaatcataattaaggtgttctgtcaagatcttatatatattttcaaagcgttacagtttttgaaattttatttggtggacgttttaggacagtagaaccattcttgcctcagattccaaagagctacttgagaatcaagtaagtactcagtcgtttattaagattccaccattgtcgttatttattcaaaagttagctaattaataagaagtaacccacaaaacgacgttaattttatcaaaagtttatggctaattaattttgatgttcctggatttggtagggacgggaagatgactgttcgactgttgatgaaatatttggtgaataagttgcgattggagcacgaatcccaggttttttctaatctcatttcattcttttaatttccctttctttaactttattgttctagattccatgtacacgttgcttgccgtaactacaatctccttagctttaaaaagaaacatctaaaacgttacataaatatacctttaagcattaaagataatgagaatagtacgataaaatagaaacatatattagtaaaagaaaataagcaaatgtggagagggtatattcatgggggttggtgtactgaggaacatgacagcaacatgggaactaaattgccacaaaaagtgtctccatgttaattaggtcacaagtagatgtcattgctaggtataagccgtttttgttctttctttgtttttatatgtctattatccattaattgattttcaacctttttctagtttgtcttacttgctcctttttatagtttaggggtaattgattaacggtcgtcagccattaattaatgtctaatatgatcaaaattctcattagagatgagtgcaccctttaatttatttattttatgcatattatataaatatatggcaatccacctaccaaccacattgatttatagaatccatttttttttttgcaattatatatgtgtgttttcgtgtaaatgtaagtacattttgaaatcaaaatagtggtctttttaacctaatatatataatctagtttatgagattataattctggataactttttgtttataagtgttttaagtttagctacttcaccgaaaatacaactaaagactcgcataaccgaaacaaatagctcaactagtctggagagatactgattatgacgtcataccgcataaatcaaaaacctcagttcatggaaacgaattgtatgtatgcatgtcacatacgtacatgaacatagacatatatacaagtacaactgttactatagctatatcgcacgcttcgtctagagagctagttattatcccaaatgatggatacagtaaagtaacttcatatcatatgcatgctgacttatttaaaatcttacgagtcgaatatttcatgaaacaaaaagtgtcctttccatttatttttgatgaatgaaatggaattcaatccctataattacgtacgttgcttctcgtgcaaatttcaatcattgatatatgtgcatatatgcgctcgcttacccataatacgctatagtaaaactttatgatccctgaattaataattacactaattcccaaagaataattaccaaaaaacaaaaacgagaattcttttctatgataagggataattcaatatttcagtgattgtaacgtgcatggaacgtcattaatattatgcttttgataattaccaaacgatgcaagccgcacacacgaatcttttcgacgtcgtacgaaattgcatgagatacacattttaagatcatctaaccttaatttatgtatacatgtgtttattttttagaagaatttgcttccttcctttcttccatgcatttctatatagtataaaataatgcatagaaaatacttagagatgtgccagtatatatattctcacttgcattttttgaaaaagattttaaagaatgagacgaatttaatcaagatacactcgattgtttgaaatacgtttggttgtcacttgtaacttgtaagcatgttttccttggaagcctagatgtatattaaacttaattaaacgggacgcagataattttaactataatatttaggtcaactaaatgtttaagattgagtcaaatgacttaatttttgttggcttgttattacattaaggcatgccatgaagtgtgacagatgagattgagattaatataaaattatatgtgggtatgtgtatctctgtactctctctctatatacacatataacatatgtgatatgtccatatcttgatcaaattattaagttttcattgacaagctgttttcttcttatccgtttctcctaagctatataataggtatataataaggtgtatatttcatcatatattgtatattcattgaatagttaattacaataaaaattagcttatacatcacatggaaattgtaatttgatctttagttagcgtattaattaacgcggatagaaagaatgattgcataatcagcatttcagtatatcagtgtggatatagatctaaagactaatctgaaattttttgaagattgattttactattttcaatccttttaaaagttgtattgaacccgaacaccagagatagggtttacgtccagaaagtcattatgggctattcttttattagttgatcattaattaaagttgcaattatgttcattcactatatatatatatgtttataatatgtatgtgtctatatgtgtgtttatatttttgttgtgtgtaatatatatactgtaataattgcatatataatgatgtgaatgtgtgcataatagatttgggtagggcataggtatcaagaatgaataataaatatgaatgtaatgattaggcagccataatctgacttcgtggaggcattgttctttcatttttgtctttctccctctttttaagtttcctttgactttttagacgtaagaaaagtagaaaacaaaaggttttaaaagctaaaagtattccatcaaattgaattttctttttgccccatgaatttttgtcaactgtgtcgtttttttattttccaaccaactcaactcatgcttcgtttcgtaaaataaataaaaaaactctttactttctattaatcgcagttaaaaactccaacattggttcagccctttatctgccatgaacgtaaaaaacataattaatatattttgtgttgaataattaattttgattttgtagaaaacgtcattgtaaaccatagaatcatagataaaaactagtattcaccatattttccgtttgttagttaaaattatgattacgttttcatttatatattccgtatgaattattgtatattgtattgtagctctactcttctacctagatagtaaaaacattacaacaagaaaaggttttttatgctcacaaactaaaatcatttctttaatttgttttcttccacgtacagtacacttaaaatgagaagcatgtaataaactgagggttagcgaaaccgtcatgcttatgttagaattggctcatcaacaccaacaatttcctctcgccttggtttagctaattgttcgttagtgtctcgtgtaggaccctttctttcacaaacccctaatgaattcggtgcttgaaaaacctttccccatcaatcatactcatatcctctttaagtgctgcactttcttaaaattttctatcatccatcaacatctatctatctaaattttagatgtttttcttttgtttggaatcacacatccggcggtcttcatccgcaggactttgtttaattaacttcttcaccatatttgcttaacaatacattggtattgaaaactttgatcgatcctgcttattgtaaaataaaaaaaggttggatcatgtaactaataatccaacgattttctgttttgtgaatttcacttcatggaatatgtttggtccgtggatgccatcttcgtatgatgaatactttgcttttctcgaaacataatcttacaaatttgtcgcgtctttactgtaattttgatgaaaatcgttactaatatatactagtagccgtacctcacggtttagcaagtccgaaatggtcttgcccccaccaatataaaacaacatttgagaccttcattttggaaatttcgttggcccaatgtatgattttttattttattttttattttattgaacaccaaccgaatgtttgacggtattatgtcaaatcctttcattagagtgcatttttccttaaaaaattatatatttatttactttttaaaaaaattgaagaaatataacaataaagtatattattaaccaaaaatgttatgaatttatttacttcagttggtattccaaaatgttatgaatttaactatttaacagatctcaactatctatatatacaacgttcatgattatatttgtttcaccacaatttatacattatatctataaaatttatttttatttaataaaagcacctaacttccaaaatctaggtatcatatgtaatatgttgtaaaatatacagagtccaaagtgtttctgtaaagctagtaaatatttttaacatattactaagctggaattccacttatatataagcataaatgacactatgtaatagataaataatgtattttacgtcgggcaaaatcaatgcatgaagtcgccttcaacaacagaatcattgcaatttgctgaaagaaaattgcatttttgaaaaaggaacaaaacggcactaaaggccagataagggagccatgtatatgtacatgatatcctttttaagttagtgatgcgatgcatgcaaaccatttttaatatatatatatatatatatatatatatatatatatgcatatccgactacgactgctatggtccctatttaaaataaaataaaataattggttatataattttgtggatccgttaataattatatataaatattaagatgttgatacgtgtgataaaacaccactttcataagctaattattgtattatgctaacaaaaagaataatgataatgtataacaaccgtcaaccgtagagagtattttatttgatatgttttagataattaatacaaggtatctaacaacatcgactacattattagaaaaattatattcccactaagaaataaataaataaataaatatatatatatatatatatatatatatatatatatatatatttggagttaaaatgcattttggatcgcaaaccttagtcagcaaaacgtaaagagaagacgtgcatgagatgatggtgaagttttcatggggtagtgtctccattgagtttcctccgtttagaattcaactttatttgctgtcaaaaaaatatatcaaccttatttttaatattcaaccttttttatgcacaatatctaaattagttttttttttccgttctaagacaagcaaataaattacaagagtgattttgttcaaaaaataataattacaagagtgagaagagaaggctaaatagtcataggagaatactcagaaatacgacgacagaacataaaagtccatttggaagattcattggaaaatacattacgggtagaaaaaagggtaggccacgaaaatgattaagatttggaaatcgtgggtaccattcaaatatatgagcaagtaaattattatgcgaatatgtattgcatagttttcttttaacttattatatgtgaaataagtggtggtgtcattgttggtgttgtttgctccttctttaaaaagcatagtgtttagaaaatcaggaatctcttgcaagtaaagtagagatgacataattacggcattgcgtagccaccatgacacgtggctttttccactccgtcacacctacgatgcaatgatctcattaaacccattttattccaatattatcacattcattcatttattcataccaagaaagaaaaactctcttatattaacatatgttagtgggtacataggactaatactaatagtgtttaattttttcgtaaaatgaaaagcaggtagagataagatgcagagggcaagaactggagccagtgttgacactacaacacgtgagagatgctatatggagaggaagcagagacacttcttctctttcacaaaacattactttgcttccaaactcatctacctctgatcatctcatggtcctccattatggtaggactatttcttaactattttatactctattttatttattatttttatataacaccatattctcaataaaaataactgcccaccatttcttcttctaccttttttaaagaaactcaacatcccaccttcttcaattgtttttcccagcttctttttattttttttggtgggtggtctcgattatttattttcacttaaggcttttccttggtgcgatttgtccaatgagcaagaacgaaagagtatctaattctgtaggagtgcataccccgattgatgtcttttattcttgtatcttctggggttgcgagtaatgttaacgcatgaaaacacatgtattaagtattcatattcattatttttcatgctacatactactattactatttctaggtgactttctttggacataatgctactttaggtaggttcagaatgtttcatgttgtatcgcagaaaatgggcctgatttcggctcaccaaaccaactcaatgaatgtaactgaatttgatctgcgcgctcatattagaagcccattaatatttttcttttgagatcaatgagcccattaaaatatatgtattgatattgatacatttggtaaaataatttataactcgacctagaaaatatgttttactgtaaaatttgacaacaacaaatacacttttggaggatttttttttttaattacatttttggagatttatagagacgaaaggcataataactttgaatgggtatggtttttaaactagtttttggttttagtttgtccgaaaatctattttgtacccattcaagattttgaaaaaacaagttttcctaaaaaatagagaatctagtttttgagtgttttagcaatttttcaaagaaaaccaaaatctatgttttgggagtttctttctcaaaaaccatcgattacattttttatttttgttttagagttttttgttgaaaaatatattatctattgacataaaaactaaaatctaaacaaattaccattcaagtttttaagaaactaaaatctacaccaaaaacaaaaaccaagaaaatcaaaaactaaaaaccaaaatccaaaatccaaaaaccattttagaaactacaaacattcatggcaaaattaggaataattggaagagataccacacaagtaaaatgaaactccaattagataaaaacgagtagatgaaaattaaatttggtgaattcgttgtcgatggagaaattgtcggcaaacaatgatacacatacataaatcataatggattggatcgttgattgagagcacaacaaatgaaaaatactttagatatgtatagttgaaaaatatattttgtaaactaataaaaaattgttctatacgattttatttggtcttaccctcttggtaaagtaactaaagtagactaactcaactctcttctagtcttcttcttcgaactctttttttaagaccaaaaaaaaacacacacaaagagatgtcttttgtctgactccataatcacaccatcaccaagaagaagaagatctaggttttgcatctctcgtcattacaatggagcgagcacgaaccgaaagccctagctacttccgtcaatggagcggcgattcaggtaccaccaatgccgccgccgtagctccttcttctccggcgcgtcatcaccacgctcgatcttcttccgtcactaatatgtctaacgtcaaacgagctcaaaacgttgctgctaaagccgctgctcagagacttgctaaagtcatggcttctcagaccaacaatgatgacgacgatgacgatgatgatgatgaagtcggtggtgatgatttaggtttccgatatggtgctcctcctcctctttccttcactagaaatccttcttccacaattgctaaacctaaacctgttgcttcttctgctgttgttcctcctcctaagatctctagatcttcctcccctgcggtaaatttcagtccttttttgctttagtagaagccaaatccacccaattcactacatttgtttacttttcagtcatagagatttggtttctagtttctaattttggaaatgttggattttgattgaaaaatatggtaatgtagtagttatggaaactagtctgaatgtttataatcagagaattgatggtggtgattgtgaaataccatttatctcagaactctccagctgtgtctgttcgggcatcgcaaccgcctgttccaccgagtaaactgaggaatcaaactaccaatcctttaccagttgcaactcctaagactgaaaagaggtgaagataactcccaaagatatcttcatattaaagaagctagttgagtttgttattcattacttcttggagattgtttgtcattgcagggttttagctgatattggtcattttaatggaaaagattcgaaagatcagcatgaagcatctgcacttcgtgacgaagtatgctaattcgtttttttttccgtatctatttatatcttaatggataatgtcatagatggaaactgagagttgttttacatcacagcttgatatgctgcaagaggagaatgatagtatacttgaaaaggtagaaagtcttcttttttggttttcatttatccccagagtaagttttttatacgtttgagctttgttaacagcttaggcttgaggatgagaaatgcaaggaagcagaagctagggtgagagagcttgaaaaacaggtaactggacaaatacctgtatgcataattttttttttgctcttttttgtaatattgttctcacctttgagacaaaatctaggtaacttctctgggagaaggtgtatcattggaagctaaacttctgagccggtagtcaatatcaatacaatttgttgccagttttcgttttttttctgttggattgaaatgcttacatgaatgtactttgtttcatgttgcagaaaagaagcagctttgcgtcaaagagaggtattgctacgtctgaggctcctcaatatttacttttatgtggtggttttgtttccaaagatggaacttttgttctggcttttagattcacctacactcactctatgacaggcggccctcaaagatgcaaggcagaatagagatgggactaatagagagactactgctcttcggtctcaagtagaggtaggccctttttttctgtccatgtgtcacatctataatgaggtgataattaatggaaatggagaaagcttatattttctataattcactcttaatcagactgcaaaactggagaccgctgctatagtagcacaacttcaaggagcagaatctgaagtcaatggtctacggacaatgacgcatagaatgatattgacccaaaaggagatggtttgtgttcatgtttttgcgcaatccacacataagcttatggtagggattaagtaacacagccttgcaaaattttcaggaggaagttgttcttaagcggtgctggctagctcggtattggggtctagcttccagatatggtaaggagtaacaaacatctgcttaacgacataactagaactttcatgccatcgtgtatctttgcttcttgacatatgtgcatatttgcatttcaggaatatgttcggatatagctacgtccaagtacgaatactggtcatctctggctcctcttccttttgaaattgtgctgtcagctggacagaaggctaaagaagaaagttgggaaaaaggcaagcaatcactcaatcatatttctaagattctgttgtgataacattctataactccgagtatcacttctcgttactgtatatttatctgttggctatgaaaacatctgaccagaatctgaggagaacgagaagaggagccagctcgttcaagatataaatgatctaacaggagaaggaaatattgaaagtatgctctctgtggaaatgggtctaaaggagctaacttctttaaaggtttattctcatcctctctggttctggttcatgcgtccctctttcattttctcatggactatacttgttcttttgaaggttgaagttgccattactattacattagcccagctaaggttggccaatactactcgactgtctgatatcggtgagcttcttctggacgccaataattttatgttttttgttgataaaaagagaaaataaattataagtgactttagccaggcttctaatttcaccattgagataatagtgtacatgttttattttattttgtgtcgcatcttaaatggctattctactttgcaattgatgtttttttctggttgttttatatcagagttaaaatcaccaggtggtcctaagattacggagacacttggtaagtttattagcttatcttactgaatatttatgtcaacatcttggtgttatgaaatataagatatggagtaaagcataatccacagagttacaatgacaaactcttgatactattatgaccatgaaaaacttaacttgaacgccagtatcctatgttccaacagttcttgttattcttaaggataattctgaccttggcctgtggtcctttgcagaattgagtcaagaagagtctgaggatgttctcttcaaggaggtacagaattacaagcccgttctcgctttctctcatgggcttttccttcatctgatccctccttcatgttcccttttgtatcgacttttgttcttctatgtatcttttggatctattagagataattttgtcagctcatcttggcctttctccattctcaaagctatgaaatttggaacatttggcaggcttggctcacgtacttctggagaagagcacaatcccttggcatagaagtggacactgcgagagaacgtcttagattttggatcagcaggagcgcacattctccatcttcacatgacgccatggaaggtacaatttaccttaccaaattccttttagccaagaggattatccataagacaactcttacaattggttcttattttcagttgagcaaggactaacagagctaagaaagctgcggatagaacgtagattgtgggaagcctccaggtccagccagtaagtagtgaccttggggacctcgggatcccagaacagtcttgctaccacagctttaacagtactgtatatcgtacatgctttcttctcgtgtggttggggtactttgcagtcagaaaaatgtttccagttttgtaaaccgaagaattgtattacacgcactacttttgacatataatatatccacgttttcacgtcctaaccatcaatttgcagactcattcttgttggataagtatttaatgtaaaatatctactgatacagactaaagatcatcagtcaccagtaatcgttgcaagaacactttccctccttgaaatggtgaaacctcctggaatctcggatgacgatttcatgtcctgtaaccaaagatacatgctttgcaaactcatgacaatctgggcatgcccgaagattcttgaacaccttaataggtgcaggggcattgccatgcaccgatatcagcccaaatgcaatggcaagtctctcactatgatcaagaagctgttctcttctctctgtcatattacactgaaacatatcaccttccatgaaaccatcaaactccttaagcttctcatagatctcctgagtttgtggatggtgtttatcacccactataaaccgatgaatcttacccttttcttggatccagctgcagctcagttccttctttaacatcctctcattcattagtttcatcatttcagcagcttcttcccattttccagcccaggtgtacagattaaacggtagcacatatccagctgtatcttctggatcgagttggcgaagttcctcaccagcaatttcgcccagttcaagattcttatgagtccaacatccacttagaaagcatttccagctcattgcatcaggttcaaaaggcatattcttcataaatttgagagcttcgtctaatagtcccgaacgggcataaatgtcgatcatacaatcataatgatcaatagtcggagccacattatattttcgaagcatcgtgtccaagcaatgctttccctgttcaactaggcctgcatggctgcacgcggttaaaaccgcaataaatgtaactgagtttggcttcataccacaactcaccattttctcaaacaatctcaaagcttcagaggcatttccatagtaagcatgacctgatataaaagcagtccatgcaacaatatcggggttgtccatggactcaaagacttcatttgcatcatctaagcatccacattttgaatacatcgtaataagagcgctttctccatactgagatccaatcagacttctttttatagcatctgcatggacttggccaccaatgttgcaatctgcaagtaccgagcatgcttggaatatgctagtatatgtgaatgaatttagaatcgatgcgtttttgcttctcaaagacttgaaggttttaacagcctcctcaaattgactcatttgacagtatccggagatgattgcgctccaggaaacatcgtttggctcacggatttcttgaaatgcacgacaagcagactcgaagctggaacatttgatgtaaaaatcaacaagtggagttccaaccgagacttcagattccaatccaagcttagcgacacaggcatgaatttgcttgccaagattaagctcttcaagagaagcacacgctttaagaacaactgaaaacacaaaactgtcccattcaacaccttccgttaccaaatccacaaatagtttcaaagcatctcttgctcttccagcttgagtataacctaccatcaatcccgtacaagccactggtttcttcactgccatctgatcgaacactcgcttagcacccactaaccaaccacatttcacgtacatgttcacgatcccggtctctatagatgtgttgctacataacccagcacgtataacatgagcatgaatctgtctaccaaagtctaaagccctggggtttaccaaagatttcaagagtgtcgtatacatggaagaaggaggcttgtcgcctgacgctagcattcccgagaacaaaccaacagctttatccaaaattccttgttcggcgtaagcagatatcatcgttgtacgagaaactgcatttaactcagacatttcatcgaacagcttatctgcatcttccaagctccgacactcacagtacatttgaagcacacagttctgaagaagcacagaaggattctcgatacccatccgcatgcgatcgtgcaagagtctcccatgagataaagacctcaattctctgcaagcctcaaagagacattggtaagaatacgagctaacggagacaccagccttatccatttcttgcaaaaactcaaatgcttcgttgagcttcctatgcttcgacaacgaaaccaaatgaagattctctacttgtccttgcttatgcgagattttaacagacggagaagaagtgctcgacttcagagaaacccacgacggaatttgatcgaaattcgcgttctttataaccggaactcgagaagagctaaacgaagactgtacagtgagaatcgtcatagttgatggagaaattctacaaaagtttagagcttttccctttcgagaacaaacgacagagaagcaaaaaactcagactttactggcttcagttattgcaacaagccaacaaccaaaacgggtcaaaatcaaaatcaatggttggtaataaacgacagcgttttagtacagagacccgaagagtggaaggttcaaagtttccttctttggtgtctctcatcaaatgagagtgagccgtacgatttctctcctcttcttgttttaaaaacctatcaataatattcttcttcttcctcctctcaaatggcggctactagggttcgttgttgtcatagcaatgcagctttcaccagattgccacttacccgccaccgaaactcgccgacgctaccgatttctctaaatcgtgtcgatttccctacgctgaagaaattatcattacccattggagatggctcctccattagaaaggtttcaggttcaggcagcagaaacattgtgcgagctgtgttggaagagaagaagacagaggcgataacggaggtagatgagaagggtatcacgtgcgtgatgaagtttggtggatcttcggtggcgtcagctgagagaatgaaggaagttgctgatttgattttgacttttccggaagaaagtcccgtcattgttctctctgctatggggaaaactaccaacaatctcttgcttgtaatgctgagattctctcccttttctctgttttctattcaaagttttgaatttttttgattggaattattggttttgttgctagtgaaggcgggagagaaggcggttagttgtggtgtttctaatgcatctgagattgaggagttgagcattataaaggaattgcatatcaggttttggtttcttgtaactatgattaatttggtacctttgagtatcttttcctttgttgctgttggttttgatcaagaatgtgtttttttgttgtttcaggacggtgaaagagctcaacattgatccctctgttattttgagtgagcatattttaacttgtagactttccaacatttggagcttcatttctttctaattctgataaggctcataaatttttgatttgtgatgagtttggtaataattcaagagtgtacatgcattgcctatttatatcttggatacattttgcagcctatttggaggaactggagcaactcctgaaaggcattgccatgatgaaggaattgacacttcgaaccagagattacttagtctcttttggagagtgtttgtctacaaggatttttgctgcttatcttaatacaatcggtgtcaaggcacgccaagtatgtccatcatcatatttttagttctactgtaattttcttaattatattatatatcacatttggttgcttatttagtcaaattgatatcttggtagattagggtagaaaagttcaatctagatttagaaaatatgataaacaaattctatatactctgaattggtcatttaacttttttattagtttggtttcggttatcaaggaacacatattggtgtactttctctgttacatgctaaactggccttggtgtgagctttattgcacaatgatccggctcgcaaacatagctaagtagatttatcgaccattactttgcagtatgatgcatttgaaattggtttcattacaacggatgatttcacaaatggggatatcctggaggcaacttatccagctgttgccaagagattatatgatgattggatgcatgatcctgctgttcctattgtaacaggtttccttgggaaggtatttcaaacagtttacaatctacagataattaagattttcattcatgtttctgtggcttgcctaattatttcattcactaatagggttggaaaactggtgcggttactaccttgggtaggggtggcagtgatttgacggcaaccacaattggtaaagcgttgggtttgaaagagattcaggttcttctacaatctcaaagtgtaatgttttctcttcaaacgttgcataccttctgttcagtttggatgtttgtttttccattgagtaggtgtggaaagatgtcgatggtgttctaacatgtgaccctactatatataagcgagctacaccagtaccatatctgacatttgacgaagcagccgagctagcttattttggtgcacaggtcccactctacttgtatgcaataatactcaagtgtagttattagtattgttacatgaaaatttgtatgttgtaaatgctcgagtggttaagtaaggaaattcacttgttgctgcaggtcttgcacccacagtcaatgagaccagcaagagagggtgagattcctgttagggttaaaaattcttataaccctaaggctcctggaactatcatcactaaaacaagagacatgaccaaggtatattgtctcctaattgtgttcttttatgaatctcatgtgagaaccttcatagcaaacaattttgttttttgctttttcatgacagagtattctaacgagcattgttctgaaacgtaatgtgaccatgctggatatagcaagcacccgaatgcttggtcaagttggctttcttgcaaaggtaaggatgtacactttttcattggcatggtctgaactgtgggctgctccaccctgtggtcgttttggtgttgttaataatcaacactgcctgcttgcctcactctttttactaggtattctcgatatttgaggagcttggcatttccgtagatgttgttgccactagtgaagtcagtatatctctgacactggatccttcaaaactttggagcagagaactgattcaacaggtaagttcttgtagaatccccaatacgtgattcccaattcatttatgcgtgcttttcaaagtcctttttttttttttttttttttcttgttacaggagcttgatcatgtagttgaagaactggagaaaattgcagttgtgaatcttctaaaaggaagagcaatcatctctctaattgggaatgttcaacattcctccctgattttagagagggttagatctggtctcctaataagattacttcaagattctaacaaagaaagatatatttcttgtgcgcttcttacttaattgttttaactttgggcaggcgtttcatgttctttataccaaaggtgtcaatgtccagatgatatcacaaggagcatccaaggtaacattgcttatcacaaaactctctttccgttctcacctaacatattcctttcttgtttcaatatctcgcaggtaaacatttcctttatagtaaacgaagctgaagctgaaggttgtgttcaggctcttcacaaatccttcttcgagagcggtgacctctcagagttattgatacaacccagacttggcaacgggtcacctgtcaggacactgcaagtagaaaattgactcgacaagcttattgcttgatctgtgtttttctttgtattccttctgagtgtagtatgtacgttcatcaagcactgcttgttgtcctacgtttaggaacgggaactgctggctacctttcgactgttgtaagaccaattttttgtaccatttgcgtgatcaaagttaaaccagttactagcaagaataaagaaaaaagaatatattgatgcaactgcagatgtctggattggttttacagaggttttgatacatgtaagtacgttgggctaaaagctgtgcagttgtgtaagcatgtggacaagctcatcacttgaaggccggtctgccggaaagtcagaaaggcagatgatggtgattcttaaagccattaacatttcgtcttcctccacttcctctccaagaatagtcttatctaatgcttctcgtgcttccccagactgttgtaaatgtttcagccactgtcctaagctacctccgcttgcagactcttcgcagaacgggtgggtcgggtctcttccggttaaaagaacacccaatatcatcccaaagctgaatatgtcgcttttgtctgtgtatctgtcacaaggatttgcattaccgtgttagtaaaagagatgaaaaaggagttaactcaaaggctatggtgttgatatttgaagcacctgttactttgagaggactcaggggcagagtagcaagataccgctgtgtgtgaactaggcatgatcttggccaatccacaatcagcaagccgaggctcaaactcagaatccaacatcacatttgtaggtttcaggttataatgaagaatctgggtctcacaactgaaatgaagatactgaagccctttcacaattccaactgcaactctaagcctaatctcccatccaagctctacctctttcgttctaactttattcatcacatcctcaaggctaccattaggcatgtaatcatagaccagagagaactcatcagattcgcgaacataagctcgtaaactcataaggttcctatgccttaacccagcaagaagctcaagttccttctgcaaccttctcttaaccgacttgctactactactttctggtgaaccaactccttcaagtgagcctagtctcttgactgcaaccactagaccattatcaagaaccatcttatagtatttaccattaaggtcagagccaagcaactgaataccattactgagagctgcgtggagagatttaggagtaatcttaggagaaaacaccactggacctttgagaattggcgtctgtttcatgaatttgacaatgctacgaaccaagaaagctaacaccaaagctgaaaccaaccctgttaaaatccctgagacgatactaatcacaataaccttggaagtgattcttgattcaagtggtgtagatgatgttgaagttgtggataagtgtttaacagttcttctacgacaacttgtacttgtgcttgttcttgaaaagaagactaagaagaataataagagtagagagatagtgttgctactactacatccatttcttcttcttctttgcttcattgctgcttctacgaataaaaggtttttcaagattagacacaatctgagaaaacccagaaaggtgaagctgttcaaagcttacataaaaagacacagaaaagtttaagactttttcaatgctacagtgaagcctcttctcccaaaaccacaaatattctcgagaaaaccaatgagaaaccaccaagacaaaaaggaaaatggaattcaactcaaaatcttcacgaagaagatgaattagaatatcattggctcatagattcttatctgaaattctcactcttttcctccaaaataaaaattgaaaatttaaaggaagcttattaaaaaaaaaaaaaaaccccacaattttcttgataaggggggacacaaaagtatcaaactttgtatgggtatgtctcgaaataaaccccaaaactcagtgctaaacccaaaaagagagagcagagaacaaacttcaatgaggggttttcacaatattactatatctgtggttgaaagatgaaacagaacaaacaaaactatccaaactgtttcagctcaattaatcccagtaaccaaacacacacacacacacacacacacacacacacacacataacacactctctctctagaactctcttttcaatacacagtatctgcgagaccgtgacacactctctctctctctcagtctctctctctatcctcacaaaaaagcatgaccgagaatccgttacttacagccaaaaaaaaatggggttcccgccttacagtggggcccacgatgtcaggtggtcgtggttagactgggtcccatagccacgtaggcggatgaaaggggaagctctcgttgctttcatgagtggccgaaagcaagacatcgagtaccgagcttgagggaaggtaaagactaaagagagctgaagccaaaagaagatcttgtccgttatttagatgcggttagtgagatatggaccgttggatagaagagagtctcgagaatttgtgcacttttgtcttagcgtgtgagattactactacacctacaaaagtggttcctttgtttgtctgagaataattgctttctcttctttttccttgtaaaaaattattatattttttttgttaaaggtaaaagctttatgctgtagtgcttttattcaaagttaggtcttgttttccgatttgaaccacattcctttttataaaaatatcttgggttgaaaaaagattagcctaattgaaatggtaacactattatcaaaagactcaaaactatgaatgtaatgggaataagtggaccaatatgtactctggtctgaaaattgacaattaactttcaaacttgggcctggtttaacacgtaaattatcttagttttgacacagattcaaaaccaaaatcgagccacaaattaaatacgttaatacgaagtgaacaaaaccataagtaattgcttacaagttacaacgtctggacatgacaaactcaggatgctatagtcccacatacacacaacacgacacaatacaatacactataatttcccaatatgcagcctatatccatccatcacaaaaacatcaatacaatacttaattgggggctaaacttgctagagaccattagaggtccttctttagtgttgattggctcttcagaccgtgaaagcaacgatgaaacatagctccggaatttttatgtccgcaagcctatgcatctttatcagcactgtctgtgattgtatccatttgtgtctgaaaggagagcaagaacttctggatcagtaaaatttgactctgcagcaatatcaagagcggttttgccttctctgttcatagcttccgggtctgctcccctgcaacatacacacaacttgtgtgaaaacttttaacatttccaaaggatttagccagagaaaatgttagggacattttggataagcggatctaagaagaccaactcacctagtgagaagcaatcttgctattgtcacttttcctctgagaagacaacagtgcagcggcgtttgaccacttgaatctgaggcgtttacatttgcaccatactgcagcaaaagctctaccatcccaaggtctgccttctcacaagcacagtgaagcagagaggaacctccgcttccctcaggagatatatttgaagaactacctgttctatcaagtaactcatttcttaatctgagtagaacatcctcacgctttggcctttctggtactaatattactctggaaagtgttaacgaagaactggaagtttggtcatacacataattcacatccgcatcaccattgacaatgagccggtaaacagcttttttatcattgccactcactgcgtcccacatttgttgtgcagctgattgtgggaaatcgctgtctcttgatctccgaacaaataacttctccgcatactgtggaatgacaaaaaaaaaaaaagtttgaatgagctttcctgaacattgcctatgaccgagcaacgagagaatgcctcgaaagtaaatattttctacatgctcaatgaatatttgaaggaacaacatactgggaagaaataagcacgccctcgagaagaaaaatagcttcatttatctccaacataaggaatcaaataaagggtagaagcttaaaaaccttagcttgtatatacttctccttgatagatatcatatcagcatagctgggttttccagtgaccatcaccctggatttatcagacctgcacatatttggcagagtaattttaacattatgatttctaggtgatcaaagttatcatcactttcaaacataaatggagttttacactgttaagccggggtcaaaatggatggcgctccttgaatgaagcaattcctcccaaactgtgtttgcgaaagtatttccaagagcttggaacaaacttataacagatggctcccatactttcacgtcgagagtgagtgacctaacctgtagcaacagccaacttcagattgctgtataacttatgtcaaattgaaggccgagccatccaaagttcaaattctatcacatgctctataatctgaattgctattgaatataagcctagtgtcacttcaaaattctcatggacttctttacgtccttccataagttggttgttatagagcctacatatattttctaagcaattaagagttctggagattttttaccttagatatatgcacaccaagattacggtgaacaccagaacattcgatacagacaagaacccccagatttaaagaagcccagtctggttctggagctccacaatccgcacatttgtcattcccacagacctttcgaagagcatcaatgggcttctcaccctttctaatggaccgttgcggctgaaaacttcttgatggcctttcattgtaccccaaaaagctcctctcacatacaaattcttcagtagtaggatgatcatattcagaactttcatatgagctactttcactagcagatcgatggtggccacttcccatgggactaccaggaagacgctgaaatgtagccgatggacaatcaccaaagttgcattggtatttaatatgagcctggtcaggtaaaggaataatgataatacttacctgttcagggacctgagaactaagtagtgatgcaataaccccagtgatcttttctatccaatccatttgatcgagtgcactctcagcctgcactgacaaacataagtaaacactgagtgaaaactattaaacttgggcaaacatgtatacaataaagttttaaggcagtaacaaacactctgaatcaaacctgcaacgtgtagttttttgtaggtgatatgatcctaaagcaaaacctcagatctgattgatcagcgtcgactttaattgttgaggtgagtaagttcactgtatgacgagctacagacttctcatcatggacaccaccatgtccatgattattcgaagaaagccacctactaagcagtccagacccaagctcggagctatttctctgtccagaaagctggcttccagacccctaaacatcaaataatctaagtcagagtgtgaaaagaatgggtcaaatagatttttactttatgaacaccataccgtttgcataattctgctgttttcaaataaaagataaatataaaaccaaaactcacagatggtttgctacactgttttcggtaataatagagcattccccggctgtcaagaacaaaaaaccttcttttccagtctcctctcaggtttgaagatcgtttagagagataaccttgccttattgtttgcacctgaaagcaccaagaaatgttaatagtactctctggaagatgtatcaatcatatgttaaagacgttgatcaacctttcctcttgcagcagattgcattacggcgtctatcattttgtgagagcttctaccgattgcttgtatgccatctccatttggtgatccattagaaccatttgaaccccacctgctctctcgatcaacctgtcttttgtactcctgcatcttttcattaagtgctgcttgttcataatttgatctttctctggattgttgcgcatatgtcaagacctacaaaaaaagagttgatgtataagtagttttctaaatgctactatctccgcgttttcaacacatgtgaagattcatacatagtcgtagaagagaattatacataaaccccaaatatttagggatctatcacttgaagaaaaggaaaataacattaaaccgacctgattgatatatggttccatctgatgcagtaattcgtaaccctgaaagcaaccacgtttagatttgacacaaacctttccagactattttataattctaagcagcataacaaacttacctgtttgaagtaccgaagatgtgcatccattgttccactgactgcttccaaaaattcaaaccttttcttagcttcaacatttgatagagcagtcacctgagcataaattagggaaaccaaatgattacttcaacaatactacgtatggacagcaagtatgtagatttgaacactcaagatcaaacgatagaaaattacaaggttgaaccgagcttgctcaaacatagacctcgaagtatgaagttcctgtcagtgtcaaaatatgttagttacaacatagaaataaaaatacatggttatcaaaaatcagaaacgagctttactaaaatcatgcaccatacctgttctaaagcagcagcaacgtcactttttgtacctttcctcaaagataaaaacttctcacgggcctaaagcacaataagaagttaattagttaatcgtccagataagtgggagccgtggacccaatatgcctctctatttctatcagttattttccaagctacaaatgtagcatgaacaaaaaaactagctaggtttctgcaaatttatacactgcctgcacggaaactgcaacacatatcataactttgaaaaagaggaaccctagcgttcctccattaacgaggaatgattctaaaatatttgagctcgacccattttgtctggttgaaacttttcatacagatttacatctagtaaagaaaagagtcaggatgagaacttttaatctttccaaaatatcttttgtagtgcaaaccaagtcagcggagtggggaaaacaaaaatccttgacaaaagggatacctgatcgtaggtaaggctagccttgtcaaagcgcttccgagcttcctgtggcaaaaatgatctctcagggttccatatccaaatataaccatgtcatgctagcctactataaaaatggaaaaagatatatctggacaagctgactagccacaatgtaaaggcaggctcaagaaacttaaccatattttccgcaatcatcagaccttatctacattaatgacctcagaaaatattcacaattatattttgtttggggaaggttgaccacatgagtgataattagttcttttttttagatttctagtgctgcaagtcaaaccagaagaacaagacctaatgtccatattaaattaaatgcctcttggcaggtcttcatattttctctattcacacatgcagaatatttgtcctccattgtttaatagatattctagtcaatactaatacctcaatgatgcaaagttaactcaaaacatgtatatcaagccaataataaaggaagcagcttgtaccttaacttcatgcaagtccatattggcaaactgaagtaatctgtcattcagtatatgttccacctgacaatggaactcatcaaaatcaaaacctggattgaaatgacttgatctgctctaaatctatatgatgtcttaaggtaaagcaaactataaagaggccatttttgctgaaggaaaacaaagctatcctacgttgataccacaggagttatcagagagaaggctgggaatagggagaaacagagagtgtcaaaatagcaaactagcatacctgtgaccgaagaacttccttataagtcccaatttccctcaacgcaattgtaaatttcgtcattaccggtcctggcacagcaagttagagtttgtcagcacttttaacagcaaattgttaacatttccaccaaaaccagtgaatctaacaaccctagcaaagagaaagcgaagagaaagagcgggaacaacaacttccctcataatttaaggccactatcagtatttagtgcttaaaaacgaaattatgaattctaaaatggaaagtgccaaagaatctcagatgaaaactgcaaagattatgggaataaacagacaatatgctactgcgagtttccatataatcggtcatacctccaaaagccacacttattggatcattatggcctccaccaaatgtttcaagtgcacttgcgaaagcaatgtccccatcgtatgcctcgcctagtccttcactgtaaaaagaaagaataatctatcgctgttaaaagatacatgtttcagccagaagaaaactctaaatgtagagctacaatcctaattagctgtgaaaatttgaactagcatacgtgtatttccggcatcctttgtaaaacttgagacttctttcccgcaatatttctgcgctctcctccatgctttgtaactatttaagaaaaagatatcaatgtaagaacgcagctgcggaaggaaaaatacataaacgcaaagaaaacagtaaagacacaatccaattatggaagaaactgcaactatggataaccccaaagattgagtgattcaggcactctatataggggcaaaagaatcatcaacttcaggcaaacagagcagttgttggacagaatttgagctacactaggaacttccttagcatttaagttgagttagatagcagaagtcctactaaaccagtgagcatgaaagtagtagctaagtggacacaaatgtatcctaaacacacgaatcagagacccaaacaagtgcactggatcataagtcatttcacatttcatggagcaacaagttaaagcgcgaataggccgtccagataaaccaatttcttagtgacacattaattcgaaccttccagtgaagttccactcacattttggaatataaatgtcggtggacattcaaaattccagacacaacacatcctaatggctccaaaattagtatctgttgacaacttttgaagaacaaatctcgcctaatatgacccaattttaacctacgacactaaaagactggacacatcaagacaagcacacatagacaggaaccaaagatatgtagtagaaacaaacctgtttgcggaacatgggagagtcatcaagcttagtgaaatgcattttgagctaatttattacttcctcttcttcgacacaaacagcaattaacataacacgaacacacacaccaaaaacctaaaagctagaaccaccactatgtctcacacagacgccataaacgaacaaaaacgtgagatcctctcctcccaaagcttccccgaaatatccaacagaaacagaaaccgatgatcttcaaagtctcgagccaagcgtaattttgagctggtgtttttttctcgcgaaatcgagagagaacaaaacaagaaaacagtgggggtgtgttttttagatgaagtgtctcgggagaagagaagagacagacaaatcaaagaaaggaagaaaaaaaacttcaccgtctttgtgaaaattttaaccacaaaagacggcgaaactatgccgttttagttaccgccggagatcgtgaaggttggtaagatacgacgtcgtttcaagtgtaaattttttaaagagaggactgactgtgctttttctgtaacagtggtcatctgagaaaacaaggactctggctaaaatccactatatccacgcgcctttaaagcccgtgtagtattaaagaggctggaaattaggaggcgcgtgtagtaaacgcgattctctcgagagtattaatagagaggggagagtgggacccgttatctggttgcttctccattatcttttgttccggagagacagagaggccagtggggtataaatgattccttttaagacatgtttattttattttatatgaaaatatctttaaatataaaaaattgaacacttatgattactttcttttggaaaaaaattgttaaagcaaaaagaaaagtgggagaaatttggaaaaaatggacacgatgatcttactttcttttgcagactttacagtcgcatatgattattaaaatacattttcttggtttcaaaatccttattgtttaatgaaatgtatgatctcttgagtcttgtccagctagttcaatattgtttaatcataacgataatcgtcttaaatctaggttaagatctttgttcaactggtaaaactaagacatctgcaattaaaaacataataatgaacattatgtattactattaaccaacatttaatatggtcttctaatcagattttctcacatcaattttctttcatctttctcacaacatttatcgtatgttttctctctcaaatgatttccgacatatggctatcaatctaatgtaacttagatctctcttttcctttttagactgtcgcatctttcatttccttattgacctcaaacggcctacggatactaaaatccactttagcacacaaccaaaaaaaaattaaaaactgtatagaggtaacagtgactagtaggccgatattgggccaagaagtaggaaattccattaagccaggcccattataaaatgcccatttaaaatttgttttgttataggatcacacgaaaggcggtctattattttgttcgttcttcgtttattcacagcaatcgatttgtgtgtgtttcaatttctaatagcttcacaatggcatcgtctggatcagccgacgaagatttccagtctcgcgttgcgaagatcttcggatctctacccttctctcgtccttcgtcttccaagttttccacgtcgtcttctgctccggcgtcgcggcagcaatcggggtcggtgtggactctctccgacacagaggtagagaagcgggagtggaagcgagattcgtacgatagagacgagattccttgtgcttcatcctttgacgagctcttaaaacagcagaagccttccgaggatgatctcaaagatattgattgcggcgaggattttgatggtgtgtggagtatcagagcctccatgggccttgatcgcactctcgatgacgaggtaaatcaattttggtctcttaacgattgtttctcattgcttagctaattgaaattagggaacagtgttggtcttttctcttggatttggtagattcatatgagaagagcattgaatttttaatgtagtatcatattggtttgtgtgacttatagagtttttgtacgtgaatcatcaacctatgtaaccagctttaagattcttgaatttgagtttttcttgctataactatatgtagcacataccgtattatgaataggatgtcactttctttgatgctgagtgttgtttccatgaattatgcttcttaacacaggcagaggaagatgagtatgataaagttgcactaggggaagagaatgacggtgaaggctgtgggcggattcgggatcctcgtgctaactatgttgctgcaagaattaggctgaaggaagatgaaattgaggctaacaagtttaatacttctgcaagtcaaccttcggaaagcaaagagccacacgcagaagaatcatccgaagctatgccgcgaaaacctatactcaaaaggaaggagaatagttcagattcagaagcaaggacaagtaagcgagtcaggtttgattctgtgcctgaagaaacattgaagaagcctgaagatacttgttcagcttctgcctcgtcaaaaatcgtatctcatcagggaaaaagtggtgctcgggtaccggattacttgctaaatccttcgagttacacccgttacagctttgatccatcttgtgaattggatgtggagtccccaacaggagagtacatggacactcccaatgctgttgaaggattgaaaaatccagagtcagaatcatttccaaaagtctcctttattccgcagaataagaccaaggacgtaagtgaagacagtagtaactgtaatgagacgaagcctatcgtagctggagagttggcagaagaagagagaccaagtgcaacagaagatggggatactgaaatacgagaatcagagagctgcaccagtttccaaagcaaaggtcgtcaatatcgtgccaagcttagtttagatgaaacagatgtctgatctttcacataccagtttggttggaaaacgctacacagagatgaagttggggtccatgagatacaatcatgtagcatcttttagccgcacatgtaagatatttttaattcctagacttcttttttacccaatttagagactgtattacagcgaatgtatggtaacatagtaagaaactgtttacctttgagactggttgatagtacacgcagaagagaatctaaagctacctcaacttcctggaagctatcttgatagattccagtgatgttgccacaagttttgattcaacactagtgaatcgtttctgggaagattccagggttaaagaaagacatggttttgagcaagcaatttataattatgagcaggtgaaagtctgttgatctgagaaagaaggaaacacctcttcttattttctttttgattcaattcatcaagtttagtatgactgcagattaatcaaatcatggattccaattgtttgcgttaaagatttttgcttaaagcaaagctgtcgttaattgagcaattgcttagggttgttccttcagttcgtgaatctgtttttacgggttttcagcttatggtttcatcaaaagaccactcgttgttgcagtgttttttaaacattacacatgtctttcctgacaggaggagaaagttctaatccgaagacaagactggtgtgaaaatttctggtttgttttagatgagatgcatatatgtatgtatgaacgaaaacagagaaaaaaaatgggagggacggacacaatactgctgttgttgagccttaaacggctttgacaagctgtcttttttccttaatactgtatgtgtgcataactcatataccacattcatcattttgtgtaacttgcttaaagatccattccatggatagctctcttaactatggcctcttgtttctgcgtacggatgcatttataaaatgttgttttttcatttcgctaatttgacatttatggtagatacgtgtgtttttggaaggacacaccaaaatactagtagacgaagacaccaaaccccacttggtgtgcatatcaaagtcagaagatggagactacttggaagtttatttgatcaaaactcgtgtttgacgttgtagcttattaagaaatgacttttaactctcaaggtttacctggaacatcgttttctttttccagcgaatttctgggcaaatatccctccaggcccacacttcataagctccattaaattataagtttttaattttatgtcaaacccaaaccgttttggttgtctttaatccgttaagaaatttcagggcaactagaagcaatccataaatattattacgattacaaaatttgcttaagaggattaatcaaaatatttttgtgaaaaatatttcaaatattaactttcattacaaataaaggatttttaccccccaaaaaaaaaataaagtacttttataattaaaccaaaatattataattacctaattataaatgaatattttatgattatcttacataaaagatcgatgtttacaaaacaaatcattttcaaaagaaaaataagtacattaaataataagatcccctttgatttatggtttatttagaaagtcaaaacgcgaaaatgttcgaaaatattataaagccatttattcagtagatgtaatgtcttatacggcccgagaagcggatgcgttccgcgtagcaattgctcgggcttgcatggacgctacttaaatcgacacgattcatactatattgtctgtcaaatcgatagctcgtgggacgtatcagattcattaagaggcgatggatggcttgtcctttctcgctagaatattgccctcctcgggttaaagagctaccacagataaatgtcaccctacacacatagttcgaatatctcttttgggcaataaaatgtcatattttgtcctctttagctagtgtgatttttgagacataattgtaaagatttaattaagctaattggcgttctagatgaatggtcatcctttggtatttaagtaagaaaattcaaacttttaaaaatttgattttttttttttctttgaattatttttttctagtttgtactagtttttctaggcgattttttttaaaaaaaatcaatggatgaatttgttttgttgcaaaataaataaataaaaaaaaaaaaatatatgtagtagggttgctggaaagattatcataaaattaaatatttaacagtttatggagaaagaagataaagaacggaagagattaacaagaaaatagttttggtttttccttttagggcatttgtatcaattgaagacgaatgacaatgtttggtttggtttggtttggtagaagtaaaaaaacatatagtaccgttgggcaggataagactagactacgattggagcttaagcgagaaccatatataatatatcagtgataccattggatcgtactattgtctttgctgttgtattattgatctttatttttggttttgtttttgtttaatgcaatttcaaaaatttccaaatcctttgtaattaaattgagtgtaccaatctggagaaaagatacgagactctgttgcaggtgagtctaaagtctcttgcgttcaatttcatgttcttttctaatattgaaacttcgtttgtaatttctagtctccatcactttcatcacacgactcactcaactaaataaatagtttttgttgactcccattgtagagtcttttgtggtctttgttgtttatgaatttaactatatttttaatcattttcttaatatttatatttgactcgcagcgtagagtcttgttgtggtctggtctttgtgtatgagttttatttttcttgcgcgaaagttttaacttgtttcggaagtaccaaattttgcagaagttccttgtggatttctctgcgttttcctgacttctcatgattcatgaaacagacaccaaaagaagaataaaaaaactgatagttgcataatgttgactattaaataatcgacaagatgatacttgctgaacaattcgtcacaagttaaaacccaaggaacaaataaatcgtcaaaagttattttaaactagattacatacgcaaattttaattttatcacaattttgcatggtactagtatactgcataattgcatttaaactttcaaaatttgaaacctaagctggtattacttgtattcctctacatattacacataatacttatttattatattaagcttaccaatgtcctttgagttattttaccaaaaaaaataatgttctttgaattagttaaactaattttccatgaaacagttagctaataaatattttccatgaagccttagatcgatgtcaaagtctcacatcatgaaaggttctcacagactctacacgttttttactaagcattgctttggaaatttacgaaagaacattttccacgaaaccatattttcgacgaaattacattttccatgaatatgccgacaaaagaaaaacattttccatggatattagttaaacaaactatttatcatcagatgtctatattcctatgtaatcagctaattacttcgctcgtatattaatctattcctagttgttggaatacaaacaaaatgaagcatttgtgtgtcacacttcacacgctaaggtcagtattctataatcaactaaaacattatcaaattgtgttactcggtcgagactttttatacagttaaaacattgacccagactcacgaactgccaaatccatttaattagttagggtttctcttgctatatatagagccaagtgttaactctgttttcatatcaactatcaactaataaccaaactatccattcttttcttcttattttttcatatcaacttaaagagaaccaaatatgaagccaatcttcgatatcaacgaaacttttgagaagcagctgaaggatttaacttcaaatgtgaagtctatacaagacaacttgttagaggagatcatcacacccaacaccaaaacagagtacctccaacgttttctcatcgataggttcgacaaagagctcttcaagaaaaacgtaccgatcgtgtcatatgaagatattaagccttatctcgaccgtgtcgttaatggagagtcatccgatgttatatcggcccgaactatcactggattcttgctaaggtacataagaagctatctctatatagttttattagggttcttgtcaaaaactatatgcttacttgtagtgttttttttggtagttctggaacttctggaggagcacaaaagatgatgccatggaacaacaagtacttggacaatttgacattcatctacgatcttcgtatgcaagttataaccaagtaagtgcaacattttttccttatatttttgtaacgattattatttggatcaacccattgataaaaactctcttcttgttctgtttaggcatgtgaaaggtgtggaagaaggaaaagggatgatgtttcttttcactaaacaagaatccatgactccttctggcttgcctgctcgagtcgcaaccagcagctatttcaagagtgactatttcaagaaccgtccatcgaactggtattactcgtacaccagccctgatgaagtcatcttatgccctaacaacaccgaaagtctatactgccatttgctctgtggcttagtccaaagagacgaggttgtgaggacgggttccatctttgcttcagtcatggtccgagctatcgaggtccttaagaattcttgggaggagttgtgttcaaacatccgatcgggccatctcagtaactgggtcacagacttgggttgtcaaaactctgtttctttggttcttggagggccacgtcctgaattagcagacactattgaagaaatatgcaaccaaaattcttggaaaggtatagtcaaaagactttggccaaacaccaaatatatcgaaaccgttgtcactggttcaatgggacagtacgttcccatgttgaactactattgtaacgacttgcctctcgtttcaacaacttacggttcttcggagactacctttgggatcaatctagatcctctgtgcaaacctgaagatgtttcttacactttcatgcccaacatgtcttactttgagttcataccaatggatggaggagacaagaacgatgtggttgacctagaagatgtgaaacttgggtgcacttatgaacccgttgtcacaaatttcgctggtgagcttaaaaacatcgatcatgaattcaataaaatgcatacttttttctacatggtttaactaatgtttgtgaaaatgttttttttttcttcaggcttgtataggatgagagtgggagatattgttttggtgactggtttctacaacaacgcgcctcagtttaagtttgtaagaagagaaaacgtcgtcttaagcatcgattccgataaaactaacgaagaagatctgtttaaggctgtgagtcaagcgaagctcgtactcgagtcatcaggtctcgatctgaaagacttcaccagttatgctgacacctcaacatttccaggtcactacgtggtttacttggaagtagataccaaagagggagaggagaaggagacggcacagtttgagctcgatgaagaggcactctccacgtgttgtttggtaatggaggagtcgcttgataatgtttacaagagatgtcgattcaaagacggatcgatcgggcctctcgagataagagtggtgcgtcaaggaacgtttgattctctcatggacttcttcatctcacaaggtgcttccaccggtcaatacaagactcctagatgcattaagtcagggaaagccttgcaagtattggagacatgtgtggtagccaaattcttcagtatttgattgttcttccttggttttatataggttcaagtgatttgtcttctttttttttccataaagggtttggttcaattgatttgttgtgatttgagagtgtactaatttgtctgaatgtttgtttatatttttttaatatatatatttgattcagtctttatctgattttcctctttaaacggaaaacaccattgagaatttccgagtctttactcagaaacagagtattttattccattgaactgaagttggcaaagacttggaagatggccaaacaactttgagatgaaaccaaacccttcgttacacttcaccaccctgagccatgagtccatgactaacaacaagtaccaaaataacaatccggtttcgttttctttcggttcgtgtgtttttcaaaaaccaggtaaaccatgtgtagtttggttttgttttggttatgatgattttagcataattttagtagagtgtccaaaacacaaaattttatatgcagtttagtacctgactaatcttgcagcttttagaaaaataattgcaactttgcaaaattctctccaagcaaaagaaaagattggactcgtcaatagaagcaggcccggtccaaaaggtggtacatacaggcgacggcccaaaggcccaatttatccggaattaatataaaatatggttaactgtaaatatatgattttcaaatggatacactcatacaagctttgattcctaaaattagattacaaaaattatttttcgtactttgctgcatatataataattgatttgtacataacaaatcaattatacgatcgaatttcaaaattttaatagataatatactggaacaaatacatatacaaatataccaataaaaataaaactgacccaattagtttattttattttttagtaaaaaaacagatgaaaaattagaaatgttgggtccgcactcattccttatttgtgcataacactgctgccaaaacatgcgaagctaataagctcccaaaaaagtttaaagattgagaaaaagaaaaagagaactatgaactcaaagaacggtcctaccccgcaccattccaaagattttaattaatatttttatcatctattttttcttgtagatccttctctttataaaacccttttgtcacctcttctttcctcataacatcacatcatagcctaaaccaaagaaaacccttatttgcgatccccacttgttgttcatcaccaagccaagctccatgtcctagtcactccacagattccctatcatcatcaattcgtttcaaacttagttcctttcaaagtcttgtacatatatacacacacacctattattctcttggtgtgtttgtgtgttacatatacgtgtgagtacatactttgttgtaaaagtggatcggaggtatggaaagggaccggttccaccggaaacatcggcggcggcggatgataattcgtcttggaacgagactgatgtcaccgccatggtctccgctctcagccgtgtcatagagaatccgacagacccgccggtcaaacaagagcttgataaatcggatcaacatcaaccagaccaaggtaactaatacaataattatatcttgatcatatgacagcttaattgtttttagctagttgatgtaactttgttataataagttacacactaactaaagacttactattaataaccctttgtcgaatttttctttcttaattattatatttgggaaaaaaggaatttgtgtaggttagaattcaagttcaagttcaatgcatctttcatttaatttactttccgtaaagaactttccttcttgtttttgaattgaaccaccgatcagcatacaacgtgtctatcctcttttttaatatatacatctagatttgatttttgtttgtttgtttgtttgtttcaaagtacaagttagataatattttattgactccatgtcttaagtcgtcaaacatatatacatatggcttcttacctaactgattagagtaattttgaccacgcatgttccttttgttcattttgaaaatttagttatcttagatatcattctctatcaactttatggttgtccttttatcaatattttgaagtatttctttccacatgattaactcgtttttaagcttcgttagttagaagccaaaatatgtcaaaatgacacatacgcatggtctttatcaaaactcatgacgaattagttttaattatccttttatttcatttacactttttattatttgaatgctaagttaatcatatgtagaaacaaaaatccagttattctttctagctagataccgtaacttttatttttgggacaaaacattgaattgacgaggatttcttttgagttttgagaatgaatcttcaattgtttaaccaaatatatatgttttgctcagtattattagtttatttgtgtgaattttgatatgtcaatatgtagctgcttgactttctgaatatttcgctggtctgacagaaaaaaagaagaagaatatttcgttgcttaaaactgataaaagtaataaatatagcaatgaatcaattattcaactggattgactctattaataggaacagctttatagaaaaattgtatatatgattcaagctttgattttcggttcagtccaaatgtctagtaattacagaaaatgtaaaccacatacttgaacttcaggtttgattgcctgtatatatatttgattccatcaaaactaaaaagttaaaaatgtaattttatgagaggaatagtatatagtctatcgtgcaaagttaagtaatccacatagttgatacgttttaagtattattgtatgcatcatctttagttaaatccttcattcttttcgtctaaatcatatatattaaacaattattctcttgctataaccaatcgttgaaatcccacgtagcaataattcttctcatgcatgtagaattgcacatgcaatatgtaatttttgttttaatttcttgtttcatgttcttcaagatcaaccaagaagaagacactatagaggcgtaaggcagagaccatggggtaaatgggcggcagaaatccgcgatccaaagaaagcagcccgtgtctggctcgggactttcgagacggcagaggaagctgctttagcctatgaccgagctgccctcaaattcaaaggcaccaaggctaaactgaacttccctgaacgggtccaaggccctactaccaccacaaccatttctcatgcaccaagaggagttagtgaatccatgaactcacctcctcctcgacctggtccaccttcaactactactacttcgtggccaatgacttataaccaggacatacttcaatacgctcagttgcttacgagtaacaatgaggttgatttatcatactacacgtcgactctcttcagtcaacctttttcaacgccttcttcatcttcttcttcctcccaacagacgcagcaacagcagctacaacaacaacaacagcagcgtgaagaagaagagaagaattatggttacaattattataactacccaagagaataatctaattattattgttggtcgaatcagttttataaatagctatcatagtttcatttttggtttccgtaacctttgttgcatggaaaatatgaatgaacgagggacatgtgtaacaatttgtttgtgtttcgtaaatgttagttgtatttggatttgctgaagtttgattttctgagcataaatcatttgacggtcattcatgagacataaattgactctttagagctaaccagatatgagtaattaaacataatccaaaactagatttcaactatgcggaaccttgacaatatagcggcaacccatacacaaacctctatcatcgacaacctcaacgaacacgtacgaaccacaatacaccgtttatttaccgtcggatatatccaattgcaagcaacaatcctaatttactataaatatatatatatatatatatatataataaattacgtagactaaattcaaacaaaaataaacgtgcagatcttgtttaacaaaaataaataaatacactaatttacttagactaaacagcttgtttgcatcaaactaaagtaataaaacatcaaaaatagggaaataattagtaatgcagtatccttccccatacttatatcttttctaatctatgagcaaatcattaaccaaatttgggtgatactattattccataaacatcaaaatatcaaaagaaaagagaaagcaaaaatcaaagtacaaaaagattgaggggaatgttactcgagctttagtcgtggtccctctcaatatagtcgcatagattaaaattttcttcttttatttttttttgctctctttttttcacgtgcagttcttttcaatttttatataatgaaatattgcaggagcttgaaagttctatacgaaaattaaacgccggtgcacgagatattactcggatattaagaactgggacacttgtttaatctgaattagataaaaataagtttcatttcttctataggtatcggcctatatcatcaaacatgaggactcggtttcggaaaagtcaaagtgtttggtatactatttaataatacatcgtataagaaaaaagatggataagcattgactacaagtggttaacaaaaattctttgaagtttaagtgtcctaagaaaaaaaaaaaaaaaaaaaagccaagtgtgctcaaacaatcacagatgatcactacgaatatcgcaatcactaatgatttaaagaacaaaaaacgttttcagctaaaaatatcgcaatcccaaaaccaaaagtgttatttgatcttacaaaataatgagacttatctgtccacatatttatgtgtcttttttagaaacgaatttgtgtgcatgcatcaaatcgtactcgattatatttgtttgtggtttatgtttcttcctcttattattattaattgttgatacatgtgactatgggagagtaggacaagcaaacttggtcttcagatttagatcgatcttaccccaccaaagatagtactttaagcaccgtgtatctttcattattgtatctcgagtttgattggccttccctcgtgatcgtctcagaatagtttctgcaatatattccatattacttttttacaaaaaaatattccatattacttacagttcattttatcaaataatactaaaaaatacatacatgttcatggatttaaattcaaaattttttggttaataaaaaaataatatacatgcatctatatgtatgtctagtcatattttgtgtggcttttaacattgtttgggttggtctattcagagatctgggtggattatcaatgaaaaggcatcagttcagggaaaaaaaaataagatctgggtgggttgataattgaaagtttgaaactatattaatatgcacattcataaaatgagattagatgagatgatgtagaaagataagtaaaagatagtaaagagctttcttctacagagttacgcatgcgcaaaggcaaagggaaactgggtcccatcccacttagttacgtcaagtgtgttatttcgagggccatcttccagatcccatgacctagtcttttcatctgtcaatcccaatatcgatctttaccatttctgatttttttctattctttattactctgacttcttaagtaattaagttttagctatacgacacaaactttcagaaagacaaaaatactctattttctatatatatatattaaaaaatagtctgctatagtactattgtactagagtagtaaacctaattcataattaaaaattaatttaagaatgagtgtattcagattttatttttttattttctgataaaaacaacttatattctgaaaacatgagaattagcaaatgatataaacggatagaagttgaaaagatagatatgaagttctgaatctattattatttgaagattttatgttaagctattttcaaaaaatccttctttgatattgacttggacgtacggtatctctgacaagcgagacttttagcatgctttcggcttcgaagattcaaatattgcggctgctttgctttgattccgctgagagtggaactccccccagataacaatgatgatcttcgcatgcacatgaagatcgcaactcttatgtgtgaatagatttcgatatacactatattcatttacgtgcatctttaatttatctcatatattcatcctttgtggggtatgttcgtagactcgtagcaatcaaaacattagggtaaaatgttatcagtagtaatgagtttataatgtggtcccaactcccaattgcagactttaaaaattatttttttcagacttgaactgcacaatttagaaaactaaatgttacctctatctatttgtttaagttttatggtttattcttaaaactcaaaagaatgctttgtgtattttgtatagtttctctttgtcaatgcttatatgtatttaaaatacatgagaagaggaattagctcatagaagtgtcaaagtcttcttacatagtatatagcttactcaatttctaaaacttttgtcaagttttgtaatagacattctgatttctagaaagtatatatactgtgcattttctaaacttctggtattataaaacaaaaaaatcgataaaacaaatcatattatcagatttttaacaacatgcaactttttctaagtaaactaacaaaaaaaagaaattacaattattcctcacatgttaaaacaggcttttgatcaggtccggcccaacccgccagcccaaagcccgccagagctattatcaaactttaccaaactgatagatgcttctttccaaagattaactaacatagtgaagcaacaagctctatgaagggtcagctagagaatgttgtctgtgcttacttggatgagtcaactcctcaactgtatcttcctattctctgatacaagaagtcaaaagtttcttcagactttgccttcatcaatgtttctttaattataaacccatgccgaaatgcagcttggatcgtgatctgtttccatttgatagcttgctggagtttctaatctcttcttcttcttccagcttctttctccttgcagcctcctccttctgtctctgcaggagctccaattctcgatacctttcctcttctttacgttgaagttccattgcttctcgcctttgagattcttcaaccctcctactattttcttctaacatcttatccagctcttctctttctctcctagcttgttccttttaattaatttccaaactttttagtttcagcaagtattccaaagccagaaaaccaaacaaatagagcggcaaaattgaacaaacaactagctagacttacttcttttcttcttgcctcgtttagagcagcttctttttctttcttcagctgtatttccacgtcaagaaacatcttctcataagcttcctttgtccgtctttcaatttcttctttaacttcttcggttttcatcctttcctctacatttttccttactgcttcctcaatccgctgtgcagtctcttcttctagtcgcttgagctccgcctcatgctgcaatctacatttagtaagggaaaaaagatttagaaagaagataagactgataacactagccaataaaaacttttcaagatcatataaacgcacaaattgatcagttattcttctattcatgtccaaacagtattcaatttagataaggaaacaaagaggttgatcaacaatcacagaggcgataattcaagaaatgtatttttgccctttcgtgcatgtcaacttgctcactagcaaaatacattcccctaatgtggaaaactatattgcttcatacacaaaataataaagtataatacaatctgaaagacaaagacaatgtttaatcaattaccttgccttgtcttcctgttctttcttcacttcaatcgcaattctatgctcggaaggagacaatgaactacttctatccctttggtgttgccttggtgcaggagatctgctcttcttatgcctacaaaaattggaaacctactcttatgaaaatgtgttgaactaaagcagctccttcttcactagcagctggacatcgaacattaatgtccatagaaattcgtttgcaaaacagcaacgatccaaagtgaagtaacaaatttgaaatttgttctcgacaaaatcgctaaaccctaaacctattctctaagccctaatcctattctctaatcccaagtatctaaacgtaattcccccacatcaccataagatacgagattcgatttctccacattaagcaaggaagattgttgcagaccttgatgtgtagggtgagcggctgcggtcgcgcctggtacgacggctgctacgatgagtcacaggcgagcgagagtaccgtcggcggtgagacggcgacctagatcgcgagtcgtttcgagccattttcaccaccgcaattatttgattggtcaaattgatttctctctttcggagcttttttatgcgactgctctcgtacgatttatcgatcggttcaatattttgttaaccggacagacgcaagttgaaccgaccttgtttgcggtttaattcaaaaaaaaattatcctaattaattagggttaatgaataaatttatctttctaaaaatgggattttctttacttatgctttgtcagttaattctatttatggaaataagaacaaatcatacggcaacgaacatatcgtcacaccacaccatttgactgactgctttttctaatctctccttacaaagctttcaagcatagaaagacacaggccaaagctcatccatccacctcgccagaacaaaggtttgcttgctcttcactcttttgtaaacaatttcgtgatacgacttagaaggttttttttttttgttgttggcagacaatcaaaagcaagcatgttgccaaagtttgatctaacagacccaaaagctagcctgtctcttcttgaggatgtgaccaccaacgtaacgcagattcaagattccatcttggaagcagtactttcacgtaatgctcataccgagtatcttaaaggtttcctcaacggtcaagttgataagcaaaccttcaagaagaacgtacccattgtgacctatgaagatattaagccttacatcaatcgtatcgctaatggagaggcgtctgatctcatctgtgatcgacccatcagtttacttgtgatgaggtgccttcaaaacgatccgcctttttttttggatctgtgcaggataaccaaaataatttcaaagctttgtatatgcaagatctggagggatatagacaaatttatagattagagaatttccagaagagacttggaatcttggcttatatatcataaaatgagattgacacacatgcacatggagtttcataagtccgtccacttgtttacaaaaaagattaatataggaaatttggtttgaaacttgttgatacttgagtcgttaatctttaatgatgtacattaaaattgaagtgaagaatatataacggaagttaaatgttttgcagctctggtactacagcaggaattcaaaatttgattcctttgacaacagaggatggggaacagaggattatgtttggatctctctatagatctttactctataagtaaatatttctaaactccaacgtgggtttgttttattgatgtgataccaaaagaaacattcattgtaattgcaggtacgtcgaggggattagagaaggaaagtctctcacgttctatttcgtgaaccctgaaagagagactgcctctgggatactgatcaggactatgataacttgtattttgaaaagcgtaaacaaaaccaactcatctctttggtaaattaacaaaaactttttccccacgttacattacacaattcacttttttgtgaacatgctcattggtgcttactactgtttgtttttcgtgtttgttatattacttgcagggatagattacagataagcccgcatgaaatttctacttgtgaagacactactcagagcatgtactgtcaattgctttgtgggcttctacaacgagataatgtagctcgcctcggtgcaccctttgcttctgtcttcatcagagtaatcaagtacttggaaggtcattggcaagagttatgctcaaacataaggactggccgtctcagtgactggatcacagaccctcaatgtgtctcagggattagtaagttcctcaccgctccaaatccggacctagcgagccttatcgagcaagaatgcagtaaaacctcatgggaggcaatagtgaagagactttggccaaaagcaaaatgcgtcgaagccgtcgttacaggctccatggcacagtacattccgttgctggaattctatggcggtggtcttccgttgatttcatcgtggtatggcagctctgaatgtttcatgggtgtcaatgtcaatcctctgtgcaagcctagcgatgtgtcgtacaccatcatcccatctatggcgtacttcgagttcttagaggtcaagaaagaccaacaagaagctggtcttgatcccatagagaaccatgtggtcgtcgatcttgtcgatgttaaaattggccatgattatgaacctgtcgtcacaacgttttctggtaagtatttgttgcagagtctttgcttagagaaaatgatagaaagacaaaataatcattttaattgttttcttaatgtgtaacaaaaaatgtctctctcaagatctccatatggtttgacaggtctgtataggtaccgtgtgggtgatcttttaagagttactggtttctacaacaattcaccacatttccgtttcgtgggaagacagaaagttgttctgagcctccacatggccaatacatacgaagaagacctccttaaggcagtgacaaacgcaaagctcctgctcgagccacatgacctgatgctaatggagttcactagccgtgtggattcgtcctcgtttgtaggacactatgtgctctattgggaacttgggagcaaagtcaaggacgccaagctcgaacctaaccgcgatgttatggaagaatgttgcttcaccgttgagaagtatctggaccctctctatagacaagaacgaagaaaagataagaacattggacctcttgagattaaggttgttaagcctggcgccttcgacgaactcatgaatttctttctgtctcgaggctcttctgtgagtcagtacaagacgccgaggtcggtgaagactgaagaagccgtcaagatattggaggccaacgttgtttccgagtttcttagtcaggaaactccgccgtggggataaaaccccgtcattttctcttttttttacttgagggcagcagatagtttagaaaacttttcttgatttttttaattactaaattagtcttccatatcataatctaaaaattccttttaatgtttggacaaatactggaagttccaatatccctaaccttaaatctatatcaaaggtagttgtaattcggattcggaaaaatccagatttgtactttaattgtgcacaaaccttattattatatataattaaaaattaggaattttgtagactacatttttatgtgtacttattttaaaaaataacatgtgttgaattttcagtgttaaaaaaaacatgtgttgaattttttggaaattgtctttttcttttaatgcctaaagtcaaatatgtatcaccaatccgtttcacggtcatttcccgtagatcagtccaaattttaaattactagtcaaaaatttgttactttagacattcaactattttaaagactacaaaatgtctgattacaaaaacaaatccattcactcattttatcttacaacaaaataccaaactagtcaaaattttgtttttataaacattcaactattttaaagactagtttttctcattgtctttttttacgtagttgtctgataaaaaaacaaatccatttactcattttgtctacaaatggataccaaactaatatgagttcaaattatgaatcttataccaattttttattttacaaatattactctgtacatgtgattctgagtttaaatatatatgaccaaaactacaaaaataatctatattaaattaaatttaattaaaacgtactttctaaaataagaaatctcgtatgtatgtgcggatcaaatcgagtttgaaattatattttcacctataatacattatatttatgttgtgattcaatttgattttttttttaaattacatttttacagaaaaatgtttctataagtgtccaatgatatccatagcatctttcctgaaattgggataccataatctttccgaaaatgtgatatataccatccacaatctaaaacacttgtaccacaagattgatgaccgtagtagtaaccacatggtttttgtctgcattcattgtttctaaagattgggggaaaagacaaaactacttaatcttactttcaaatcttcaacgtgtcactgatttctccatttaaaatgtttttatctcctcgtagtgctcaccaaaaggttggactctctatgctaattgaccctcttcctgaaaaaaataccaaatctggcaactcatccacaattttacgccaccgaacatttcgccaaaccacacattttgtctgctttctacttcgccagggaaagtggccagagctcatctacttcgcaagaactaagcaatctcttgtaaggtttgttctttcactttcttgtaagcaatttcattggaaggacttaaaatcaggattttctttttggttattgttgccgacagtcaaaaggcagcacaagcaatcatgttgccaaagttcgatccaacagaccaaaaagcttgtctgtctcttcttgaggatgtgactaccaacgtaaagcagattcaagattctgtcttggaagcaatactttcacgtaatgctcataccgagtatcttagtggtttcctcaacggtcaagctgataagaaaagcttcaagaagaatgtacccgttgtaacctacgaagatattaagccttatatcgatcgtatcgccaatggagagccgtctgatctcatctgtgatcgacccatcagtgtactcttgactaggtatcttccaaacaatttcatagatttgtatttataagtttaatgcaagatttgaaagaatttagaccagactagaatatgagaagagactttaaatctaggctcacataacccaaataagatctacccactttggattttcttaattcctctgttttgcctgaagaattgtggttaaaaaattattgatacatgagtttgtcaatcttttaaaaaaagtacattaaggaagggattgtatctgcagctcaggtacttcaggaggagttccgaagctgattcctttgacaacagaggagttggaacagaggatttcgtttgcttctctctatagacctctactctacaagtaaagagttttccaaactccaacttgtgtctgttttattgatgataccaaaagaaaaagagtaggtaaaaccccaaactcattgtatctacggtttgcaggtacatcgagggtattagagaaagaaaatctttcatgttatatttcgtgactcgagaaagcgagactgcttctgggatactggtcaggactatgataacttgtgttttgaaaagcgtgacgccagctaactcttttatctggtaaatctataaaaacctttgctcccacgttacattacacaattcattctttctgctactatttctttattgtgtttgttatatgacttacagggatcaatcacagataagcccgcatgcgattacgacttgttcagacactactcagagcatgtactgccaactgctttgtgggcttctacaacgagataatgtaggtcgccttggtgcaccatttgcttcatcctttctcaaaataatcaagttcttggaggatcactggcctgagttttgctcaaacataaggactggttgtctcagtgactggattacagacccccaatgtgtttcagggatcggtaagttcctcactgctcctaatccggaactagcgagccttatcgagcaagaatgcagtcaaacatcatgggaagcaatagtgaagagactatggccaaaagcaaaatgcatcgaagccattgttacaggaaccatggcacagtacaatccattactggaattctatagcggtggtcttcctgtgatttcaacgttttatggcagctctgaatgtttcttcggtctcaatctcaatcctctgtctaagcctaatgaggtgtcgtacaccatcattccatgtatggcttatttcgagttcttagaggttgagaaagactatgaaagtggtcatgatcccgcagagaatcctgttgtagtcgatcttgtcgatgttaaaatcggtcatgattatgaacctgttgtcacaacgtttgctggtaagtgttttttcttgtttactctctcaatttcaaaactaaatgacatgttaataattttcttaatgtgtatcaaaattctttatacaggtttgtataggtaccgtttaggggacgttttaagagtgactggtttctacaacaatgcgccacagtttcatttcgtgggaagacagaaagttgttctgagcatcgacatggacaagacctacgacgaagacctcctcaaggcagtgactaacgcgagtctcctgcttgagccacatgacctaatgctcatggatttcactagccgtgtggattcctcctcgtatccaggtcactacgtgctctactgggaactcgggagaaaagtcaaggacgccaagctt

SEQ ID NO: 1428 - DNA, 68948 bp, Arabidopsis thaliana
aagcttaaaaaccttagcttgtatatacttctccttgatagatatcatatcagcatagctgggttttccagtgaccatcaccctggatttatcagacctgcacatatttggcagagtaattttaacattatgatttctaggtgatcaaagttatcatcactttcaaacataaatggagttttacactgttaagccggggtcaaaatggatggcgctccttgaatgaagcaattcctcccaaactgtgtttgcgaaagtatttccaagagcttggaacaaacttataacagatggctcccatactttcacgtcgagagtgagtgacctaacctgtagcaacagccaacttcagattgctgtataacttatgtcaaattgaaggccgagccatccaaagttcaaattctatcacatgctctataatctgaattgctattgaatataagcctagtgtcacttcaaaattctcatggacttctttacgtccttccataagttggttgttatagagcctacatatattttctaagcaattaagagttctggagattttttaccttagatatatgcacaccaagattacggtgaacaccagaacattcgatacagacaagaacccccagatttaaagaagcccagtctggttctggagctccacaatccgcacatttgtcattcccacagacctttcgaagagcatcaatgggcttctcaccctttctaatggaccgttgcggctgaaaacttcttgatggcctttcattgtaccccaaaaagctcctctcacatacaaattcttcagtagtaggatgatcatattcagaactttcatatgagctactttcactagcagatcgatggtggccacttcccatgggactaccaggaagacgctgaaatgtagccgatggacaatcaccaaagttgcattggtatttaatatgagcctggtcaggtaaaggaataatgataatacttacctgttcagggacctgagaactaagtagtgatgcaataaccccagtgatcttttctatccaatccatttgatcgagtgcactctcagcctgcactgacaaacataagtaaacactgagtgaaaactattaaacttgggcaaacatgtatacaataaagttttaaggcagtaacaaacactctgaatcaaacctgcaacgtgtagttttttgtaggtgatatgatcctaaagcaaaacctcagatctgattgatcagcgtcgactttaattgttgaggtgagtaagttcactgtatgacgagctacagacttctcatcatggacaccaccatgtccatgattattcgaagaaagccacctactaagcagtccagacccaagctcggagctatttctctgtccagaaagctggcttccagacccctaaacatcaaataatctaagtcagagtgtgaaaagaatgggtcaaatagatttttactttatgaacaccataccgtttgcataattctgctgttttcaaataaaagataaatataaaaccaaaactcacagatggtttgctacactgttttcggtaataatagagcattccccggctgtcaagaacaaaaaaccttcttttccagtctcctctcaggtttgaagatcgtttagagagataaccttgccttattgtttgcacctgaaagcaccaagaaatgttaatagtactctctggaagatgtatcaatcatatgttaaagacgttgatcaacctttcctcttgcagcagattgcattacggcgtctatcattttgtgagagcttctaccgattgcttgtatgccatctccatttggtgatccattagaaccatttgaaccccacctgctctctcgatcaacctgtcttttgtactcctgcatcttttcattaagtgctgcttgttcataatttgatctttctctggattgttgcgcatatgtcaagacctacaaaaaaagagttgatgtataagtagttttctaaatgctactatctccgcgttttcaacacatgtgaagattcatacatagtcgtagaagagaattatacataaaccccaaatatttagggatctatcacttgaagaaaaggaaaataacattaaaccgacctgattgatatatggttccatctgatgcagtaattcgtaaccctgaaagcaaccacgtttagatttgacacaaacctttccagactattttataattctaagcagcataacaaacttacctgtttgaagtaccgaagatgtgcatccattgttccactgactgcttccaaaaattcaaaccttttcttagcttcaacatttgatagagcagtcacctgagcataaattagggaaaccaaatgattacttcaacaatactacgtatggacagcaagtatgtagatttgaacactcaagatcaaacgatagaaaattacaaggttgaaccgagcttgctcaaacatagacctcgaagtatgaagttcctgtcagtgtcaaaatatgttagttacaacatagaaataaaaatacatggttatcaaaaatcagaaacgagctttactaaaatcatgcaccatacctgttctaaagcagcagcaacgtcactttttgtacctttcctcaaagataaaaacttctcacgggcctaaagcacaataagaagttaattagttaatcgtccagataagtgggagccgtggacccaatatgcctctctatttctatcagttattttccaagctacaaatgtagcatgaacaaaaaaactagctaggtttctgcaaatttatacactgcctgcacggaaactgcaacacatatcataactttgaaaaagaggaaccctagcgttcctccattaacgaggaatgattctaaaatatttgagctcgacccattttgtctggttgaaacttttcatacagatttacatctagtaaagaaaagagtcaggatgagaacttttaatctttccaaaatatcttttgtagtgcaaaccaagtcagcggagtggggaaaacaaaaatccttgacaaaagggatacctgatcgtaggtaaggctagccttgtcaaagcgcttccgagcttcctgtggcaaaaatgatctctcagggttccatatccaaatataaccatgtcatgctagcctactataaaaatggaaaaagatatatctggacaagctgactagccacaatgtaaaggcaggctcaagaaacttaaccatattttccgcaatcatcagaccttatctacattaatgacctcagaaaatattcacaattatattttgtttggggaaggttgaccacatgagtgataattagttcttttttttagatttctagtgctgcaagtcaaaccagaagaacaagacctaatgtccatattaaattaaatgcctcttggcaggtcttcatattttctctattcacacatgcagaatatttgtcctccattgtttaatagatattctagtcaatactaatacctcaatgatgcaaagttaactcaaaacatgtatatcaagccaataataaaggaagcagcttgtaccttaacttcatgcaagtccatattggcaaactgaagtaatctgtcattcagtatatgttccacctgacaatggaactcatcaaaatcaaaacctggattgaaatgacttgatctgctctaaatctatatgatgtcttaaggtaaagcaaactataaagaggccatttttgctgaaggaaaacaaagctatcctacgttgataccacaggagttatcagagagaaggctgggaatagggagaaacagagagtgtcaaaatagcaaactagcatacctgtgaccgaagaacttccttataagtcccaatttccctcaacgcaattgtaaatttcgtcattaccggtcctggcacagcaagttagagtttgtcagcacttttaacagcaaattgttaacatttccaccaaaaccagtgaatctaacaaccctagcaaagagaaagcgaagagaaagagcgggaacaacaacttccctcataatttaaggccactatcagtatttagtgcttaaaaacgaaattatgaattctaaaatggaaagtgccaaagaatctcagatgaaaactgcaaagattatgggaataaacagacaatatgctactgcgagtttccatataatcggtcatacctccaaaagccacacttattggatcattatggcctccaccaaatgtttcaagtgcacttgcgaaagcaatgtccccatcgtatgcctcgcctagtccttcactgtaaaaagaaagaataatctatcgctgttaaaagatacatgtttcagccagaagaaaactctaaatgtagagctacaatcctaattagctgtgaaaatttgaactagcatacgtgtatttccggcatcctttgtaaaacttgagacttctttcccgcaatatttctgcgctctcctccatgctttgtaactatttaagaaaaagatatcaatgtaagaacgcagctgcggaaggaaaaatacataaacgcaaagaaaacagtaaagacacaatccaattatggaagaaactgcaactatggataaccccaaagattgagtgattcaggcactctatataggggcaaaagaatcatcaacttcaggcaaacagagcagttgttggacagaatttgagctacactaggaacttccttagcatttaagttgagttagatagcagaagtcctactaaaccagtgagcatgaaagtagtagctaagtggacacaaatgtatcctaaacacacgaatcagagacccaaacaagtgcactggatcataagtcatttcacatttcatggagcaacaagttaaagcgcgaataggccgtccagataaaccaatttcttagtgacacattaattcgaaccttccagtgaagttccactcacattttggaatataaatgtcggtggacattcaaaattccagacacaacacatcctaatggctccaaaattagtatctgttgacaacttttgaagaacaaatctcgcctaatatgacccaattttaacctacgacactaaaagactggacacatcaagacaagcacacatagacaggaaccaaagatatgtagtagaaacaaacctgtttgcggaacatgggagagtcatcaagcttagtgaaatgcattttgagctaatttattacttcctcttcttcgacacaaacagcaattaacataacacgaacacacacaccaaaaacctaaaagctagaaccaccactatgtctcacacagacgccataaacgaacaaaaacgtgagatcctctcctcccaaagcttccccgaaatatccaacagaaacagaaaccgatgatcttcaaagtctcgagccaagcgtaattttgagctggtgtttttttctcgcgaaatcgagagagaacaaaacaagaaaacagtgggggtgtgttttttagatgaagtgtctcgggagaagagaagagacagacaaatcaaagaaaggaagaaaaaaaacttcaccgtctttgtgaaaattttaaccacaaaagacggcgaaactatgccgttttagttaccgccggagatcgtgaaggttggtaagatacgacgtcgtttcaagtgtaaattttttaaagagaggactgactgtgctttttctgtaacagtggtcatctgagaaaacaaggactctggctaaaatccactatatccacgcgcctttaaagcccgtgtagtattaaagaggctggaaattaggaggcgcgtgtagtaaacgcgattctctcgagagtattaatagagaggggagagtgggacccgttatctggttgcttctccattatcttttgttccggagagacagagaggccagtggggtataaatgattccttttaagacatgtttattttattttatatgaaaatatctttaaatataaaaaattgaacacttatgattactttcttttggaaaaaaattgttaaagcaaaaagaaaagtgggagaaatttggaaaaaatggacacgatgatcttactttcttttgcagactttacagtcgcatatgattattaaaatacattttcttggtttcaaaatccttattgtttaatgaaatgtatgatctcttgagtcttgtccagctagttcaatattgtttaatcataacgataatcgtcttaaatctaggttaagatctttgttcaactggtaaaactaagacatctgcaattaaaaacataataatgaacattatgtattactattaaccaacatttaatatggtcttctaatcagattttctcacatcaattttctttcatctttctcacaacatttatcgtatgttttctctctcaaatgatttccgacatatggctatcaatctaatgtaacttagatctctcttttcctttttagactgtcgcatctttcatttccttattgacctcaaacggcctacggatactaaaatccactttagcacacaaccaaaaaaaaattaaaaactgtatagaggtaacagtgactagtaggccgatattgggccaagaagtaggaaattccattaagccaggcccattataaaatgcccatttaaaatttgttttgttataggatcacacgaaaggcggtctattattttgttcgttcttcgtttattcacagcaatcgatttgtgtgtgtttcaatttctaatagcttcacaatggcatcgtctggatcagccgacgaagatttccagtctcgcgttgcgaagatcttcggatctctacccttctctcgtccttcgtcttccaagttttccacgtcgtcttctgctccggcgtcgcggcagcaatcggggtcggtgtggactctctccgacacagaggtagagaagcgggagtggaagcgagattcgtacgatagagacgagattccttgtgcttcatcctttgacgagctcttaaaacagcagaagccttccgaggatgatctcaaagatattgattgcggcgaggattttgatggtgtgtggagtatcagagcctccatgggccttgatcgcactctcgatgacgaggtaaatcaattttggtctcttaacgattgtttctcattgcttagctaattgaaattagggaacagtgttggtcttttctcttggatttggtagattcatatgagaagagcattgaatttttaatgtagtatcatattggtttgtgtgacttatagagtttttgtacgtgaatcatcaacctatgtaaccagctttaagattcttgaatttgagtttttcttgctataactatatgtagcacataccgtattatgaataggatgtcactttctttgatgctgagtgttgtttccatgaattatgcttcttaacacaggcagaggaagatgagtatgataaagttgcactaggggaagagaatgacggtgaaggctgtgggcggattcgggatcctcgtgctaactatgttgctgcaagaattaggctgaaggaagatgaaattgaggctaacaagtttaatacttctgcaagtcaaccttcggaaagcaaagagccacacgcagaagaatcatccgaagctatgccgcgaaaacctatactcaaaaggaaggagaatagttcagattcagaagcaaggacaagtaagcgagtcaggtttgattctgtgcctgaagaaacattgaagaagcctgaagatacttgttcagcttctgcctcgtcaaaaatcgtatctcatcagggaaaaagtggtgctcgggtaccggattacttgctaaatccttcgagttacacccgttacagctttgatccatcttgtgaattggatgtggagtccccaacaggagagtacatggacactcccaatgctgttgaaggattgaaaaatccagagtcagaatcatttccaaaagtctcctttattccgcagaataagaccaaggacgtaagtgaagacagtagtaactgtaatgagacgaagcctatcgtagctggagagttggcagaagaagagagaccaagtgcaacagaagatggggatactgaaatacgagaatcagagagctgcaccagtttccaaagcaaaggtcgtcaatatcgtgccaagcttagtttagatgaaacagatgtctgatctttcacataccagtttggttggaaaacgctacacagagatgaagttggggtccatgagatacaatcatgtagcatcttttagccgcacatgtaagatatttttaattcctagacttcttttttacccaatttagagactgtattacagcgaatgtatggtaacatagtaagaaactgtttacctttgagactggttgatagtacacgcagaagagaatctaaagctacctcaacttcctggaagctatcttgatagattccagtgatgttgccacaagttttgattcaacactagtgaatcgtttctgggaagattccagggttaaagaaagacatggttttgagcaagcaatttataattatgagcaggtgaaagtctgttgatctgagaaagaaggaaacacctcttcttattttctttttgattcaattcatcaagtttagtatgactgcagattaatcaaatcatggattccaattgtttgcgttaaagatttttgcttaaagcaaagctgtcgttaattgagcaattgcttagggttgttccttcagttcgtgaatctgtttttacgggttttcagcttatggtttcatcaaaagaccactcgttgttgcagtgttttttaaacattacacatgtctttcctgacaggaggagaaagttctaatccgaagacaagactggtgtgaaaatttctggtttgttttagatgagatgcatatatgtatgtatgaacgaaaacagagaaaaaaaatgggagggacggacacaatactgctgttgttgagccttaaacggctttgacaagctgtcttttttccttaatactgtatgtgtgcataactcatataccacattcatcattttgtgtaacttgcttaaagatccattccatggatagctctcttaactatggcctcttgtttctgcgtacggatgcatttataaaatgttgttttttcatttcgctaatttgacatttatggtagatacgtgtgtttttggaaggacacaccaaaatactagtagacgaagacaccaaaccccacttggtgtgcatatcaaagtcagaagatggagactacttggaagtttatttgatcaaaactcgtgtttgacgttgtagcttattaagaaatgacttttaactctcaaggtttacctggaacatcgttttctttttccagcgaatttctgggcaaatatccctccaggcccacacttcataagctccattaaattataagtttttaattttatgtcaaacccaaaccgttttggttgtctttaatccgttaagaaatttcagggcaactagaagcaatccataaatattattacgattacaaaatttgcttaagaggattaatcaaaatatttttgtgaaaaatatttcaaatattaactttcattacaaataaaggatttttaccccccaaaaaaaaaataaagtacttttataattaaaccaaaatattataattacctaattataaatgaatattttatgattatcttacataaaagatcgatgtttacaaaacaaatcattttcaaaagaaaaataagtacattaaataataagatcccctttgatttatggtttatttagaaagtcaaaacgcgaaaatgttcgaaaatattataaagccatttattcagtagatgtaatgtcttatacggcccgagaagcggatgcgttccgcgtagcaattgctcgggcttgcatggacgctacttaaatcgacacgattcatactatattgtctgtcaaatcgatagctcgtgggacgtatcagattcattaagaggcgatggatggcttgtcctttctcgctagaatattgccctcctcgggttaaagagctaccacagataaatgtcaccctacacacatagttcgaatatctcttttgggcaataaaatgtcatattttgtcctctttagctagtgtgatttttgagacataattgtaaagatttaattaagctaattggcgttctagatgaatggtcatcctttggtatttaagtaagaaaattcaaacttttaaaaatttgattttttttttttctttgaattatttttttctagtttgtactagtttttctaggcgattttttttaaaaaaaatcaatggatgaatttgttttgttgcaaaataaataaataaaaaaaaaaaaatatatgtagtagggttgctggaaagattatcataaaattaaatatttaacagtttatggagaaagaagataaagaacggaagagattaacaagaaaatagttttggtttttccttttagggcatttgtatcaattgaagacgaatgacaatgtttggtttggtttggtttggtagaagtaaaaaaacatatagtaccgttgggcaggataagactagactacgattggagcttaagcgagaaccatatataatatatcagtgataccattggatcgtactattgtctttgctgttgtattattgatctttatttttggttttgtttttgtttaatgcaatttcaaaaatttccaaatcctttgtaattaaattgagtgtaccaatctggagaaaagatacgagactctgttgcaggtgagtctaaagtctcttgcgttcaatttcatgttcttttctaatattgaaacttcgtttgtaatttctagtctccatcactttcatcacacgactcactcaactaaataaatagtttttgttgactcccattgtagagtcttttgtggtctttgttgtttatgaatttaactatatttttaatcattttcttaatatttatatttgactcgcagcgtagagtcttgttgtggtctggtctttgtgtatgagttttatttttcttgcgcgaaagttttaacttgtttcggaagtaccaaattttgcagaagttccttgtggatttctctgcgttttcctgacttctcatgattcatgaaacagacaccaaaagaagaataaaaaaactgatagttgcataatgttgactattaaataatcgacaagatgatacttgctgaacaattcgtcacaagttaaaacccaaggaacaaataaatcgtcaaaagttattttaaactagattacatacgcaaattttaattttatcacaattttgcatggtactagtatactgcataattgcatttaaactttcaaaatttgaaacctaagctggtattacttgtattcctctacatattacacataatacttatttattatattaagcttaccaatgtcctttgagttattttaccaaaaaaaataatgttctttgaattagttaaactaattttccatgaaacagttagctaataaatattttccatgaagccttagatcgatgtcaaagtctcacatcatgaaaggttctcacagactctacacgttttttactaagcattgctttggaaatttacgaaagaacattttccacgaaaccatattttcgacgaaattacattttccatgaatatgccgacaaaagaaaaacattttccatggatattagttaaacaaactatttatcatcagatgtctatattcctatgtaatcagctaattacttcgctcgtatattaatctattcctagttgttggaatacaaacaaaatgaagcatttgtgtgtcacacttcacacgctaaggtcagtattctataatcaactaaaacattatcaaattgtgttactcggtcgagactttttatacagttaaaacattgacccagactcacgaactgccaaatccatttaattagttagggtttctcttgctatatatagagccaagtgttaactctgttttcatatcaactatcaactaataaccaaactatccattcttttcttcttattttttcatatcaacttaaagagaaccaaatatgaagccaatcttcgatatcaacgaaacttttgagaagcagctgaaggatttaacttcaaatgtgaagtctatacaagacaacttgttagaggagatcatcacacccaacaccaaaacagagtacctccaacgttttctcatcgataggttcgacaaagagctcttcaagaaaaacgtaccgatcgtgtcatatgaagatattaagccttatctcgaccgtgtcgttaatggagagtcatccgatgttatatcggcccgaactatcactggattcttgctaaggtacataagaagctatctctatatagttttattagggttcttgtcaaaaactatatgcttacttgtagtgttttttttggtagttctggaacttctggaggagcacaaaagatgatgccatggaacaacaagtacttggacaatttgacattcatctacgatcttcgtatgcaagttataaccaagtaagtgcaacattttttccttatatttttgtaacgattattatttggatcaacccattgataaaaactctcttcttgttctgtttaggcatgtgaaaggtgtggaagaaggaaaagggatgatgtttcttttcactaaacaagaatccatgactccttctggcttgcctgctcgagtcgcaaccagcagctatttcaagagtgactatttcaagaaccgtccatcgaactggtattactcgtacaccagccctgatgaagtcatcttatgccctaacaacaccgaaagtctatactgccatttgctctgtggcttagtccaaagagacgaggttgtgaggacgggttccatctttgcttcagtcatggtccgagctatcgaggtccttaagaattcttgggaggagttgtgttcaaacatccgatcgggccatctcagtaactgggtcacagacttgggttgtcaaaactctgtttctttggttcttggagggccacgtcctgaattagcagacactattgaagaaatatgcaaccaaaattcttggaaaggtatagtcaaaagactttggccaaacaccaaatatatcgaaaccgttgtcactggttcaatgggacagtacgttcccatgttgaactactattgtaacgacttgcctctcgtttcaacaacttacggttcttcggagactacctttgggatcaatctagatcctctgtgcaaacctgaagatgtttcttacactttcatgcccaacatgtcttactttgagttcataccaatggatggaggagacaagaacgatgtggttgacctagaagatgtgaaacttgggtgcacttatgaacccgttgtcacaaatttcgctggtgagcttaaaaacatcgatcatgaattcaataaaatgcatacttttttctacatggtttaactaatgtttgtgaaaatgttttttttttcttcaggcttgtataggatgagagtgggagatattgttttggtgactggtttctacaacaacgcgcctcagtttaagtttgtaagaagagaaaacgtcgtcttaagcatcgattccgataaaactaacgaagaagatctgtttaaggctgtgagtcaagcgaagctcgtactcgagtcatcaggtctcgatctgaaagacttcaccagttatgctgacacctcaacatttccaggtcactacgtggtttacttggaagtagataccaaagagggagaggagaaggagacggcacagtttgagctcgatgaagaggcactctccacgtgttgtttggtaatggaggagtcgcttgataatgtttacaagagatgtcgattcaaagacggatcgatcgggcctctcgagataagagtggtgcgtcaaggaacgtttgattctctcatggacttcttcatctcacaaggtgcttccaccggtcaatacaagactcctagatgcattaagtcagggaaagccttgcaagtattggagacatgtgtggtagccaaattcttcagtatttgattgttcttccttggttttatataggttcaagtgatttgtcttctttttttttccataaagggtttggttcaattgatttgttgtgatttgagagtgtactaatttgtctgaatgtttgtttatatttttttaatatatatatttgattcagtctttatctgattttcctctttaaacggaaaacaccattgagaatttccgagtctttactcagaaacagagtattttattccattgaactgaagttggcaaagacttggaagatggccaaacaactttgagatgaaaccaaacccttcgttacacttcaccaccctgagccatgagtccatgactaacaacaagtaccaaaataacaatccggtttcgttttctttcggttcgtgtgtttttcaaaaaccaggtaaaccatgtgtagtttggttttgttttggttatgatgattttagcataattttagtagagtgtccaaaacacaaaattttatatgcagtttagtacctgactaatcttgcagcttttagaaaaataattgcaactttgcaaaattctctccaagcaaaagaaaagattggactcgtcaatagaagcaggcccggtccaaaaggtggtacatacaggcgacggcccaaaggcccaatttatccggaattaatataaaatatggttaactgtaaatatatgattttcaaatggatacactcatacaagctttgattcctaaaattagattacaaaaattatttttcgtactttgctgcatatataataattgatttgtacataacaaatcaattatacgatcgaatttcaaaattttaatagataatatactggaacaaatacatatacaaatataccaataaaaataaaactgacccaattagtttattttattttttagtaaaaaaacagatgaaaaattagaaatgttgggtccgcactcattccttatttgtgcataacactgctgccaaaacatgcgaagctaataagctcccaaaaaagtttaaagattgagaaaaagaaaaagagaactatgaactcaaagaacggtcctaccccgcaccattccaaagattttaattaatatttttatcatctattttttcttgtagatccttctctttataaaacccttttgtcacctcttctttcctcataacatcacatcatagcctaaaccaaagaaaacccttatttgcgatccccacttgttgttcatcaccaagccaagctccatgtcctagtcactccacagattccctatcatcatcaattcgtttcaaacttagttcctttcaaagtcttgtacatatatacacacacacctattattctcttggtgtgtttgtgtgttacatatacgtgtgagtacatactttgttgtaaaagtggatcggaggtatggaaagggaccggttccaccggaaacatcggcggcggcggatgataattcgtcttggaacgagactgatgtcaccgccatggtctccgctctcagccgtgtcatagagaatccgacagacccgccggtcaaacaagagcttgataaatcggatcaacatcaaccagaccaaggtaactaatacaataattatatcttgatcatatgacagcttaattgtttttagctagttgatgtaactttgttataataagttacacactaactaaagacttactattaataaccctttgtcgaatttttctttcttaattattatatttgggaaaaaaggaatttgtgtaggttagaattcaagttcaagttcaatgcatctttcatttaatttactttccgtaaagaactttccttcttgtttttgaattgaaccaccgatcagcatacaacgtgtctatcctcttttttaatatatacatctagatttgatttttgtttgtttgtttgtttgtttcaaagtacaagttagataatattttattgactccatgtcttaagtcgtcaaacatatatacatatggcttcttacctaactgattagagtaattttgaccacgcatgttccttttgttcattttgaaaatttagttatcttagatatcattctctatcaactttatggttgtccttttatcaatattttgaagtatttctttccacatgattaactcgtttttaagcttcgttagttagaagccaaaatatgtcaaaatgacacatacgcatggtctttatcaaaactcatgacgaattagttttaattatccttttatttcatttacactttttattatttgaatgctaagttaatcatatgtagaaacaaaaatccagttattctttctagctagataccgtaacttttatttttgggacaaaacattgaattgacgaggatttcttttgagttttgagaatgaatcttcaattgtttaaccaaatatatatgttttgctcagtattattagtttatttgtgtgaattttgatatgtcaatatgtagctgcttgactttctgaatatttcgctggtctgacagaaaaaaagaagaagaatatttcgttgcttaaaactgataaaagtaataaatatagcaatgaatcaattattcaactggattgactctattaataggaacagctttatagaaaaattgtatatatgattcaagctttgattttcggttcagtccaaatgtctagtaattacagaaaatgtaaaccacatacttgaacttcaggtttgattgcctgtatatatatttgattccatcaaaactaaaaagttaaaaatgtaattttatgagaggaatagtatatagtctatcgtgcaaagttaagtaatccacatagttgatacgttttaagtattattgtatgcatcatctttagttaaatccttcattcttttcgtctaaatcatatatattaaacaattattctcttgctataaccaatcgttgaaatcccacgtagcaataattcttctcatgcatgtagaattgcacatgcaatatgtaatttttgttttaatttcttgtttcatgttcttcaagatcaaccaagaagaagacactatagaggcgtaaggcagagaccatggggtaaatgggcggcagaaatccgcgatccaaagaaagcagcccgtgtctggctcgggactttcgagacggcagaggaagctgctttagcctatgaccgagctgccctcaaattcaaaggcaccaaggctaaactgaacttccctgaacgggtccaaggccctactaccaccacaaccatttctcatgcaccaagaggagttagtgaatccatgaactcacctcctcctcgacctggtccaccttcaactactactacttcgtggccaatgacttataaccaggacatacttcaatacgctcagttgcttacgagtaacaatgaggttgatttatcatactacacgtcgactctcttcagtcaacctttttcaacgccttcttcatcttcttcttcctcccaacagacgcagcaacagcagctacaacaacaacaacagcagcgtgaagaagaagagaagaattatggttacaattattataactacccaagagaataatctaattattattgttggtcgaatcagttttataaatagctatcatagtttcatttttggtttccgtaacctttgttgcatggaaaatatgaatgaacgagggacatgtgtaacaatttgtttgtgtttcgtaaatgttagttgtatttggatttgctgaagtttgattttctgagcataaatcatttgacggtcattcatgagacataaattgactctttagagctaaccagatatgagtaattaaacataatccaaaactagatttcaactatgcggaaccttgacaatatagcggcaacccatacacaaacctctatcatcgacaacctcaacgaacacgtacgaaccacaatacaccgtttatttaccgtcggatatatccaattgcaagcaacaatcctaatttactataaatatatatatatatatatatatataataaattacgtagactaaattcaaacaaaaataaacgtgcagatcttgtttaacaaaaataaataaatacactaatttacttagactaaacagcttgtttgcatcaaactaaagtaataaaacatcaaaaatagggaaataattagtaatgcagtatccttccccatacttatatcttttctaatctatgagcaaatcattaaccaaatttgggtgatactattattccataaacatcaaaatatcaaaagaaaagagaaagcaaaaatcaaagtacaaaaagattgaggggaatgttactcgagctttagtcgtggtccctctcaatatagtcgcatagattaaaattttcttcttttatttttttttgctctctttttttcacgtgcagttcttttcaatttttatataatgaaatattgcaggagcttgaaagttctatacgaaaattaaacgccggtgcacgagatattactcggatattaagaactgggacacttgtttaatctgaattagataaaaataagtttcatttcttctataggtatcggcctatatcatcaaacatgaggactcggtttcggaaaagtcaaagtgtttggtatactatttaataatacatcgtataagaaaaaagatggataagcattgactacaagtggttaacaaaaattctttgaagtttaagtgtcctaagaaaaaaaaaaaaaaaaaaaagccaagtgtgctcaaacaatcacagatgatcactacgaatatcgcaatcactaatgatttaaagaacaaaaaacgttttcagctaaaaatatcgcaatcccaaaaccaaaagtgttatttgatcttacaaaataatgagacttatctgtccacatatttatgtgtcttttttagaaacgaatttgtgtgcatgcatcaaatcgtactcgattatatttgtttgtggtttatgtttcttcctcttattattattaattgttgatacatgtgactatgggagagtaggacaagcaaacttggtcttcagatttagatcgatcttaccccaccaaagatagtactttaagcaccgtgtatctttcattattgtatctcgagtttgattggccttccctcgtgatcgtctcagaatagtttctgcaatatattccatattacttttttacaaaaaaatattccatattacttacagttcattttatcaaataatactaaaaaatacatacatgttcatggatttaaattcaaaattttttggttaataaaaaaataatatacatgcatctatatgtatgtctagtcatattttgtgtggcttttaacattgtttgggttggtctattcagagatctgggtggattatcaatgaaaaggcatcagttcagggaaaaaaaaataagatctgggtgggttgataattgaaagtttgaaactatattaatatgcacattcataaaatgagattagatgagatgatgtagaaagataagtaaaagatagtaaagagctttcttctacagagttacgcatgcgcaaaggcaaagggaaactgggtcccatcccacttagttacgtcaagtgtgttatttcgagggccatcttccagatcccatgacctagtcttttcatctgtcaatcccaatatcgatctttaccatttctgatttttttctattctttattactctgacttcttaagtaattaagttttagctatacgacacaaactttcagaaagacaaaaatactctattttctatatatatatattaaaaaatagtctgctatagtactattgtactagagtagtaaacctaattcataattaaaaattaatttaagaatgagtgtattcagattttatttttttattttctgataaaaacaacttatattctgaaaacatgagaattagcaaatgatataaacggatagaagttgaaaagatagatatgaagttctgaatctattattatttgaagattttatgttaagctattttcaaaaaatccttctttgatattgacttggacgtacggtatctctgacaagcgagacttttagcatgctttcggcttcgaagattcaaatattgcggctgctttgctttgattccgctgagagtggaactccccccagataacaatgatgatcttcgcatgcacatgaagatcgcaactcttatgtgtgaatagatttcgatatacactatattcatttacgtgcatctttaatttatctcatatattcatcctttgtggggtatgttcgtagactcgtagcaatcaaaacattagggtaaaatgttatcagtagtaatgagtttataatgtggtcccaactcccaattgcagactttaaaaattatttttttcagacttgaactgcacaatttagaaaactaaatgttacctctatctatttgtttaagttttatggtttattcttaaaactcaaaagaatgctttgtgtattttgtatagtttctctttgtcaatgcttatatgtatttaaaatacatgagaagaggaattagctcatagaagtgtcaaagtcttcttacatagtatatagcttactcaatttctaaaacttttgtcaagttttgtaatagacattctgatttctagaaagtatatatactgtgcattttctaaacttctggtattataaaacaaaaaaatcgataaaacaaatcatattatcagatttttaacaacatgcaactttttctaagtaaactaacaaaaaaaagaaattacaattattcctcacatgttaaaacaggcttttgatcaggtccggcccaacccgccagcccaaagcccgccagagctattatcaaactttaccaaactgatagatgcttctttccaaagattaactaacatagtgaagcaacaagctctatgaagggtcagctagagaatgttgtctgtgcttacttggatgagtcaactcctcaactgtatcttcctattctctgatacaagaagtcaaaagtttcttcagactttgccttcatcaatgtttctttaattataaacccatgccgaaatgcagcttggatcgtgatctgtttccatttgatagcttgctggagtttctaatctcttcttcttcttccagcttctttctccttgcagcctcctccttctgtctctgcaggagctccaattctcgatacctttcctcttctttacgttgaagttccattgcttctcgcctttgagattcttcaaccctcctactattttcttctaacatcttatccagctcttctctttctctcctagcttgttccttttaattaatttccaaactttttagtttcagcaagtattccaaagccagaaaaccaaacaaatagagcggcaaaattgaacaaacaactagctagacttacttcttttcttcttgcctcgtttagagcagcttctttttctttcttcagctgtatttccacgtcaagaaacatcttctcataagcttcctttgtccgtctttcaatttcttctttaacttcttcggttttcatcctttcctctacatttttccttactgcttcctcaatccgctgtgcagtctcttcttctagtcgcttgagctccgcctcatgctgcaatctacatttagtaagggaaaaaagatttagaaagaagataagactgataacactagccaataaaaacttttcaagatcatataaacgcacaaattgatcagttattcttctattcatgtccaaacagtattcaatttagataaggaaacaaagaggttgatcaacaatcacagaggcgataattcaagaaatgtatttttgccctttcgtgcatgtcaacttgctcactagcaaaatacattcccctaatgtggaaaactatattgcttcatacacaaaataataaagtataatacaatctgaaagacaaagacaatgtttaatcaattaccttgccttgtcttcctgttctttcttcacttcaatcgcaattctatgctcggaaggagacaatgaactacttctatccctttggtgttgccttggtgcaggagatctgctcttcttatgcctacaaaaattggaaacctactcttatgaaaatgtgttgaactaaagcagctccttcttcactagcagctggacatcgaacattaatgtccatagaaattcgtttgcaaaacagcaacgatccaaagtgaagtaacaaatttgaaatttgttctcgacaaaatcgctaaaccctaaacctattctctaagccctaatcctattctctaatcccaagtatctaaacgtaattcccccacatcaccataagatacgagattcgatttctccacattaagcaaggaagattgttgcagaccttgatgtgtagggtgagcggctgcggtcgcgcctggtacgacggctgctacgatgagtcacaggcgagcgagagtaccgtcggcggtgagacggcgacctagatcgcgagtcgtttcgagccattttcaccaccgcaattatttgattggtcaaattgatttctctctttcggagcttttttatgcgactgctctcgtacgatttatcgatcggttcaatattttgttaaccggacagacgcaagttgaaccgaccttgtttgcggtttaattcaaaaaaaaattatcctaattaattagggttaatgaataaatttatctttctaaaaatgggattttctttacttatgctttgtcagttaattctatttatggaaataagaacaaatcatacggcaacgaacatatcgtcacaccacaccatttgactgactgctttttctaatctctccttacaaagctttcaagcatagaaagacacaggccaaagctcatccatccacctcgccagaacaaaggtttgcttgctcttcactcttttgtaaacaatttcgtgatacgacttagaaggttttttttttttgttgttggcagacaatcaaaagcaagcatgttgccaaagtttgatctaacagacccaaaagctagcctgtctcttcttgaggatgtgaccaccaacgtaacgcagattcaagattccatcttggaagcagtactttcacgtaatgctcataccgagtatcttaaaggtttcctcaacggtcaagttgataagcaaaccttcaagaagaacgtacccattgtgacctatgaagatattaagccttacatcaatcgtatcgctaatggagaggcgtctgatctcatctgtgatcgacccatcagtttacttgtgatgaggtgccttcaaaacgatccgcctttttttttggatctgtgcaggataaccaaaataatttcaaagctttgtatatgcaagatctggagggatatagacaaatttatagattagagaatttccagaagagacttggaatcttggcttatatatcataaaatgagattgacacacatgcacatggagtttcataagtccgtccacttgtttacaaaaaagattaatataggaaatttggtttgaaacttgttgatacttgagtcgttaatctttaatgatgtacattaaaattgaagtgaagaatatataacggaagttaaatgttttgcagctctggtactacagcaggaattcaaaatttgattcctttgacaacagaggatggggaacagaggattatgtttggatctctctatagatctttactctataagtaaatatttctaaactccaacgtgggtttgttttattgatgtgataccaaaagaaacattcattgtaattgcaggtacgtcgaggggattagagaaggaaagtctctcacgttctatttcgtgaaccctgaaagagagactgcctctgggatactgatcaggactatgataacttgtattttgaaaagcgtaaacaaaaccaactcatctctttggtaaattaacaaaaactttttccccacgttacattacacaattcacttttttgtgaacatgctcattggtgcttactactgtttgtttttcgtgtttgttatattacttgcagggatagattacagataagcccgcatgaaatttctacttgtgaagacactactcagagcatgtactgtcaattgctttgtgggcttctacaacgagataatgtagctcgcctcggtgcaccctttgcttctgtcttcatcagagtaatcaagtacttggaaggtcattggcaagagttatgctcaaacataaggactggccgtctcagtgactggatcacagaccctcaatgtgtctcagggattagtaagttcctcaccgctccaaatccggacctagcgagccttatcgagcaagaatgcagtaaaacctcatgggaggcaatagtgaagagactttggccaaaagcaaaatgcgtcgaagccgtcgttacaggctccatggcacagtacattccgttgctggaattctatggcggtggtcttccgttgatttcatcgtggtatggcagctctgaatgtttcatgggtgtcaatgtcaatcctctgtgcaagcctagcgatgtgtcgtacaccatcatcccatctatggcgtacttcgagttcttagaggtcaagaaagaccaacaagaagctggtcttgatcccatagagaaccatgtggtcgtcgatcttgtcgatgttaaaattggccatgattatgaacctgtcgtcacaacgttttctggtaagtatttgttgcagagtctttgcttagagaaaatgatagaaagacaaaataatcattttaattgttttcttaatgtgtaacaaaaaatgtctctctcaagatctccatatggtttgacaggtctgtataggtaccgtgtgggtgatcttttaagagttactggtttctacaacaattcaccacatttccgtttcgtgggaagacagaaagttgttctgagcctccacatggccaatacatacgaagaagacctccttaaggcagtgacaaacgcaaagctcctgctcgagccacatgacctgatgctaatggagttcactagccgtgtggattcgtcctcgtttgtaggacactatgtgctctattgggaacttgggagcaaagtcaaggacgccaagctcgaacctaaccgcgatgttatggaagaatgttgcttcaccgttgagaagtatctggaccctctctatagacaagaacgaagaaaagataagaacattggacctcttgagattaaggttgttaagcctggcgccttcgacgaactcatgaatttctttctgtctcgaggctcttctgtgagtcagtacaagacgccgaggtcggtgaagactgaagaagccgtcaagatattggaggccaacgttgtttccgagtttcttagtcaggaaactccgccgtggggataaaaccccgtcattttctcttttttttacttgagggcagcagatagtttagaaaacttttcttgatttttttaattactaaattagtcttccatatcataatctaaaaattccttttaatgtttggacaaatactggaagttccaatatccctaaccttaaatctatatcaaaggtagttgtaattcggattcggaaaaatccagatttgtactttaattgtgcacaaaccttattattatatataattaaaaattaggaattttgtagactacatttttatgtgtacttattttaaaaaataacatgtgttgaattttcagtgttaaaaaaaacatgtgttgaattttttggaaattgtctttttcttttaatgcctaaagtcaaatatgtatcaccaatccgtttcacggtcatttcccgtagatcagtccaaattttaaattactagtcaaaaatttgttactttagacattcaactattttaaagactacaaaatgtctgattacaaaaacaaatccattcactcattttatcttacaacaaaataccaaactagtcaaaattttgtttttataaacattcaactattttaaagactagtttttctcattgtctttttttacgtagttgtctgataaaaaaacaaatccatttactcattttgtctacaaatggataccaaactaatatgagttcaaattatgaatcttataccaattttttattttacaaatattactctgtacatgtgattctgagtttaaatatatatgaccaaaactacaaaaataatctatattaaattaaatttaattaaaacgtactttctaaaataagaaatctcgtatgtatgtgcggatcaaatcgagtttgaaattatattttcacctataatacattatatttatgttgtgattcaatttgattttttttttaaattacatttttacagaaaaatgtttctataagtgtccaatgatatccatagcatctttcctgaaattgggataccataatctttccgaaaatgtgatatataccatccacaatctaaaacacttgtaccacaagattgatgaccgtagtagtaaccacatggtttttgtctgcattcattgtttctaaagattgggggaaaagacaaaactacttaatcttactttcaaatcttcaacgtgtcactgatttctccatttaaaatgtttttatctcctcgtagtgctcaccaaaaggttggactctctatgctaattgaccctcttcctgaaaaaaataccaaatctggcaactcatccacaattttacgccaccgaacatttcgccaaaccacacattttgtctgctttctacttcgccagggaaagtggccagagctcatctacttcgcaagaactaagcaatctcttgtaaggtttgttctttcactttcttgtaagcaatttcattggaaggacttaaaatcaggattttctttttggttattgttgccgacagtcaaaaggcagcacaagcaatcatgttgccaaagttcgatccaacagaccaaaaagcttgtctgtctcttcttgaggatgtgactaccaacgtaaagcagattcaagattctgtcttggaagcaatactttcacgtaatgctcataccgagtatcttagtggtttcctcaacggtcaagctgataagaaaagcttcaagaagaatgtacccgttgtaacctacgaagatattaagccttatatcgatcgtatcgccaatggagagccgtctgatctcatctgtgatcgacccatcagtgtactcttgactaggtatcttccaaacaatttcatagatttgtatttataagtttaatgcaagatttgaaagaatttagaccagactagaatatgagaagagactttaaatctaggctcacataacccaaataagatctacccactttggattttcttaattcctctgttttgcctgaagaattgtggttaaaaaattattgatacatgagtttgtcaatcttttaaaaaaagtacattaaggaagggattgtatctgcagctcaggtacttcaggaggagttccgaagctgattcctttgacaacagaggagttggaacagaggatttcgtttgcttctctctatagacctctactctacaagtaaagagttttccaaactccaacttgtgtctgttttattgatgataccaaaagaaaaagagtaggtaaaaccccaaactcattgtatctacggtttgcaggtacatcgagggtattagagaaagaaaatctttcatgttatatttcgtgactcgagaaagcgagactgcttctgggatactggtcaggactatgataacttgtgttttgaaaagcgtgacgccagctaactcttttatctggtaaatctataaaaacctttgctcccacgttacattacacaattcattctttctgctactatttctttattgtgtttgttatatgacttacagggatcaatcacagataagcccgcatgcgattacgacttgttcagacactactcagagcatgtactgccaactgctttgtgggcttctacaacgagataatgtaggtcgccttggtgcaccatttgcttcatcctttctcaaaataatcaagttcttggaggatcactggcctgagttttgctcaaacataaggactggttgtctcagtgactggattacagacccccaatgtgtttcagggatcggtaagttcctcactgctcctaatccggaactagcgagccttatcgagcaagaatgcagtcaaacatcatgggaagcaatagtgaagagactatggccaaaagcaaaatgcatcgaagccattgttacaggaaccatggcacagtacaatccattactggaattctatagcggtggtcttcctgtgatttcaacgttttatggcagctctgaatgtttcttcggtctcaatctcaatcctctgtctaagcctaatgaggtgtcgtacaccatcattccatgtatggcttatttcgagttcttagaggttgagaaagactatgaaagtggtcatgatcccgcagagaatcctgttgtagtcgatcttgtcgatgttaaaatcggtcatgattatgaacctgttgtcacaacgtttgctggtaagtgttttttcttgtttactctctcaatttcaaaactaaatgacatgttaataattttcttaatgtgtatcaaaattctttatacaggtttgtataggtaccgtttaggggacgttttaagagtgactggtttctacaacaatgcgccacagtttcatttcgtgggaagacagaaagttgttctgagcatcgacatggacaagacctacgacgaagacctcctcaaggcagtgactaacgcgagtctcctgcttgagccacatgacctaatgctcatggatttcactagccgtgtggattcctcctcgtatccaggtcactacgtgctctactgggaactcgggagaaaagtcaaggacgccaagcttgagcttgaccagaatgttttggaggaatgctgcttcaccattgaggagtctctggacgcggtttacagaaaaggacgaaagaatgataagaacattggaccacttgagattaaggttgttaagcctggcgctttcgacaagctcatgaacttctttctgtctagaggctcttctgtgagtcagtataagacaccgaggtcggtgacgaatgaagaagccttgaagatattggaggccaacgttgtgtccgagtttcttagccagaaaactccgtcgtgggagctacatgagctgcattccagccgataaaaccgccctcacaatttttttttctagttgagagtaggatacttaagaagggtgaaacaatgtagaacctaaaataaaacttagcaatgatgagaaaattttactctcacttgtcctaccattcaaagctatataccattgatgggatatcaaataagagtataccattgtaaccatccaaaaatctttaactcctctactacgcaagatttttgaccgaccttatcacatggattttgtctttgttgtttcaaaagcttgtcaaaaatagttacacaaaatatgggaaaatcacaaaatcatgttttttttataatattttaaatagaatttttctaattaagtttaaatatttaaaagactaggttaaaaatacaaaactacatttttgttatgtttttggtatcttattaataaataaataaacccgaaaaggactaaaaatacaaaagctaaaaaggctcaaggcccaatataaaagaaacgaaaagcccaataacgatttttttttgttaaacaagttacttttttgagaaacgaaaaaaaaatctaaatatttggacatatgcagtaaaagtctaaaatgtatcagactttcaacaacgtgtcaatactcaatacccaataaaagcttttatctcctcgtagtactcaagttggatttgttttctcatcctttgttaaatcctctttatgagaaaagaacaaaatcaactcatacatacacaattgccggtaccctaacatttcgccacaccacaccttttgtctcctttatccaatctctcctccatagttctgaagcttcgagagagaggggccagaaggtcacccagaacagaggttttgcagacaatagaaagcagtaagcaagcatgttaccaaagttcgatccaacaaaccaaaaagcttgtctgtctcttcttgaggatttgaccaccaacgtaaagcagattcaagattccgtattggaagcaatactttcacgtaatgctcaaactgagtatcttagaggtttcctcaacggtcaagtcgataagcagaacttcaagaaaaacgtacccgttgtgacctacgaagatattaggtcttatatcgaccgtatcgctaatggagagccgtctgatctcatctgtgatcgacccatcagtgtactcttgaccaggtaccttcaaaacagtttcaaaggttgcatgttaaagttaaatccttaaatgtaagatcttgacttgaagttcagaagaaacttgaaatctaggctcttacataacctaaattatattcgacccatttggttcaaaacttgttgatacatgagtttgtttaggcttgataatgtagattaaattaaagtatagtttattataaaatctgaaaagccttaaggaaaccattgtatttgcagctcgggtacttcaggaggagttccaaagttgattcctttgacaacagaggatttggaacagaggatttcgttttcttctctctatgcacctctactctacaagtaaagagttaaaaactccgagttttgtctctttgttgataccataaacagtaagtagtaaaaccccgagtccgatgttgttactgtttgcaggcacatcgatgggcttagcgaaggaaaatctctcatattttattttgtgacccgagagagcaagactgccaatgggttgatggtcaggactatggttactagttttttgaaaagcattaaacagaccaactcatttctttggttagtcaataaaacccttacttgcacgttacattacataattcagtctttccacaagtgattaaccgaagtgcctaacaaacaagcctcttgatactactcgtgtttctttactgtgtttgttctattacttgcagggatagcttacaggtaagcccgcatgcgattactacttgtgcagacactactcagagcatgtactgccaattgctttgtgggcttcttgaaagagataatgttgctcgcctcggtgcaccctttgcttcatcattcctcaaagtaatcaagttcttggaagatcattggcctgagttatgctcaaacataaggactggccgtctcagcgactggatcacagacgcgacctgtacttcagggatcggtaagttcctcactgctccaaatccggaactagcaagcctgatcgagcaagaatgcagtaaaacatcatgggaggcaatattgaagagactttggccaaaagcaaaatgcatcgaatccatcattacaggcaccatggcacagtacattccattgctggaattctatagtggtggtcttcctttgacttcatcgttttacggcagctctgaatgtttcatgggtgtcaactttaatcctctgtgtaagcctagtgatgtgtcgtacaccatcattccatgtatggggtacttcgagttcttagaggtcgagaaagaccatcaagaagctggtcatgatcccacagagaaacctgtggttgtcgatcttgtcgatgttaaaatcggccatgattatgaacctgttgtcacaacgttttcaggtaactcttttctcttgttaaccataaccgtttcaaaataaatgtcgttttgaaattttattgcagtcttcggttttttaaatgtgtatcaaaattctatatgtttctgcctaccaaaaaaataaataaaaaatctatatgtttcttcaagatctatatatgattttacaggtctatataggtaccgtgtgggggacgttttaagagcgactggtttctacaacaatgcgccacatttttgtttcgtgggaagacagaaagttgttctgagcatcgacatggacaagacctacgaagacgacctcctcaaggcagtgacaaacgcaaagctcctgcttgagccacatgacctgatgctcatggatttcactagccgtgtagattcgtcctcgtttccaggacactatgtaatctattgggaactcgggagcaaagtcaaggacgccaagtttgaacctaaccgcgatgttatggaagaatgctgcttcactgttgaggagtctctcgatgctgtatacagaaaaggacgaaagaatgataagaacattggaccacttgagattaaggttgttaagcctggcgcttttgacgagctcatgaacttctttctgtctagaggctcttctgtgagtcagtacaagacaccgaggtcggtgacgaatgaagaagccttgaagatattggaggccaacgttatttccgagtttcttagccggaaaattccatcgtgggagttacatgagttacactccggcagataaacccgcagtcataatatctgtgagatttgagggcaggggaggagaacaatgtttacgacttttcttaatttaaacctctctgtttttttccagccaacaaatgctctgttcttcaagtttttatctttacaaatgcatcagagttaccaaatgcatgtttataagtcatttcccacattgtaaataactttaccaaatgcaccatagtcgagccattaattttaaatttcgaaaaaaaccgaaaccgtcaataatcatgttgctcacagttactacaactgggctaggtcaaattactgttttttttttaacttgaataattataaaatcacaataagacgggggtcaaaactcataattaaactgggatatctacaaattcgaaagaaactttgtttggtgtcaactgaatccgtaatgcttaacttgcttccgcggccctgtcggaaactcatcctcaatttccggctcacgaactttttgccacatgacaccttttatctgcacagagagagagagagatgggtcagatccaatccactgcagccagcgcaaaggtttcttctctcactcttttgtaagcaatttcgtgatccacaagtgactagacttgacctaaaccgtaagtgttttgctttttgtttttgttgttgcagacaatagaaaagcagcaatcatgttgccaaagttcgatccaacaaacccattagctaccatgtctgttcttgaggatgtgacgaccaacgtaaagaaaattcaagattccctcttggaagcaatactttcacgtaatagtcagaccgagtaccttagaggtttcctcaccggtcaactcgataagcagagcttcaagaagaacgtacccattgtgacctacgaagatattaagcctcatatcgatcgcatcgctaatggagagccgtctgatctcatttgtgatcgacccatcagtcttctcttggccacgtaacttcaaaaaaatactcttaattcctcttttttacaaaaggaagtttgtgaaattgaagtgtaaagaccttaggaagtgattgtttgtgcagcacgggaacttcaggaggtattccaaagttgattcctctgacagcagaggaattggaacagaggatattgtttgggtttctctatgtacctctagtcttcaagtaaagatttccaaactccaagttgtgtctcatttgttgataccatgaagagtaagtagtaaaacccaagtcactttgttattactgtttgcagacacatcgaagggctaacccaaggcaaatctctcatgttttattttgtgacccgagaaagcgagactgtctctggactgatggtcaggtttatgatcacttgtgttttgaaaagcgtgaacccaaccaactcatttctttggtacatcaataaaactgttgctttcacattacactacctagttccactgcaagtgtttcttcattgtgtttgtaatctgatttacagggatcgagtacaaataagcccgcatgcaattgcgatttgtgaagacactaatcagggcatgtactgccaattgctttgtggacttctccaacgagaacatgtagctcgcctaggtgcgccttatgcttcttccttcctcaaagtaataaagtttttggaagatcattggcctgagttatgctctaacataaggactggccgtctcagcgactggatcacagacgcccaatgtgtttcagggatcggtaacttcctcaccgctccagatccggacctagcaaacctgatcgaacaagaatgcagtaaaacctcatgggaggcaatattgagtagaatttggccaaaagcaaaatgtatagaagccgtcattaccggcaccatggcacagtacataccattgctggaattctatggcggtggtcttcctttggtttcatcatggtatggcagctccgaatgtttcatcggtatcaatctcaatcctctgtctaagcctagtgatgtgtcgtacaccatcattccaagtatggggtactttgagttcattgaggtcgtgaaagaccgtcaagaagctggccatgttcccgcagaccctgtggtggtcgacctcgtcgatgttaaaattggccatgattatgaacttcttgtcacaacgttttctggtaagtttcttgtactctacgtttcaaaataaatgtagttttagggttttgttttaaaaagtctttatattgcttgcttgagaaaactataaatgatagaattaaatattttcactcttttgttttcttaatgtatatgatatactaaaaatctatatgttggttttctcacaagatgcatgcgtgaattacaggtctgtataggtaccgtttaggggatgttttacgagtgactggtttccacaacaatgcgccacaattttacttcgtggggagacagaatgtagttctgagcatcgacttgagcaagacctacgaagaagaccttctcaaggcagtgaaaaacgcgagtctcctgcttgagccacatgacctgatgctcatggatttcactagccgtgtagatctatcctcgttgccaggacactacgtgctctattgggaacttggtaacaaattcaagaacgccaagctcgatcccaaatctaatgtcttggaggaatgttgcttaaccgttgaggagtctctcgactctatctacagagaaggacgaaaaaatgataagatcattggaccacttgagattaaggtagttaaacctggcgcttttgatgagctcatgaatttcttcttgtctcgaggctcttctgtgagtcagtacaagactccaaggtcagtgacgcatgaagaagccttgaatatattggagtcgaacgttgtttccgagtttcttagccggaaaactccgtcgtgggagctacatgagctacattccagccgttaaaaccaccgttacataagaataacaaagcccgtaacaaataaacacaaactaatgacactttaacatacacaatgtatttcctgatttatcatacaagttatcgaaatatcataagtgataagtccatggattatcgagtttttttgttggtccgacaatattctagctaggcacgaaaagtcgcgtttaaaatagtgacactcaaatgacgaaacgacagtaccactcgtcactccttccatacgacagcgtttggctagcttgagctactattcagtggacacagacctacgagagctaataagattagagggccccacaagaaagatccaagggctatcgctcatccggacacgtcactgtttccgcgaaatcaacacgcagatcctttcttcatcagtaaacggcgagattcgccatcaatctgaattccaaacaaaaattccggcgaccatgatgccaccggagctacagccgcggctgttccggccccatataaccgcctccaccagtgaacctactcaatcttcctcctcttactcacctcacatgagccctgcatcaaccagaaacttcatcgatcgagctactcctacttcgagatccaacaactctcgattctctccatcttccttcgcctacaatggacggatcgcaattgctcttgtcccttgcgccgccttcctcctcgacctcggcggcactccggttgtcgctacactcacaatcggcctcctcatatcttacatcgtcgattctctcaatgtcaaattcggaggcttcctcggtatatggatgtcactgctcgctgctcagatctctttcttcttctcatcttctctcttttcctccttcaattccgttcctctcggcttgctcgcggcttttctctgcgctcagactactttcctcatcggctgctggacttcgctccaattcaaatggcttcagctggagaatccttccattgttgtcgctttggagcgtctcttgttcgcatgtgtccctttcactgcctcttcttttttcgcatgggcaactatctctgccgttgggatgaacaactcttcttactatttcctcttgttcgcctgcgtcttctactggattttcgctattcctagagtttcttctttcaagaccaagcaggaagttaagtaccatggaggagagatccctgatgatagctttatccttggacagctggagagctgtttcctttcactgaatttgatgtttatgccgcttctctttcacgtggcgtcacattactctgtgatattctcatctgctgcttcagtttgtgatttgctgctcctgttctttatccctttcctgttccagctctatgcttcgacaagaggtggtctatggtgggttaccaaggattcacatcagctgcagagcattcggattgtgaatggggctattgccatggtcattattgtgatctgtttggagattagagttgttttccgctcttttggaaagtatattcaagtgccgcctccattgaactaccttctggtgactacaacattgcttggaggtgctgctggtgctggtgcttctgttcttggaatgatctcgagtgctctgagctcagcctttttcacagctttgtctgtgattgtgagttctgctggagctatcgttgtaggatttccagttctggtaagtatttttcttcccgttgcacagcttctattactattgtcattaataactagttacctgcgctttcctgtagtcaaattctgttgcaataagacgagtaggtatccctcaatagtaacaatggaattcatattctgtgtttgtgttgcagtttactccgcttcctgcagttgctgggctttattttgctcggttttttacaaagaaaagtgtgccctcttactttgcatttgtagctcttggaagcttaatggttatatggtttgtaatgcataattactgggatttaaacatatggttagccggcatgttcctcaaatcattctgtaagcttatagtggccaacattattatagccatggtgatcccgggtcttgttcttctcccttcaaaatttcacttcctgactgaagctggtatggtgacccacgcattattactgtgttacatcgaggaccgctttttcaattactcaagcatatactattatggaatggaagacgatgtgatgtaccctagctacatggttatcttgacgtcgctaataggattggctgtggtgagaagactgtttgctgaccaccgaattggacaaaaggcagtctggatcttgacctgtctgtattcagcaaagttggctatgctcttcctatcatcgaaatcaattgtatgggtgtctgcagctctattactggctgtttcccctcccttacttctatacaagtatgttctgggcattttaacttctacaagtattgtctcatcttgaatttgaaaattgattttaattaatttcagtggtagaatgtgcagggagaagtcgaaatctgcctctaaaatgaagccatggcaaggttatgctcatgccgtagtggttgctgtctctgtctggttttgccgggaaacaatatttgatgctctacagtggtggcatggaagacctccgtctgatggtttgcttcttggttcctgcatcgttttaattggtctggcctgtataccaattgttgccttccacttttcgcatgtcctggtatgtctgcttagctattttcttatgtctcgttcgatgtatttctgtctaattatctgtaaaaagaacccatcatccatttgtgcatcaagccagttatcattgctaaaaaatgctgctgaccaagataattttataattttttcagtcagctaagagaagcttggtattagtagtggcaactggatgcatgtttattctgatgcagccaccgatgcctatgacgtggagttaccattcagatatgatcaaggccgctcgccagtcagctgatgacatttccatctatggattcatggcatccaaaccgacttggccgtcttggttgcttattgtgtcactcctcttgattcttgctgctgccacatctcttatcccaatcaaatacgtagtagaactgagagcattttactccattgccatgggtttagctctcggtgtttatatatcagcagagttctttctacaagctgctgttctacatgccctgatcgttgtaacactggtgtgtgcctcagtttttgtcatcttcacccattttccatctgcctcaagcacaaagctgcttccctgggtgtttgctcttctcgtggctctatttcctgtgacatatttgttagaagggcaagtcagaattaaaaacgatctcaacgaaaatgttacctggggttgggacacaagggaggaggataagaaagtcacaaccatgttggccattgaaggtgcaagaacatctcttctaggtctctatgcagcgatatttatgcttatagctctcctgattaaatttgagctcacttcgcttttgcgtgagaaattctctgagaggagtggtcagtcaaaaacccaaggaggcgcaagagggattttcccgacacgaatgaggttgatgcagcaacgccgagccacctcgatccaaagctttgcagtagagaaaatgtcagaagagggagcagcatggatgccttctgttggtaatgtcgccaccatcatgtgctttgccatatgcttaatcctcaacatccacctctcaggcggctcaagccaagcgatattcttcctggctccaatcttacttctcctgaaccaagactctgatctcttatccgggtttggtgataaacagagatacttcccggttacagtagccatatcaacatatttggcattatcctcgctctacactgtatgggaagaagtttggtttggtggaaacacaggttggggagtcgaaattggaggccgtgaatggttttttgcggtgaagaacctggctctcctaatactcacagcaccaggtcacatcatattcaacaggtacgtttggagttacaccaccaaacacacagacgcgtcgccgatgctgaccgtgccacttagctttgcagccgtaataataacagacgtgtttcaagttagggttctgggagttttaggcattgtttactctgcggctcagtatgtgatatctaggcaacaatatatgaaagggctgaggtatatttagacagtcgtaggattgattagtaatgttttcgaccctttttgtaacagaatttgtgaaacagtgttttcatttcccagctttgtttctcagtggatgcattggaaattgccaatatacgacgtttgaacaacttaattttattggtcttcttacaaacgaacaatcacgtttagcggattttccacccttaaacattagctataggaaagcaaagtaggatgatacaattactgctgttttatcaaaaagaataacgagaagagaacacagaagtggtgtctttaaagaacagcactactcttgtcttcctcagactcgatagctcggtacttgtacctatgcgctgaccaaaggaacacacagaaattcaaaaagctcagaagtgtgagcaaccagtacaagcagtcgaatctccccgtgtttatgttctgcgataaccacgatttcccatctgagtcccgagtcgcagccttgacaatattgttcaaaatggtggcagcaaaacaccctaacccgccggctagagcagcgtaagccgaaccaatactcttcatagcatccggagcttcctcgtaaaggaactccaatagccctactatgcagaaaacctctgcgattccgatgagacagtactggattaacaaccagtacgcggttagatcaggcatttgggtcaagaagttgaactcaaaaccattttgtatcgcgtaatgtctcctgtagttctcgaatagcccagcccaagctactgatatgattgaaactgctagccctatgcccactctttgaagctgggaagcaccatgaggattgccagtgattcttctggtgatagggacgaagacagagtaataaagggagagaatgaggaaaatgcttaggcctgggaaaactggcatgcaggtcactggaagcttgaggtgttgaatgtgtgtgttgagtgtgtaagcttgttgcactgagagtgtaagatactcagtcaagaccagactcagcattatagtgcatgttgggattggaatcaatctgatcagaatcttcacttcctctacttgtgttactgtgcatagcttccatggagatggttccaatccatcttctttcaactcaagtgccgccttgtctagccatctgcatatgaattcattcgactgataaatactagtattaagttttattttccttataggaagatgtacacaaaagaagaagccttacatgaaatcattggaatgagggattttacgactgccattaatagcagatttcaagccaggaacttcgtaaagaccgatgaactcactgcttgtgaaagctgcatttcgtttgcggaaagcggcaactaagacctgagctaccctagtcaagggactaccaccaggcaacctatgccgataaagcggtgtaccagcaaagaacaaagcattagaaatccccatggctacggccaatgtgccaaaagccataccccaaccaagttccatttgaacatataccaccaaagtgaaggcaatgattgcgcctaaagtgaccgatagatagaagaagttgaagaaacggtctaaatgtgtcttgtagtctttgctcttctcatcaaactggtcagcaccaaatgaggaaacacatggccttataccagcagctccgaatccggttatgtagagaaccgtgtagagataaagcatttgccaagatttggcttcttcacaatttcctaagagcaatgataactggccacagttgctctggtctggtacgaacatcttcaaacttgcccccaatgttattcctatcaaacccttttcacatgcaaaacaaaagaaaagaaaagatttcaaagtatccatcacataacatatgttcggtcttgcgtattagacgatgttcttcaaattgcaccatttgcacaagaccttaaccataagtcataaataaataaataaacaaaatacagagaacaaaacagtactacttacgacaagatacatggtagtgaagatggcaatagtccagtatcgacccaagtaagcgtcggctaagaagcctccaagaacagaggaggcttgagagatgccaaggaagttgttgactgcgtttgatgaactttcaaaaggcctatgcattacgtagaacatgaacgccaccatgttcaccgagagtccgaaatacgccattctctctgccatttcatttcctaaaacattgcaaccattccaccaaaactaagctgcactgcacgtagaactactgataatctagatgtaagtgaaaagaaagttaccaaaaatgaagaaagctgcgatccaaccaccggttttggaaagattggcgatgggtttgccatggatgttaacgggagtggttcctccggtatagccacggccaagagcaagacgtctgttatctgattctatgaagaacacactcaactgcttcctatgatgcacagaggagcttcccggagtctcggggacactcaccggggatttaatctcagaagcaaccataatcaatgatattttctcataaaaccatggaaactgaaagcatcagagtgaccaaaaacagcaagagagcttaagttaataaatgaaataattaatccagccaaacaaaatctgtaagcagaaaaggatgtatgaggattggttagagaaatgtataaatgcagtagcttaaaatgggaagatggaattaaatagacggagcttagctggtaagtggtagatataggactggcatttattgcacgtggactcccatgatgtccacagtttcaacgttcaagaaaggacttatttagagaaatgtggattcatttgatatgttttgtccttgaaagacataaactcattgaaggacttctacaatgcgtcactgcaacttgttcttttatttttgcagtctccattaatgatgactctgacattgaaccaacattggctactcaataaagtcaaaacaacagaagctgcttacactggtttttgtgttcacatttcattttattctaaactttctatgaaatgttataataacttacctcactataagggataatataactaaaaagaggaagcagaattaacatgatgaacagttagttggtgatgcatggctatttttttttttaacactcctaaaaagagctaacattatatgatataaactgagctcaatttacacaaatgtgccaatgtagtatacacatcataaataaatatatatgtacgtgagttaagactgtcgatgttacatcaattgggtacaattttgaggagttcaacatcaaagagaagtgtcttgtctatgagcccttggttcctcagcacaaaatctaatgcacgttgtccctgcgcaaacataaagagacaacatttaaaacttatgtctttcttatacatgtttacataaaacaaacataaggctcacagagaaagtcatcggcctcggcccactcttgttgtagtcattatccgggtatcctagttctggcggtacaattatcctgcaataccaagctaattatttacactgattcattctaccgtctaccatttgtgtgaagagtgagttctatatgaaaaacatatggaggatgtgtagagttagaaatattagaaagatgttgaaccttctgataccaccgagagccatcccagagacagcctcctcaaaagcaggtatcacctggaacaccaaaatcatgcagcatccagaaagaaacaattcatacaatcagtaacaaaatccattctttaaaccggtaaaacccatatagcaactagaaggacttggaatttcgcccacctcattggatcctaaggtaaatttgaaaaattccttatcatcgccctacagattcacaaaaagaaaacaaagattaaggactgtatcattgtagctaatgaaacaaaaaaaaaaagagccaaaacgtgtttatacctcaaaagaacccccttttgttttattgcgagcttcaaatatgcgtccatagtaccctattgtgtaaccgtcccagtcaacctaacatacccagcttcaattatttataactactagcaaaacctatggtctttgaaacattaatttgctaacatagatacaagcaaagcaaactccaaactctctaaccagagcaaacttctagataaacttgagaccaaggatacaaaaccatagatatgcagaaatttccttaccacaactttgtctcccttttttgctataggcccagttcctactcgcaaatcctgcagcatctcaaatcttcaagttaatgatcaccgcatagtctaaactatattagatataagatatgggactaatgaggggtgaccttatactgaagaccagactgtgtttctgtataatctggatacttcatttttgttttgccataatccttccctttaagcgctggcactgtgaatgcaagtaatataccaagaaaagaatgtggctttagaaaaaaaagaggctatatcgatgatttcaacaatcacgcacggataaattaacttcacctaaagaacacatctttctctcacaaccaaactcttaacagtggacaatcaaacaatgttccaaattacaaatgccaataactttacttaataaggcacaaagcaacaacttaatcgaaatgtaaccctgagaaagattctctgccctccaaaaagaaattgaaaattcttactgtcagcaaattgagaagctgatgcaaagtctccatctttagaatcgtatgacaatgctccaatcaacaaaccaacagaagaaaccaacaactttctgcgatcaaactctccagaattattaacacatccacaattcccacctgttttcaaaactgaagttataattcaattcactgttgaggaggaaacagaaaagtaaaactgtagaagcaagccaaccagaagaacgaagaggagcgaagtcatctgattggtcagctaatcgagcagccacagtcgtccggcatctctgagaatcaaaatgagagattcagtgaataaaaaggaagaagaagaagaaacagagagatggtgcggcgtcgtacggtggtggaggaagttccggcgagcgctgtggattgagggaagcagccaaaggacgaaattgacgccattagagtgaaacttaaaaaactgatttttttgtacgtctaaagagagatgagagataaagtctcagctttttatgtagagaggcttctaggaacaattgttcatataatccgaacaaagaagaagacaaggacacttttttactcgccaattgttttcagtgaaaatgtaaattacaaatacggtaaaaagtaacaaactcttctgaagcatcatcttacaagaacaaagaaaatagaataacccataatgtggaacatcaagcaaaatccatcataaccactttagaaagcatgcataaggattgaagaacaaaagccaaaggttcttctttttattttagcgtaaccaaaaacataatgatgactcatttcctcaatggctggctagtttgagagtgttggccttgtcttgcagtgtaccgagcagactctcgaaactcttcttgaaggaatctactccttcgtcttccaactgttctcctactttgttccagtctattcccagcttctctagtgcactgtaaatcccttctgcttctgacacattcgcatctattgtcctcttcactattccatgatctgcgaatgcttccagggcttgatccggcatggttgatacctaaatcacacccacaaaaactatgaatatacttccaaagcgttaatacagcctattgacttcaacacaaacaaaaagatgacttacagtgtcaggtccgatgagaggagcgacatataaggtgtcagagtaagctgggttctttacacttgttgatgcccagagaagtctctgtttcttggcacctttctttaccagagcttcccatcttgggccagagaatttctgctggtatagcttgtatgctaatgcagcttgagccacagccgcctgcaagagtaaacatatcatgtgtcataagctaatactctactcacagtggctggtgtaagatctcagcgatgaatagagctttaccttcccacggagatctaaggcttcaggggtaccaatttgctcaagcatcttgtccatgagagtatccacccgactgacaaagaaggaagcaacactggtaactcttgagaggtcatcaagtccagacgcctcgaggccatccaaatatgcatcgatcactgcttcatatctggcgattgagaatataagctgaaacagaacagaacatatgagaaacgatttagaaaaggtaacatcagtgcatccttggaacacccttgaactaatctagtttcaggtttaaaacgcccaagaaatccagtgatctagcacatcatcacacaatacatgaatttgaagtattatgacttattttattttgaagttctttaaaacttgcaataagaaacttgaataatgaaacatactaggataacttaccgtgacattgacacttattccagctgcaatgacatccctgatggaaggaatgcatggagcagtagcaggaatcttaatgtagacattacgacggttgacaaccttgctaagatatttagcagcttcaacagttccttgggtatcatcagcaagcctaggtgaaacttcaacagagacatagccatccgcaccttctgtctggtcatagattggctcaaaaagtttgcaggcatcctgaatatccttcaccacaagttcccaatacgcactttcaatgtcctttcccgattccacaagtgtcctaatagtgcatgtcaggtataccattaacatatcagacaacttttcatataaagaagaactctaaagttttaatagcatgttgttaacaaccacaagtctaagacaatcacaaaaagatacctgaattgatcattataagcatttgaagtggaaatggctttttggaagatctgcaaatgtataaaaagtgaagaagtaaagacaaatgaacaaacacagagcaaaagcaaaaccaaacacacaaagagagatgataaaattaccgcagggttgctagtaacacctctaacaccacgagcaatcaacgggagaagatctgtgactggacggcaaagattatcataccaaggactctgaccttccttctcatatagatcatgaagagtcgttctctttccagcagttccatttccaccagacactgaacacctcacactgcaaattaaacaaaaaaatcagacttttaccaaccaaaaaggggaaatacagttgcttttcctaatccatcttataaaaaatgttactttgagattcgtggtacgtttccagctaaaaagattcaatttttggtgaaccccaagagcgagaaacagagacaaaagacatgcatcaaatggatataaagacttacgagagggaaggtattgatcgttggttataacgaagagaaagctgagaagaggaaagctttgcattcaaagcgcggaaattgacgaaggatctaggtaagacggaggaagaggaagaagatttggagtcgacgcaggtggcgcggggaagattagcgagattcgaaatggttgccatttttttcgtcgagggaaatacgaaagtgttttttcttggtttgatcgatcggaggataaaaacaaagaaaggggcttaaaaatggggttggtgaagttttgagttaggtcgggaacgcaaacgacgaaactatatcatgatggcgatagatgctcatagttgaccattttctgtcttattttacattctaatttcttacaatttatccaaatgttaaaacaataaatagttatatactagataacaaatttatttaatttagataaatgtgattttttacatcagatggttttaataaactttctctaatgtatgattaatcagtctgaaattagaaaacaatgaataaaataataagagatagagcggtgtcttatgataaacacgagaggttgcttagtgaggacctttggcttgtaattagtgtgtaatggccgttgttagtttgcaagggtcggagaagtcacttcccatatcccaaaaggaaaacaacttacaagagataagtcacttcccatatagttcatggccgttgttggtgaccaaaacaaacaagattttaacattttcatctcccacaatggtttttacccaaatcaaactttggcttttgtgtgtcaaacattttttcttaactaaaaaagattaaacagaataaaatattatgtttttgtgttcttagccaatctagaaaaaatctagctatgccacttttggatgattgaatattcattcacgggatgtcttacgaatacagtttgaacttattcggttatcttcctgtaaactatcaatcaaagctgatatattaccttttgttgtttgtttctacgttggtttttctcatacctttagtttttcttttatgaacgttgagatactatcgaaactcaaatgtaaatacaactttttaattggaatgacgatgtttagaattatgagatacgaaaggaatctcactcatacataggacaaataggcatgttaaataataaacacagactatgaacatagtcgtcttttactagcgatggataaacgaagattgagtatacttcaaacaaaaatcacaagtttgtattattcagcaaaaacaagtcaatcttgctctaacatgccggaaaatattaattaaaagaaaaaaagaacaagtgaagatcatcattcagatccagactcttgactgttgtgcttttattaatcaaccgatgagtaacttattctcttccaggaagctgtaggttggtacttccaggttgtatggtgcaggacctttcctaattcttccagatatatcgtaatgtgatccgtgacacggacaaaaccaaccaccataatcaccagcattaggcaaggggatgcaccccaaatgagtgcacactccaacaaccactaaccattctggattcttgaccctaaccgagtcttcttgtgggtccctcagggatccaacatccacactattggccagcttgatgtcatcttctgttcttcgcctgatgaagacgggctttccacgccacttgactgtcacggtagttcctggttctatgctccctaggtcaacctcaagggatgcaagggcaaggacatctttacttgcagacatgctcacaataagcttcaaaacaagcaggcggaggacagaggcataaacaaacctcccacccgacaagacaaaataggcgaatgcacgcttgctagggtcaccaggtgggtaacgctcatggttatggtcatcatagacaatctttgagttaggcgttttgacagcttcgactgtggctgggacttctgaaccaaaacctatctcatttccttgagcaaggacttgagaagagaagcctgaaaatagcatgaaacattaatatttcacatcaaaggcaaactttatacttggtcaagtgttctacaagaataagaataagccacaggactaccacaatcaagatgtgaccattgatgtataatcttctaaggaaaaacaaaagtacataaaacggattccatgaagtatgagatccatccaaacaattcaaaccatcgtatcaaactcggggagtggaaacttaaatacgataatctccataaaaaaaacaagagaacaaattcaatgatcaacatggaaacagaagaacaaaaaattggaatctagaagccaatgtgaatcacactatggataacgcattccaatgatttacaagcaaggagctttagtcatcaaccaaagaattacatctaaacaggtcaatccataatccatcaataaactcaaatgttcatttccttctggacgaaagaatgaatcagagaagccaagtataccaaattcatccaaacaaatcaataataacaaattcagtgaaaccttaaatactaaaaccaacgtaataaaccaagagaaaaaaatatattgatcagatgctgtatattacagaaacgcttaaaacacaacaaaatttccaatgctaagaacaaacaaagctctttggttaagaaaacataaatttcagaatgcaagttcctcagcatgcctttaaacagctataaatcctacaaacatagtatacagttaaaacatccatgtccctaacaatgaagaactcaaaaggattgatacacaagatcaaatttcaaaaaccaagaagccagtggtgaatcatactatgattaacgcaccgaaaagaggaaactttcctagtaaaacaaaggattatctcagaactgaacaatccacacgaaagaagtaatcatcaaatgcaatacaaatccagcaaggagaagaatgtagccaaatggtacatcaagctcatggaattcaaatcagatgacacgtttgttcccacggatcattgcagatacaatactagaaatctcaatcattcccgtgaatcatacaaccaaaaaaagaagaccttttcaaaaatcaatcaatcaaataaaactgcaaagaaccaccgaaaatgaaaaatcaatgtagagagagagggaaagggttataaatcggcaaacctctgataaggctacggtggtaagatgagagatctgcagaggggagggatctgggagctgaagaggagtcgccgccaccatcggaaagggtatggtcacgggagacgacgaaggaggtcgcagtcgaagatctctgcgagacagagaaaagcctcctccctgctacacgcagcatctctcagctcaaatgtgaatctagggtttcgctctagctgaacagagaaatcctcaggtttgggacggccgatgcaaaacaaaacataagagactacttactagtaagtcccttaaaaattgtctttgagaaaaggtcaatttgttttgttttttttggtttttgcgtattacttgatatttttttacttcaggattttgatggcatggttttttttctaattttaattaataaaatcttttggttttacgatataatttttttgtgtgtgtgtatttgtaagataaattattttatttgtataaaaatcgtaatttttaataataataatagggggtctatacttggtaaaggatatattttgttgttgtaatgtttaaacaagatttccaacaaaaagactgttttacatctgtgtgaacttttcaatactagaagaaagagctagaaggacatcatcaaagaagtagtcatcgatgaaaacaatctgaacaagaaaattaggctaagatccacaaccagaatatgacatctttcatcaaagtagtagtctcgaggttcacaattggatttctcactatggaagagaaggtttatggcttagttgagaattgaaggtcttcgaaatgtcgtctccagtaagaacacgaaagttttataacacaccttgaaccttaccaagtttttgtctcaattgtgataatggctacagactttaaggaaaggaaactctcttacaaacgatatgttacaaaattacaaacataagaaaaatagggatgatactattcaaaactcttttcaaataataaacagagactatgaagtatgaacaatgtattttcaccagatgagacagatactaagtcatacaatgacaagtttgtattattcagcaaaacaagccaatttttgctgagcccaaagtgtgaggaaagcgaacttgcacgctaaaatgccggaaaatataaaaacaaaaacagatttaagatcatccagaccatgacactcggactgttgtgctttattcattaaccaatgagtaatttattctcttccaagaagctgtaggtcggtacttccaggttgtatggtgcaggacctttcctaattcttccagatatatcgtaatgtgatccgtgacacggacaaaaccaaccaccataatcaccagcattaggcaaggggatgcaccccaaatgagtgcatactccaaccacgatcaaccattctggattcttgactctaaccgagtcttcttgtgggtccctcagggatccaacatccacactattggccagcttgatgtcatcttctgttcttcgcctgatgaagacgggctttccacgccacttgactgtcacggtagttcctggttctatgctccctaggtcaacctcgagggatgcaagggcaaggacatctttacttgcagacatgctcacaataagcttcagaacaagcaggcggagaacagaggcataaacaaaccttccacccgacaagacaaaataggcgaatgcccgcttgctagggtcaccaggtgggtaacgctcatggttatggtcgtcatagacaatctttgagttaggtgttttgacagcttcgactgtggctgggacttccgaaccaaaacctatctcatttccctgagtaatgacttgagaagcaaaacctgaaaatagcatgaaacattaatatttcacatcaagggcaaactttatacttggtcaagtgttcaacaacaccaagtattaagcaaaaatattttcaagagataacacagaagaaaggaataacactagcaaacatttaacattaatgcatagaataacataagattataaaaacggattccaagagataacagaaggtgtcatccaaacaattttctaccatgatatcaaattcagtgaaaactaaactaatctatctaacgcaagatccaaggaaggaacttcaatgatcataaatgcttaaaacataagaaaactcctaagataagattgcaaacatagcccttttggttaaagatatggaattccagattcgtttactgatgcaagtatcttatatgatgtgcccaaagacgataaaacatccatttccataataatgaataaactacatgtcaaaatcgattatctcatcaaaaaaggattatctcaaagctggtcaattcatatccgatcaatcactattccagcaaggagaagaatgagacgaaatggtacatcaagctctaatacacatcataagaattcaaaacagatgacttaattcccatagatcatctcgcagatacgaaactaggaatctcaatcatttccggacttatacaagcccaaaagaggtgacttttaaaaatttatgaatcattcaatggataacaccagaaatgaaaatcaatcgagagacagaaagagttgtagatcggcagacctcttataacgctccggtggtaagaattgaaagatgagagatctgcagaggggacagatctagaagcggaagaggagttgcctccatcggaaagggtatggtcacgggaaaggacgaaggaggtcgccgtcgatgatctctgcgaaacagaaaaaagcctccttcctgctactcgcagcatctctgctcaaatgggttaagaccgattctagggtttcgctcaaagcaagaacacacaatcgtaaggttagagatggccgatgcaaacaaaaagattagtcctttaccaaaaaaatgtttttttttcttctttgcggatattcctttaatagtcttcgagaaatcgtcaatttggtttttttactattaatactgaagagaacaatgacggtgttctaacatgataattatgtagcttcgtggcatcttaatgttcattcgtgagtatgaataagctacttgggcatagtttgtagatttatttaccaaattagcccaacgattcaaatctaaacaaaaacaatctcattgaaatttgatgtctcgaaaagctttatttcgaagcaaacaacaatatgtaaaaagcaaatgacaaaattcaaagggagagaagtggccagctattatattgtttcccaggagggtccatatttatttgtcaattggtggcattcatcacaagcatgttttcttgggggaaatttctctcaagattttcagaggttgttgaagtcaacaggttcacggaggagcctctccatctgttgtgcccttgtcctgattgacatgtccaacaccttttgttggaactctacgattagtccaccgtagatacttggatcaatctacaaacacacattaccaccattgacatagatgcttatatccattttatgggttactagaaaatcacaagcctttgatgcatatctgattacataccttttgttccacagtgattttcttccctgctccaatgatctcctgaagcgtctcagtcagttctttctcctcagcagggggaagcggctgtccaaaccatatgattaaatccacaatactgagtttatggttatttaagagataacaagtattgagactaaagcttacaatgactgtggtaaccaaaactttgacatctcccctatgtgcgtttgtcagctgcataaatttcttcacaatggcatctaggttcttcagctttccattctcagctaacaaagctgttacagaaagcaaacaacttttaatatcagcacaacaaggtcaatcaaaatcataaaaacaagacagtttcaaacttgaattacatacagaggaagttcttagtgggttcggcaaactttgcttgatcacaagcatccctaatagcagccaatcttgtccctctaggaacagagggatcctttgtaaactgagcaaaaataggagctgtcttcattgcctcaatcatctcagaaagatccgtctcaatcttttccaaggaattcattttcacagctgcaatgtatagccatgaagcaaagttcccattttcaccaactaaagcaataggcacctgaaacaacaacaagtataaatctagatacacttccattacatattatacaaaatccagctatccgcggttcatcatttatgccaatcaaacaattcaagccattgtcgcgattctcgcatctacaaaataatacgatggtgataaaagggtgtaccttaacattagcggttgtttgagcagaagcagttgcataagttctcaactgcgatagaaatatacaaactttaaagattgattgatagcattctcaggaaaataacagagatagagttaaaagacttccaaaacatctaaagccgagcaatgtaagcgagaaaacacgataatccccattctatactgttatcaatccaattaggcgattggatcgactgatctcgtaagaatcgactccgaacaaaaaattggactgaaaagattcgatttttaagaatgcgaattaccgctgggaaaagcgacttggatctaacggaggagacagaatctgttacggcgatggtcttgaagaaggagatccctgatctgaaacgattagccatttttgttgcagatagattttgattggaaccctagaaatgtgcaaaagtcgctcagctgctttgtcgagagcaaagagatgaaactggtcagaggaagaaaataacttagtgcattgggcttcactgggctcatacttattttattgggcttattactacctgtagatagtggcaaatttatgatagttaatttgttttgctcaggtttttagtgttttaccaagtttcaaatgttatagtgaggttatgtaatacacaacttaactcgtttttttgttgtaaacaagatcttgtagattattattttgtattattgttgatatatatatatatatatatattcaaatttaactgtatatatgtgtatatgaaaaatatcatttttaatgtgtatttgaactctacaataatgtatttttctctatttcaaaataattgatgttctaaaaaaatactatttttcttacgaattaagatgttgttctcaattttctatcctactatattatttgggaagtactttttaaatgtaaccttaatttttgtaagtaattacataggtatgccattaaaaataaaattttaaagaataaattaatttatctctttaaggattaaaaagttaaatactaatttaattaattaaatttaatttaaaaacggaatatattattaatttccaaaaataataaccaatcaaaatcaacatataagatttgatatctaaattttaattaatttaatttaattagaaaaataaaatgcattattaatttccaaaaataataaccaatcaaaatcaacatataagatttgatatctaaattttaattaatttaatttaattagaaaaataaaatgcattattaatttccaaaaaaataaccaattaaaatcaacaaattagatttgatatctaaattatcatattaattttttattaattattatagttcacttctcatctttatatgattctatttttgccgaaaaataatatcatcattataaaaaaaataattagagttttttcgcatatgtcataatttgaatttttaaaaacgaatataaactgttcaatacatgaaaaatattataacggatgaaaaatagatttaagaaaactttctactgagtaacgggtcataatttgaaatatttatattcaatttcatacatattatattgaaaatttataatcttatatactacaataattaataacatattagatgtgattcaatttttaatacaagctggaaaatcctagaattaacgggtttagatcgatattaatacaagatggtatactacatgtcaaactcttaaattaacaatcaaactacaagtgtataatcttaaacactaaacaatatagataatatcaacaaaacatatacaactcacagtttactatacatttaaaatcaaataaaataatatcatatatttttaaatcatctttacaataaaagtttttagtttaactaaaatataagcctacttgcggtatactgcaggttaaaatctagattatagggcttattggatctaaagacgggtcatcaaagatttcctaaactgaagcaaaatatactgaatattcaaatatctatctattatcaaattataaacaaataagttcgtaaacaatttaatattttatttatgaaatcaattaaatcttaatcacataaaaattagcacaaaaaaaaatattcaataattaaaaaaaacaaatctctgtgttatataagttttgatactatattcgaataaagtgtaatatacattttcaatttgtattctttaactaatttaaactaacaaatatatttgttaatcttatacctatcaaaactgacaatcgtttcttatctttatagtatttttgcaaaacttttttggtaaatgtatttttgcaagactttttcaattaaatcttaatcacataaaaattagcacaaaaaaaaatattcaacaattaaaaaaaacaaatctctgtgttatataagttttgatactatattcgaataaagtgtaatatacattttcaatttgtattctttaactaatttaaactaacaaatatatttgttaatcttatacctatcaaaactcacaatcgtttcttatctctatagtatttttgcaagacttttttggtagatttggataaaagtgcgttcggctcatatggtacattcccctattaaataaatatggtgcactcctatgttattaactaaaatgtttagattataattcagagtcacatcattaataaaaataatattaacaaataaatggctttttggcaagacggatttagagggacgggtttttgaatcaacattaataaaaaaataaaatataattaatccaccgtttcaatacggattaaatttttaatttattattttctaagaccactaatattaaatatatcaaatcatcctaatttagaaaagattatataaaacaaaaaatgttatgtggtatgtataatgttactatatataaaattaaactataaaatataaatgtattagaaaatgatacaatttgcaaaacttttatatataaaaaataattcttaaattttaaaaattactacttcaaaaaaaaatcacaggacgggtaaagaaattacagaacgagttttattttagaattgagttatatggcggatgtatttgaattaatatttataaaattttaaaatattattaatatgctgttttaataggggttaaaacttcagttttttaacaattgtctcatgaattcgtggtatagcgttagttaataacaattataaattataaaatataaatattttataaaataaaatttgcaagttttaatatatattacttttaaaaaataaatcgtcccgcggtataccgcgggttaaaatctagtgcaacaatttaaaaaaacaaaactgatttgtaacatttcttcataatgtcattcgatgaataaataattttttagaattttttttatgttttaatataaaagatttttttaaaaacacaatttgtgtagtttattaatctatgtgtcaaaaacttaaacatcaattaaagagaaacatatggaacacttgttttttttttggaacttcgaagtgaaacatatggaacacttgttttatttcggatcgtctatatatttttttatttctttgattttgtcagtacactttgaataatttatttttggatttacatgaatattattttttttttaaagaagaagaataatatagaaggatgcaattggatttgtactgaagaggtcttgagagcgatacaacttagagaatatgtttttttccatctgaacaatatgcaatgcgttgtcattgtcgtttgaccaatttttaaaaatagtttcattatcatatatagtacctaaattatcatctcttgaaaacaagtcttcaaatgtgaaatatgacttttatagcagcgtcgaaagatacaaaattagttgttaattacggaaacatgttggtcttgattttgttaatacgttattcacttcttgcaaaaaaaaagcaagttatttttgattttgtactatgttaaagtgcttaacactgatcactgatgtagctatttttggacggtcactatttcaacttaacattgtgtaatgcatttatgagtttgggatctgtctgaggatatttatgaagaacttccacatggagaaacatttgtttactaaatgttgatatgactattcttgaaacttaacttttacacaaaagttaaaaactaaacaaaattcaacaaacaatttgtggttagctgcaagatctaccagaagttaggggattaaggaggatgagaggggtaaaaatataatttcgagtgggcaatgaagtggcacgttcacctgtcggcacagtggagaagagaacaacaaaccttacttctctcttgttcacattcataatttgatgaacagtcttcttctctgatgcagaaaccctctccctgaatcttgattctctcacaatcaagatttgaagcaaacgttttgagaaaaatcttttgacaccatcaagtaagtttttatctttcttatgttttttgtggtgtacctgcattgtgcctagttttggtacttgaatcatctattttggaatctagagtattgatctggagtatgattagtcaaatctaggatttttaaggaaaatggtactgagagattgtattatttgcacatatcaggtgttcagtggtagtgatttgatatgatttggtcattgtttgaatgaaagttggattattgttcagatttggttggcggattgtgggaggaattccagagcaatatagcaggtgatggttgtacaacaatggctaagaagaagggcttgttcactgtattgaaaaggatttttatttcagaagttaattcagaaaaggtgaagacaaagatgttaatctcattctaatgctgattgttgtttctgcatcttgtttgattcttcttgtgtacttctgcagaaagagaagagaagaaaatggacattttggaagcttaggattaagaaaagattaccttccattacagcacctccagagcacaggacaagtcatgaatcgcatgaggaacagaaggaggaaattgtgtcagatgtgggtgagatcagccaagtgtcttgtagtcgacagttagattccatagaagagtcaaaaggttcaacatcaccagaaactgctgatctggtagtccagtatcaaatgtttcttaatagacaggaagaagttcttgctgctactcgcattcagaccgcctttcggggtcatcttgtaagcttgtcttacccttttcttatgaagctactgaaagaatcgactcattttcatactggagttatgtagttaccttgtagctgtgttgactatagttgagtaggttaggtagagagctaagacgttgaaagtaagtttaggcagaaggatttggggattctgaattagtttaggatcttggtttgggcagtaatatatacattttgtctcctgtgtcagtcacctattaagtcttttgagaaccagatgtgaatcttttaaagcgatttctcttcttcttttattgctggattttgggttgatttttcaggtgacatgctgacaatgtttttgaacttcattgcaggcaaggaaagctctacgtgccttgaagggaatagtgaagctccaagcatatatcagaggtcgtgctgtgagacgccaagcaatgactacactaaaatgcctgcaatctgttgtgaacattcagtcacaagtctgtggtaagagaacacagattcccggaggtgttcacagagattatgaagagagcaatatattcaatgataacattctcaaggtatgtcttctgatctaaaaatgtaaactcgttgccaacagtgcagcagtttattagtatgtattgttttcaggtggacacaaacggtcaaaagagatgggacgatagtcttttaacaaaggaagaaaaggaagcagtggtaatgagcaagaaagaagcttcactaagaagagaaaggataaaggaatatgcagtcacccaccgggtacttcctatgcacttgtttcatttggctttttattgctttacaagtttcctagtattgacttgaaactgatactttgtcaacatcagaaatctgcggagtcataccagaaacgaagtaacactaaatggaagtactggttagacgaatgggtagatacacaactaaccaagagcaaggagctcgaagatctcgacttctcttcgaaaacaaaaccgaaagacgaaactttgaacgagaagcagcttaaaactccaaggaactcatcaccaagaagattagtgaataatcatagaagacaagtttcaataggtgaagatgaacaaagccctgccgcggtcactatcactacaccaacttatatggttgcaacagagtcagcaaaggcaaagtcaagatcattaagctccccaaggataagaccgagaagttttgacacacagtcagagagttactcgccatataagaacaagctatgcctgacgacatcaatgatgagtgaagcaccaagcaaagtaaggattgccaacaatggcagtaacactagaccaagtgcataccagcaacggtctccagggttaaggggatttaacataggccctttgaaatcatgcaataataataatactctattgaacgatctcagcattaattcagaaagatctctacctagctggaacaagcagagcagcttgagatgagtggatattgaaccctgtatatatacatactacatacgttccaatgtttcttttgacttttgagggtcacactcacatatgtgtatcatcaaatattgtttcgtttttttgtttacacttgtttgtttatctcaacttcaaaattggctaatcataagatattgtcattttggttgagtaatattacaagacaaaacataggttattgtaaccaaaatttggtaatctattggtttcttctattaaggaccagcgtggctcaagcgacaccgttttggtaaggaagaaagagcaaaaggttggagaaggaagatatgtcactggtcgactacgacgattcttcatccgacgacgatgttttagccgccgaggagaaacctctcccacagacgcaaaagcgtctggtttctccagctcaatcttttcctccaaagaggcagtgagtgattttagggtttaccaatcttggattcgtgttctttttttctttttggggtttgcaattagagctttcaatatgaagagttgtttctggaaccaatcttaaacagctatgactaactttgattcatgtagcttagtttctcattgttcagtctttgtttgtgtgctgatgaagcagggcttttcgattcatatgtagctataaatctagcttcaggcttcaagttctgttctttaccttagtatagatgtctgtgtacagagttttgtttcttaggtagccaaagtgagttccttttgttgattccgatctcgatcagttctgatattgaatgtgtcagaggttactttttaaagcaagtgttgtgttaagtttgggtattgaatacagtttcctttgtggggtttgtaggagatttgagcaggacgagagtgttgagaagctaccagatgctctgcttcttctggagtcaccgacactcgctcaggtgactggcggagaccatgcttccgttgttgcagctgcaatggctgagagtgcattaaggaagagagacttgagtgggaatgcttcttctcttcctcgtcgtcccaagctaccaagaggaaatttgcctcattcaaagaattatcctgaaactttgggtaatgtgcttgtgcctcctcagctcaagggaaggttagtcaatgatatgtcatatttgcttgtttcatctcttttttcactatatttctcaaatctagaaaactatggagaaaggctatgagtgttgttaacaatcattcaaagagttatttagggtattttgtgcttgaaatgtggtttaggaagttatcaattgttgacattatgagcatcttcatgagaactagctcctgaattaggtgcaatatcttgtttagaacaattataatcgaataacttgagattatatctgcaggagcaatgttgctacagaggatatgagcaggctttttgtgaaaaaacggcaagactccaccaaggcaaaatctccagatcaggaatagtttggtcaaatttgaatggttttatttctctgactaattacgtaacattttgtgcaacataatagtggtatcttagcagaaataacagagtatgcaactttttttgttttttcatttatttggtactatttatacaaaagaaacaaaaaaagttctgatatttccattattctaattgcttagtagtgtgagtagatgttaaaatcttggaagtgcgatttggttgatcatttagggtgacattcagtaatttattcatttaatatttaaagagttatttggcttgatcacttataatccttaattttaacttttaacatgtgtaaatttcaaacaaaaaaaatttgcagaaaattagataataatctttggtttatttaaaaaataaaaattctccaaaacgaaagtactgtaatattgttcttagaagtttgtcgggtttctgaaacaaaggtttttctctctcctaaaaagtgcgactttccaagcaattagggttggctccctcttccagtcgtcgtctggccctccgccgccggtgggcgagtctcctgtgatggtcacaaagaagaaacgccctcctccgccggtcccctttagttcaaagtttgccagggttttggcttcagcctctgctcctcctgttcctccttctgctcctttggttcgttcagatctggttgatagggatttgattcctcctgggtcctttacgattattcctgattcactggtcgagatgcagggaacgcttcccatatctcctgtgattggctctgctacaacctctgctcttgtggcttgttctggatctgtctcacacagtactggttcgattggtcagtcctcagtggtcgttgccgctgaagatgctatctctgccctaatcatttctgctcctgttggtccttcggatgcttctattggctctgcttcagctgctctggtcgatcttgctgttgtcgatggttcttatactccgtcgccggttggtttaaccctctcggtggctctcggctcagatgggtctagcgctgcacatggtcttgggcttagtactacaatctctactggtattattggtggtgctccagctgctaaggttttctctgttgcggattctcctggtcttactgctcctgttgttggcacactatctggttcaagcacattgttagagagctcctccaatgttgctgctgctgctccctcttccatctcgttgctgtcaggagataacccttcggtcaaacctccgagcaatccctctgctaacgttacagagccttctcctacttctgatctcccttgggctaccaaattcaaggcttctctccgaaacctgaagaagatgagttctccaaccttcatggaggacggaactccggttgtgattgctcctccttccgtgttgctgaagacggctgagttgtggaaaggccatgtggtcgcccagtttcacgggctatgcccctctgctaatcgaattttctctgacttgaatcctatatggggtaatttcggcgacattacgattagaatagtctcagacactgttgctctcatctttattcctgcggttaacactcggctctgggtcacggatattggcttctggcaggctggtaactgctcatgcactgtttatccttggtctccagaaggactccgtgatattaaggagctcaaatcagctcctacttgggcagttctgaagaatgttcctcctcagttatactctcttgaaggaatcagtgtgattgctagtggtattggtgagcctctgcatactgaaaagtcgaggttagatcccataagcatcggctctactaaggttaaggtgattatcaacttggatacacctcttccatcagctattgttatccgcgacatccaaggcaattcttcccgggtcgctgtggaatatccgagacctccccccaaatgcttgaactgtgggaagtatggtcacttgttgagtagatgccctctccctctgtcacaaaagctgcccttcaagaaggatcttccttcgggatcaaaggaagttttacattcctcaactttcctggctggtgctcctgcaaccctcagcttttctgctccagtgatgacaggtgatggtgttgatgccaagataaaaccaaaaaaaaggagatcaaggtctaggtctctgaaacgatctaagagtactcctcctaggatcgctgggtctcttgataccttgcagctggttcaaacctccattagaaagaaggaaaacagtcggaagtgggttcctaagtctattgttgatttatccgcctctttgcctattaactctcccatcactattgattcagagatacctagtcttaaggcgtcaaaacctgaacggtctatgagagattctattaaggatcctgatcctgagttccctcttccaactggctgactgttatgtctaccaagtcaaagaagaaggaactcaagaagtggcacaatcgaatccgttctgcgggtctgggagctcaaggtactgatcgaggtgagtcctcgtgcggttccttacctcactgaaagcttgctttcaccttcaccttttgttgtgtatatgaaggttttttgttggaatattcggggtctaaataatcgcatccgtcagagagtggttcggaggtggattgcttctaataaccttcttgttgggtgtcttttggaaacgcatgtggcagaggcaaatgccagtgcggttttggcctccaccctaccgggttggaggttcgatagcaactattgttgctctgatcttggaaggatctggattgtttgggatccttcaatttcagttttggtctttaagcgcacagagcagctaattctgtgtagtatcaagttacctgacctgcctcaatcttttgtggtagcttttgtctacgggagaaacaccgatttggaaaggagatctttgtgggatgacatttctaccttggcctcttcttctcccctttctcgcaccccgtggcttattttgggggattttaatcaaatagctgcgacaaatgaacacttctccattatccagtctactttttccttaagaggtatgaaagatcttcagatatgcatgagagacaatcttcttgctgatatccctagtaggggtgggttttttacgtggtcaaatcatcaacaggacaatcctatcttgaggaagttggacagggctttggcttctggcacttggttctctcagtttccttcggccttggcagtgtttgatcctcccactgcttctgatcatgctccctgcattgtgttaattgaaaatcagcctgctgtctctaagaaaagctttaagtacttcttctttctatcttctcatcccacctttttggcagccttgattttggcttggagagataacagcattgtgggttcgaagatgttctccttgggcaggcatatgagggctgctaaaagatgttgccggaacttgaataggctccggtttagtaatatccagcagaggacagaccaggctttggccaatctggaagacattcaagctgaccttctctctgccccttctgatgttttattcaggcgtgagcatgtagcacgtaaacagtgggatttttttgctgctgccttggaatcattctataggcaaaaatccaggattagatggctccatgaaggagatgctaacactcgtttttttcacaaagctgtgatagcccatcaagccataaatcttatcagattacttagagggcctgatggctccagaattgataatgttgatcagattaagggtatgcttatctcctattatactcatctgttaggcacccctaatgatgatgtgacccccttttccgttgaacgaattcagtctcttcatccttttaggtgtgattcctccttggctactcagttaacagctattcctagtgatgaagagatcactatggccttattctctatgcctaggaacaaggcgcctggtccagacgggtttccagtggaattcttcgtggaagcttggcctattgtaaaggaaagtgttattgcagctattaaggaatttttcctgacaggtcatttgttgaaagggtttaatgccactgccattactcttattcctaaggttcccggggctgatcagctcaatctctttcgtccggtggcttgttgtaccacaatctacaaggtgattactcgccttatctctaagagactcaagctgttcattgatcaagcggttcaatccaaccaggttggatttattaaggggcggcttctatgtgaaaatgttctcttggcgtctgagctagtggacaacttccaagctgaaggtgatacttctagaggctgtcttcaggttgatctaaccaaggcttatgataacgtcaattgggagtttctcatcaatatcctcaaagccttgaatcttcctcccatttttataaattggatatgggtttgcatttctactccctcttatagcatcgcttataatggtgaattgattggcttcttcgcaggaaagaaaggcatccgccaaggagatcctatgtcctcccatctgtttgtgttagtaatggatattctggccagatctttggatttgggagcagtggagggccggtttgttctgcatcccaagtgtttggctcctatgatcactcatttgagttttgcagatgatattttggttttctgtgatgggtctctgtcttctcttgctgccatcctggatattctagatgtgtttaagaaaggttcgggccttggaattaatctgcagaagacggccttacttttagatggtggtaactttgaaaggaatcggattaaggcagctagtcttggtgtttcacaaggttctctgcctgtccgttatttaggcttgcctcttatgtcccaaaaaatgaaaaagcacgattaccagcctcttgtggataggataaattcaaggttctcgtcttggactgcaaggcacctctcctttgcgggtagattgcagctcttgaaatctgttatttactccacaatcaacttctgggcttcgatatttatcctccccaaccaatgccttcataagttagagcagttgtgcaacgcgttcttatggtccggagctccaaactcagctcgtggtgcaaaaatctcttgggatatagtgtgttcttctaaggaaagtggtggattgggtttaaaaagattatcttcttggaataaggtcctggctctcaagctgatttggctgttgtttactgcttcgggttccttatgggtctcttgggttcggttgcatctaatcggccgtaggaacttttggaatcttaatccctatctctcgggcagctgggtttggaggaagctctgtaaacttagagaagttgctcgtccttttgttatttgcgaagttggttcaggaatcactgctagcttttggcaggataactggacaggtcatggaccgcttatacacttaacggggttgaccggtcctcagctggttgggctttccattacctctgttgtcagggacgccattaggaacgatgactggtggattgcctctagtagaagcaggaatccggttattcttcttctgaaatctcttcttcctcctgttgggaatttggttgattgtgagcatgatgactcttatctttggaaagtaggtgatcgggtgccttcttcaaagttttctacagcggatacttggagagctctccaaccgttctctgtctcagtctcttggcacaaggcagtttggtttacaaatcaggttcctaagcatgctttcatctcatgggtaactgcttggaataggctacacactcgggacaggttaagaagttgggggctccttgttcatgctgagtgtgttctgtgtaacttggtcgatgaaactcgggaccatctcttctttgcttgtaggttcagctcaagaatttggaccttctttatgagggcggttggattttcgccgcctcctcagttcatgaattgcttgctgtggcttaattcggctacaagggacaagaatctaatgctcattatcaagctt

SEQ ID NO: 1429 - DNA, 90472 bp, Arabidopsis thaliana
cacccaccgggtacttcctatgcacttgtttcatttggctttttattgctttacaagtttcctagtattgacttgaaactgatactttgtcaacatcagaaatctgcggagtcataccagaaacgaagtaacactaaatggaagtactggttagacgaatgggtagatacacaactaaccaagagcaaggagctcgaagatctcgacttctcttcgaaaacaaaaccgaaagacgaaactttgaacgagaagcagcttaaaactccaaggaactcatcaccaagaagattagtgaataatcatagaagacaagtttcaataggtgaagatgaacaaagccctgccgcggtcactatcactacaccaacttatatggttgcaacagagtcagcaaaggcaaagtcaagatcattaagctccccaaggataagaccgagaagttttgacacacagtcagagagttactcgccatataagaacaagctatgcctgacgacatcaatgatgagtgaagcaccaagcaaagtaaggattgccaacaatggcagtaacactagaccaagtgcataccagcaacggtctccagggttaaggggatttaacataggccctttgaaatcatgcaataataataatactctattgaacgatctcagcattaattcagaaagatctctacctagctggaacaagcagagcagcttgagatgagtggatattgaaccctgtatatatacatactacatacgttccaatgtttcttttgacttttgagggtcacactcacatatgtgtatcatcaaatattgtttcgtttttttgtttacacttgtttgtttatctcaacttcaaaattggctaatcataagatattgtcattttggttgagtaatattacaagacaaaacataggttattgtaaccaaaatttggtaatctattggtttcttctattaaggaccagcgtggctcaagcgacaccgttttggtaaggaagaaagagcaaaaggttggagaaggaagatatgtcactggtcgactacgacgattcttcatccgacgacgatgttttagccgccgaggagaaacctctcccacagacgcaaaagcgtctggtttctccagctcaatcttttcctccaaagaggcagtgagtgattttagggtttaccaatcttggattcgtgttctttttttctttttggggtttgcaattagagctttcaatatgaagagttgtttctggaaccaatcttaaacagctatgactaactttgattcatgtagcttagtttctcattgttcagtctttgtttgtgtgctgatgaagcagggcttttcgattcatatgtagctataaatctagcttcaggcttcaagttctgttctttaccttagtatagatgtctgtgtacagagttttgtttcttaggtagccaaagtgagttccttttgttgattccgatctcgatcagttctgatattgaatgtgtcagaggttactttttaaagcaagtgttgtgttaagtttgggtattgaatacagtttcctttgtggggtttgtaggagatttgagcaggacgagagtgttgagaagctaccagatgctctgcttcttctggagtcaccgacactcgctcaggtgactggcggagaccatgcttccgttgttgcagctgcaatggctgagagtgcattaaggaagagagacttgagtgggaatgcttcttctcttcctcgtcgtcccaagctaccaagaggaaatttgcctcattcaaagaattatcctgaaactttgggtaatgtgcttgtgcctcctcagctcaagggaaggttagtcaatgatatgtcatatttgcttgtttcatctcttttttcactatatttctcaaatctagaaaactatggagaaaggctatgagtgttgttaacaatcattcaaagagttatttagggtattttgtgcttgaaatgtggtttaggaagttatcaattgttgacattatgagcatcttcatgagaactagctcctgaattaggtgcaatatcttgtttagaacaattataatcgaataacttgagattatatctgcaggagcaatgttgctacagaggatatgagcaggctttttgtgaaaaaacggcaagactccaccaaggcaaaatctccagatcaggaatagtttggtcaaatttgaatggttttatttctctgactaattacgtaacattttgtgcaacataatagtggtatcttagcagaaataacagagtatgcaactttttttgttttttcatttatttggtactatttatacaaaagaaacaaaaaaagttctgatatttccattattctaattgcttagtagtgtgagtagatgttaaaatcttggaagtgcgatttggttgatcatttagggtgacattcagtaatttattcatttaatatttaaagagttatttggcttgatcacttataatccttaattttaacttttaacatgtgtaaatttcaaacaaaaaaaatttgcagaaaattagataataatctttggtttatttaaaaaataaaaattctccaaaacgaaagtactgtaatattgttcttagaagtttgtcgggtttctgaaacaaaggtttttctctctcctaaaaagtgcgactttccaagcaattagggttggctccctcttccagtcgtcgtctggccctccgccgccggtgggcgagtctcctgtgatggtcacaaagaagaaacgccctcctccgccggtcccctttagttcaaagtttgccagggttttggcttcagcctctgctcctcctgttcctccttctgctcctttggttcgttcagatctggttgatagggatttgattcctcctgggtcctttacgattattcctgattcactggtcgagatgcagggaacgcttcccatatctcctgtgattggctctgctacaacctctgctcttgtggcttgttctggatctgtctcacacagtactggttcgattggtcagtcctcagtggtcgttgccgctgaagatgctatctctgccctaatcatttctgctcctgttggtccttcggatgcttctattggctctgcttcagctgctctggtcgatcttgctgttgtcgatggttcttatactccgtcgccggttggtttaaccctctcggtggctctcggctcagatgggtctagcgctgcacatggtcttgggcttagtactacaatctctactggtattattggtggtgctccagctgctaaggttttctctgttgcggattctcctggtcttactgctcctgttgttggcacactatctggttcaagcacattgttagagagctcctccaatgttgctgctgctgctccctcttccatctcgttgctgtcaggagataacccttcggtcaaacctccgagcaatccctctgctaacgttacagagccttctcctacttctgatctcccttgggctaccaaattcaaggcttctctccgaaacctgaagaagatgagttctccaaccttcatggaggacggaactccggttgtgattgctcctccttccgtgttgctgaagacggctgagttgtggaaaggccatgtggtcgcccagtttcacgggctatgcccctctgctaatcgaattttctctgacttgaatcctatatggggtaatttcggcgacattacgattagaatagtctcagacactgttgctctcatctttattcctgcggttaacactcggctctgggtcacggatattggcttctggcaggctggtaactgctcatgcactgtttatccttggtctccagaaggactccgtgatattaaggagctcaaatcagctcctacttgggcagttctgaagaatgttcctcctcagttatactctcttgaaggaatcagtgtgattgctagtggtattggtgagcctctgcatactgaaaagtcgaggttagatcccataagcatcggctctactaaggttaaggtgattatcaacttggatacacctcttccatcagctattgttatccgcgacatccaaggcaattcttcccgggtcgctgtggaatatccgagacctccccccaaatgcttgaactgtgggaagtatggtcacttgttgagtagatgccctctccctctgtcacaaaagctgcccttcaagaaggatcttccttcgggatcaaaggaagttttacattcctcaactttcctggctggtgctcctgcaaccctcagcttttctgctccagtgatgacaggtgatggtgttgatgccaagataaaaccaaaaaaaaggagatcaaggtctaggtctctgaaacgatctaagagtactcctcctaggatcgctgggtctcttgataccttgcagctggttcaaacctccattagaaagaaggaaaacagtcggaagtgggttcctaagtctattgttgatttatccgcctctttgcctattaactctcccatcactattgattcagagatacctagtcttaaggcgtcaaaacctgaacggtctatgagagattctattaaggatcctgatcctgagttccctcttccaactggctgactgttatgtctaccaagtcaaagaagaaggaactcaagaagtggcacaatcgaatccgttctgcgggtctgggagctcaaggtactgatcgaggtgagtcctcgtgcggttccttacctcactgaaagcttgctttcaccttcaccttttgttgtgtatatgaaggttttttgttggaatattcggggtctaaataatcgcatccgtcagagagtggttcggaggtggattgcttctaataaccttcttgttgggtgtcttttggaaacgcatgtggcagaggcaaatgccagtgcggttttggcctccaccctaccgggttggaggttcgatagcaactattgttgctctgatcttggaaggatctggattgtttgggatccttcaatttcagttttggtctttaagcgcacagagcagctaattctgtgtagtatcaagttacctgacctgcctcaatcttttgtggtagcttttgtctacgggagaaacaccgatttggaaaggagatctttgtgggatgacatttctaccttggcctcttcttctcccctttctcgcaccccgtggcttattttgggggattttaatcaaatagctgcgacaaatgaacacttctccattatccagtctactttttccttaagaggtatgaaagatcttcagatatgcatgagagacaatcttcttgctgatatccctagtaggggtgggttttttacgtggtcaaatcatcaacaggacaatcctatcttgaggaagttggacagggctttggcttctggcacttggttctctcagtttccttcggccttggcagtgtttgatcctcccactgcttctgatcatgctccctgcattgtgttaattgaaaatcagcctgctgtctctaagaaaagctttaagtacttcttctttctatcttctcatcccacctttttggcagccttgattttggcttggagagataacagcattgtgggttcgaagatgttctccttgggcaggcatatgagggctgctaaaagatgttgccggaacttgaataggctccggtttagtaatatccagcagaggacagaccaggctttggccaatctggaagacattcaagctgaccttctctctgccccttctgatgttttattcaggcgtgagcatgtagcacgtaaacagtgggatttttttgctgctgccttggaatcattctataggcaaaaatccaggattagatggctccatgaaggagatgctaacactcgtttttttcacaaagctgtgatagcccatcaagccataaatcttatcagattacttagagggcctgatggctccagaattgataatgttgatcagattaagggtatgcttatctcctattatactcatctgttaggcacccctaatgatgatgtgacccccttttccgttgaacgaattcagtctcttcatccttttaggtgtgattcctccttggctactcagttaacagctattcctagtgatgaagagatcactatggccttattctctatgcctaggaacaaggcgcctggtccagacgggtttccagtggaattcttcgtggaagcttggcctattgtaaaggaaagtgttattgcagctattaaggaatttttcctgacaggtcatttgttgaaagggtttaatgccactgccattactcttattcctaaggttcccggggctgatcagctcaatctctttcgtccggtggcttgttgtaccacaatctacaaggtgattactcgccttatctctaagagactcaagctgttcattgatcaagcggttcaatccaaccaggttggatttattaaggggcggcttctatgtgaaaatgttctcttggcgtctgagctagtggacaacttccaagctgaaggtgatacttctagaggctgtcttcaggttgatctaaccaaggcttatgataacgtcaattgggagtttctcatcaatatcctcaaagccttgaatcttcctcccatttttataaattggatatgggtttgcatttctactccctcttatagcatcgcttataatggtgaattgattggcttcttcgcaggaaagaaaggcatccgccaaggagatcctatgtcctcccatctgtttgtgttagtaatggatattctggccagatctttggatttgggagcagtggagggccggtttgttctgcatcccaagtgtttggctcctatgatcactcatttgagttttgcagatgatattttggttttctgtgatgggtctctgtcttctcttgctgccatcctggatattctagatgtgtttaagaaaggttcgggccttggaattaatctgcagaagacggccttacttttagatggtggtaactttgaaaggaatcggattaaggcagctagtcttggtgtttcacaaggttctctgcctgtccgttatttaggcttgcctcttatgtcccaaaaaatgaaaaagcacgattaccagcctcttgtggataggataaattcaaggttctcgtcttggactgcaaggcacctctcctttgcgggtagattgcagctcttgaaatctgttatttactccacaatcaacttctgggcttcgatatttatcctccccaaccaatgccttcataagttagagcagttgtgcaacgcgttcttatggtccggagctccaaactcagctcgtggtgcaaaaatctcttgggatatagtgtgttcttctaaggaaagtggtggattgggtttaaaaagattatcttcttggaataaggtcctggctctcaagctgatttggctgttgtttactgcttcgggttccttatgggtctcttgggttcggttgcatctaatcggccgtaggaacttttggaatcttaatccctatctctcgggcagctgggtttggaggaagctctgtaaacttagagaagttgctcgtccttttgttatttgcgaagttggttcaggaatcactgctagcttttggcaggataactggacaggtcatggaccgcttatacacttaacggggttgaccggtcctcagctggttgggctttccattacctctgttgtcagggacgccattaggaacgatgactggtggattgcctctagtagaagcaggaatccggttattcttcttctgaaatctcttcttcctcctgttgggaatttggttgattgtgagcatgatgactcttatctttggaaagtaggtgatcgggtgccttcttcaaagttttctacagcggatacttggagagctctccaaccgttctctgtctcagtctcttggcacaaggcagtttggtttacaaatcaggttcctaagcatgctttcatctcatgggtaactgcttggaataggctacacactcgggacaggttaagaagttgggggctccttgttcatgctgagtgtgttctgtgtaacttggtcgatgaaactcgggaccatctcttctttgcttgtaggttcagctcaagaatttggaccttctttatgagggcggttggattttcgccgcctcctcagttcatgaattgcttgctgtggcttaattcggctacaagggacaagaatctaatgctcattatcaagcttctcttccaagcttctgtctactttatttggaaagagcgtaatgctcgtattcaatttgaaatcaggcggccttctcatcttatcactaaggaaattcagatggtgataagggctcggttggatcctctctctcgctcccgcgctcctgggagatccggactctcgcttttgggttcttggttttctctcttcctcaatagagatcctcctcaagtctgatgctttctccttgtgcaggttttcaaagggtcgggctttggtgttctagctccttcgccgtctgctgtggtggcttgggtcttctgggcttctgcctttgatctagccttttaaacttgtatttggttgttttttgttctttcaggcctgcgtgctgtgttggccttttggctttgtattgcaactttttttggttaattggaaatttatgaaaaaaaaaaaaaaaaaaaaaaaagtttgtcgggttaacgaaaactagagtatttgacatgtgaagccactaaaacttcgtaacttgttcacattaagtatcaaaactagagtattatgactgtggtcacttaacataaaatatatgaatttaattattaaaaatacaaaaaagacatgtgccataaatcatagtatttcatcaatactttctccacatggaagttgttactatgctcaaatattttacgggtgcaaaaaattctaatacaaattatttgcatattggaacagaacaaaaaccttttttttttatgttttgttttatagaaacgaaatttgaatcccatataatagttttacttcaatcgttttatcccgcagacagtgcggttgtaaactaatgtactaatacaacggctgcctactgatgttgctgattgttgtttggtggagggccaggaggtaaaggtggctgctgctgctgcacgaaataaaatatagacaacggattagtcaacggattatgctattttagctctacattttcaacatctaatcataccattgaacctagctagtgagtttaaaactagctgagaaagttgtattgtggttcaatcgtatcaggtgttttgcattgttgtgtagacattttgcctatttgcacatatatacatgtgaaacctttacgggtatactaaataacaaaagactagtgtttaaatgggacctgttggaaagggttgttgtagcctggaatcatctgtggacggttgaaaccaccacgtccttggggatacatttggggtccgccactgtttggttgtccttgaaatactcctgaaggagcacccataaaatgactttgcgacatctgaggattcatgccaccttgcattccctactccaacaacaagtgaggattaatatctctttctacacctctctaagatatcactaagaaaataaaacaaagaggaatccaacacatggggtaccgacaaaagccaggcttaagttgtggttgaattacaagagatctgagggccataccattgatccaggcatctgatgagacataggcattgagggaggtggcatgtgaccgtgaggaggcatttgcataggccggggaagatgatgagggtgcaatggcatatgagatgatggtggtagctgatggtgaggcatattgggcattggaagcatttgctggggatgaccttggtgttgttgttgttgctgatacccttgctgctggccacttccaagaagcgatgggtggggaccaggtggcaaaggaggagcccccagtgccatggaacctggaagaggctgtttatgatccccttgagaggatgcatcaaatggcattgctattcctattcctgggatagtcccctcgttccgtgtcaacccaggcacaaatgctccagggattggcgatgcctcagatggttggaaattatcaggttggcgaccaaaaccttgttcattatagcctgatacaaattacgcttatcagtacacacaaatcacatcttcaatttgttagtaaacactaaataaaaaacactaatttctgacaaatgcaacttgaaagtacatgctcaaaattaaaacagtaagtgagatactaatgaccgagtacttgggtctgagtttttaaagcctgtagaaatctgcacctatatcagatcagctcagcttgaccagtcaagtctgttcttttctacaaaaaaattcagttaatcacggtgccatatggctggccgagcctgaaccttaaaaagccaaggtccatttcgaaccagccattataggagtatatgactgaccctgccagggcctgaccagttaagcctatcacaacatccttactactgagatggataaggacatagtaattatgtactacccacaacctatccatcccaatgcctactaaaaaatcagatactaatagcccaaaaacaaaccttggttctgcataagaacatctcggggattatctgcaggcctgtttctgcaccaaaacttggttgtgtgatcattgctaccactgcagataatagggttaaaaatcattatctgaagcatttagttattcaagagcacagggaaccacaacacatcatagaataaaactgtaaggaactcatagcaccagactattgaaattgctacctgcaaagaagatatccaataggatgccatgcaagatcccaaacactgttatcatgagcatttgggatttcaatctgcgggttttcatgcctgggaattaagaaaagttttcataattagatacacctcaaacaaaaaccacaaaatataaggtaaagtaagatgctactagactactagtatgtagatgcatcatgactgaatataaaatgtagagaagaaacatgatttaaaaaacccttataagtgattaaaacaatagcagcatgaacgaataaataaaacagcatactgctgcacaacagtacctaccccacaatccaatgacaaatggagccgtcagagctcccactgacaaaatattcttcatggcagggatgccacgccaaagcttaaaaagagttaagacaacttttaattagaaatagttgcaaattagaaatatcgaagaaacaaattgaaaactcgcatccatgggataatgtctcatatgtcgacaagtaaagcatgggtacaatgataatctttcaaaggcatatactctagagtcctagtcaatgtacagaaaagtaatttgatgcggccagtttgtctgatttcacgtgtttaaaacatgatcattatagaatttgacagcttacatgttacatctttcgtgtgcccacgaaaggattgaagctccttcatagtccttatatcatacagctgcagattacatgcataagtgtcatacaaatgcttccataatgcaaggaaaaaatctcatttacaaatcaatatcccccccccccccccccacccaaaagaaagtgagacttaccttaattatctgatctttcgaggccgttaaaagccaattgccattttggttccacttcacgctaagtactatgtttttgtgaccatggctgcagaagtaagaataggccatcaaattcgtcaaagctttgaacatgaaactataataaaattacatattacattatgtactacttacagtgagcaaagctctctcccagatctagtatcccagagtttgacaagttggtcttttccacctgacaacacagattaaagcggttaatgatcagccatagagaagctctgaaatatacagcggtttctttttattgcattattcaaatagaagtctataaaataatgtaccagaaactagtagggactttgtggggtgccagtcaacgctcttgacatcccaaccatggcctgcctgagttcaaaatataaagaaccctttgattacttcgaaagttctcaaatattacaaatatgaagaaaactgtgaaaacatgcctccaaaaggataggaaacttgttataagcaccaatttggaacctttaaaactaactaacgttacatggcatgacaccaaagcgaatctcaatgacaccttttcctatgtagcctaagaatccaattctaataacgtacagcacatctcaagcggccttctaaattcaaattagaagagcaagcaacaaagaaataaagtatctgccgccaatctgttcaaataacattaccggttaatgagctttcatctacgcacttggtaaaatcccagactttaacagtcgtatcatcagaacacgaacagaacttcaaatctgttttacaaaaactgttggatacacattgttcagttttgagagattcatttaatgcaattcaacatatcaaacttttttttaccttaaatcgcgaattgattccttgtgagcagttttattggctttcacattgttcatattgttctgccaatacctgatacataagaaacaattgatccttattgtcacagcatttgaatcatagaattctgagcttctcgtttacaacatcataagttagggactgaaagggaaaaacaaatttactttaatgtgcctccatcatcaccagaaaccatataattttcattgtggctccataccatcgacctaataggttgatcatgtgcctgatattgacaacaaatttaaacagtcaataccaggagcagcaactatagaagaatcaaaacagaagtttcaacagattagttatacaatctgagaaacgaacctgaagaatcatttcaaaattaaaagattgcccattccaaagagtaaactccccactttgggagcccgtgataagacgtcttcctgaaggtgtccactaaataaaagaaacccaatcagcaatgatcccattaagttggcataatagagttaaaacaaagaaagaaagatgttgctttcttgaatagataaacatggcaaacagagaataatacaaaacacacagctggtagagggatataccaatacacggttgattgaacaacggttcttgtttagagatgcgtgaacaaactttgcagcaaagcttgttgaaggattatccgaataggcaactgtgggaagcatctgaagcattgatataaaagttagatcagtaaaccattcaatcttattgcaaaacccagaaaagcaaagaaatctaacatcaactgctgcagctggggttggttgcagagtggtcctatcccttgagtctcgctgccatgttcgagcctgaacaaaaacatatatggagtaaacactctctacttttagttccatataaagtatgagttcgttgaactacatatccatatcagttccatgacataaagacaatcctatctaatggcttttgagataaaaaggaccgaagaattcaactggggaaagcagaggctatgagtatatagaccaagactaaaactttacagaaaacaagagaaatataatcaagcagtacaaaaggttctaacaaagaaatactgtgagcagcaatgggaatacattacctgaatatatctaacaacggtgctggtgtaatcaacagctcttctctgtgtatgctttctcattcgtttcgccccaaaactgtctacattggctgcaacatcagacagagagacattaaatctcacagtcatcactaatccgataaaaggaagacgctcaaagtctacttacggtcgaaggggccagatgggtggtggtagtcgggattgatgttagtggaagaagctgacgactgccgcatcatcggtggttgtggcatctgtgaacccctgtgcatatcgccgccggcgtacattgttgcccacggagaacagtgatttattcgaatcgaagggaaactgcgaaagtgttcgaatttaggttaccttgaaacgagcgtggatctctctttagggtgtgcgtgtatcaaattcgcgaattgatgacaacccaagagcagagaagtacaatgggtagagaaatgatgagaagtcgataatggagtgaagagtagaaataaatcttagggtttttttttcttccttctcggcaagccaaaccctcgatcgccggtcggttttaaccgataagattaataaaatcatcaaactaatcaagaagtcgattggtttagcttttttaatctccacgatttttttatttttttttttatttttttttttttgggtgtatgttgttacttggcctaccctatcaattagacacatatgttcaggctgaactatgtattgcgagtaggaaataacggatgagtttgtttagtaaacccatccgtcggccttccggttgatcaacaagctcgaggagtgtatcttaagcaactaaccgcgagatggcatgaaaaagatctgaagaactgttgagatcaacgagattctagggtggatactgcggatcgggcaggacacgtgaaggacgactataaaagaaagaggaagaagaatgaatagaggcatcgccattaacattaagaaaatcctagtattgtattcacatcgaactctaatgtcccaaagtgtggttttttctagtattgttgttgttttactgcttatttcacaatcatgacagagtgtgtgtatgaattgtagatgaaaacacacacataattcacgtattcatagtggaacatattgaataaatattcaacccaaagatagtggtgatgcaaattagtctttttttttaaaacattaaaataactaaatatttgaaagagttaaaagtaaaagaaaaaaaaactgacactagtaaaacgaattacaaaaattcagaaaatgttacaatctttttttttttggtttaatgttaaattaaatgttataatcttgtcatattagaacttaaaatctcccaaataacaaaaaaaaaaaaaaatcgatatacgttattccaaacaagattcactacatcccaatggcaatgctatatgaaacacaatcccaatccgctattatattccactacgaaacttaatcatgttaaaaccctgttttgcacttatagagtataaatagactatgttaacaggtttcaacatttttttttttttggtttaatgttaagatttataccaaatgaaaaaaggtttacatagtacaatgaaaccccaaaaacacaccgagctcttgtgaagagagactaatggaacaccatacatacataaatatgagctttgccacacctatagtggggtactaatacaaccaaagtagaatccaaggagagagatagtggtaactgattcctccggcgagaaggagatgagacggttacgcattgtgcgatcaacgagaatttttgtagcggagagagaggtagcatctgctgagaaatctctgcggttgcgctctttccaaatcatataaacagcggtttgaagaagaagttttaagatcttacttgcatagtgcggcggagaagaatgtacaccaagaacccacatagaagccaagggtaaagagagtggaggattcggcgaaatccttccagcgagcgaaatccaaagtgatctagaaaactcacatttgaagaacaagtgatcatgggaatcaaggccagaatcacacagaacacaagaaccatgtacattcataccccactgtaaaagcctatctctcgttgtcaacctttcatgggaagccatccaaaggataaatgaaaaccttgggacagattccttaaaccagacagctttatgccaagccacatgaggagaaatttgtctaatttgcatccaagttcctttcgaagagaatgtttcagaaaaagtacctgtgggctgcttccattggtaccaatcagcacctcttaaaggagaaggcggggcaaccgaggacaagcaaatctgcaactgctcagcttggtgagatctcgcattgggaaaatgccattgaccttcatgtgtagcttcccaaacgctagcatttctactgatccgaagctctcttgggcccaactgaccaaaaagctcaataaggggaccaaggcttgtccaataatcaaaccagaaagaggctttcataccgtctcgcatctgacatttaatcaatctctggaacacagattttacttccaacatcttcctaatgttccaagatagacgtggtgtgctatccatcaaccaatagttccttcttccgaagatgttatggtccaaccacataacccacaatgagccccttctagtaaagaggtgccaaacctgtttcaacctgaaaacagtagcaaattcctcaagagatcgaatacctaacccaccctcctcttttgtcttacaaatgtccttccaagcaactcttgcacctcttgcagacgaagtagtatttttccacaaaaaagcagagcagagattgtcaattttcttataaaaaccctttggtagaacaaagacttgactccagaagttcactttcccataaacaacagatactattaaccggattttcccagcataagagagaaacttggttgtccaggagttaagctgctcggtaatcttttgaataaaaggttgaagtgtggcaagagaaagcttagtcgggttcagcggcaagccaagataccgagagggaaaaacacctattcgaatcccaatcaagtcagcaataacagcagcttcagaatccccataacctccaaaaaacagctcagactttgaagggttcatgtccaaaccggaaaaggaatggaaagtttgcagtataccactaataccaaggagagagtgctgagaaccatctgagaaaaccaataaatcatctgcgaaagctagatgagttaggcgaggagtgatacacaaaggatgagcagaaaacttgccctccaacagcccactgtccaacattctggataacacctccattaccaaaataaagagataaggagagatacaatcaccttgccttaaacatgcctttatgtgaagatgaacatattgactgatcttgcacctttccattttcaacatgcctttatgtgaagatgaacaaacatgagctgaaaacaaagaaggtgaagcacaaccaaagtgacatagcatactttagagctagatagaagacgtgggatttagagctcttcaagagtcaaggcaaatacatttggactgggatgaggcagcatcacaagccttcccaaccattactgaatcacttcgacattcgaaattctgactcaaaacatatgacaccctgaagatgaccattatagcgatccactaaaattttgtacaactagccgacggaggaggaggcgaggaacgtaacactggtggactgatattgtgtttttgttcttttttttttttttttccaaaacaccatttttttttgtaaatatactgttggtcaaaacaaatattaaagattaaagcactttgaccaaaacaaaatataaactaagaaatatttgaaacgttaccctgtagacagttgactacaaaaacccgtcaatggccaataacattccagatttccggcgccaaataggtggcatgatctacggccgataacgcagtcgtatacttccataattatattattcattttagcaattacaatcaacggctcacaatttcaatctcgatgatctaacggtcctacagtccccgagtgtatagaatagtgcgttacacttgattctttctagtgtgaccctatttctggagccaataaaaggctcgtgtcaaaactcgcctcttccccacaaagagaattctctcatttcttcttcttcgctcagctccgacaacgaagggcgaagaatctcgctccctcaatttcgcattgccatcgattttcttaggtaattctggttactctgagatctctatcgctttaaatctcgttgtttatctctgttcttcatttgattctattgatctgcttcacagtcttatatatcatcaacaaggtaaaatgattcgtttcgtcttgatgatctcatggtttctctgcgtaatcctagattgaatgtagtgtagatctcgtgtggagtgtgaatgtatcgagatcctggattattcggctctgttactcttattttccgccattaagttacactgttgtatggatctgtttaacctaaattttctgcgtctgaatgtgttcatggtttagtttctgattgcatcgtttctacatgtagcctctcttatgcttaatggtggataagtgttctattccactggagatgcacaattgcttttactgcactttatagcatattccatttcttacactacgggttgtttaattttgtagaggttaaaatggttgaacagactcagcaccccacgattcttcagaaggtttctggccaactcttgagctcgagtgtttctcaggacattcgtggttatgcttcggcttccaaaaggcctgctacataccagaaacatgcagcttacggaaactactccaatgctgcatttcaatatcctcttgtggctgcatctcagattgcaactactacttctcctgtgtttgtccaagctccaggagagaagggatttactaactttgctattgatttcatgatgggtggtgtttctgctgctgtgtcaaagactgctgctgctcccattgagcgtgtcaagcttttgattcaaaaccaggatgagatgcttaaggctggaaggcttactgagccatacaagggtattcgtgactgtttcggcaggacaattagggatgaaggtattggttcgttgtggagaggaaacaccgctaatgttatccgttacttccccactcaggttggtttagtttcacttctttgcttttttaaaatgtcttagttatatatgatgtattggttactgatctatctctcacttgctaggccttgaactttgcattcaaagattacttcaagaggcttttcaacttcaagaaagacaaggatggctactggaagtggtttgctggtaacttggcatctggaggtgctgctggtgcctcttcccttctctttgtgtactctcttgactatgcacgtacccgtcttgccaatgactccaagtctgccaagaagggaggaggtgaaaggcagttcaatggtcttgttgatgtctacaagaagaccctcaagtcagatggtattgctggactttaccgtggtttcaacatctcgtgtgctggtatcattgtctaccgtggtctctactttggactgtacgactctgtgaagcctgtcctcctcactggagacctgcaggtttgtttgagctctattcttatatatctgtaaggtgacagcttaagaaatcagggatcctgattctaatgttgttatttctttccttgctggatatttcaggacagtttcttcgctagttttgctcttggatggctcatcaccaatggtgcgggtcttgcgtcgtacccgattgacacggttagaagaagaatgatgatgacatcaggtgaagcggtgaagtacaagagctcatttgatgcgttctcacagatcgtgaagaaggaaggagccaagtctctgttcaagggtgcgggtgccaacatcctgcgtgccgttgcaggtgctggtgtgcttgctggctacgacaagctgcagttaatcgtcttcggcaagaagtatggatctggaggtgcctaagtaccaccaaatcccgcagtcattaagcttcggcttttgtttttttctccattttttttgcagtttcagatttcttttataaaaaagatgttgatgaaatcatttccccataaaattagagaggagcaaggggaaatattatctgttcgacgataaggtttttgttatatggaataaattttgtatgggagggagatttgactccttcgaaccaggctatgttttatatggtgaggatgtccctttttattttgttgctaccgttgttgcggaaggaaacgtcactatgttattgaagattttactaacgcgtattgatggaaatgtaaggcgtggaaaggtaccaccgtcaagaagagttcaatgaaccaagacaaatatctctttaacgtaaaaatgacagctacgatcagatcctggcgagtggcacgtttccaccaaaacacacgaaataatatgaagacatatagaaatagatagttcatataatcaaatcagattgaacgtcgcaaaccaaatctcaagttgtattattacccaacttaccaaaaaaaaaagcagtattattgcccatactaatttctaaagcatgttaattatgtgtgctaacttcgattcacgtattaggtttttcttctttaatattccatgtttttttcttaaacgtggtatgccacaacacttgcacttcctatatttttttcctgaaattatattcaaagccatcaggagaattctttggttttgattggcacgatccaaagacacacattttgtcaaatcattttcgacgactgttattaataattaattcgttaatgacgcaccgttagtcaactccgcttcgtattaattactcctccgatctctttcttattcttctccggcgacacttcccttgcttctccctcttaggactctctctacgaatctgtaagcttcaaattcttacgccacactccgagattcgcttctgattattgtacgtttctgcttcttccttcagatcttttacttttctggaattccacactctaattgatctattcattgtgcccaaaattatgcatctctggagctttacccgattttaatcgttgaattctcactaagtcgagacctttttgatggctgtgttctcaatttgtcaacttgcatcatttttgtttacaggtatgaatttttgagctccaaggatccactgccatgtatttatgctgctaaagcttgaaggcagtagtggaatcaccattaagttctttgctttgtaatttagcttgatttgagaataaacaaatgggaaaagcatcaggcttgcttctgtttctcttgggttttgggttctttgttgtcacatataatcttctgacacttatagttcacaatagatctggtgtgagtaattcagatggaagtccacttctggatcctgttgttcagatgcctctaaatattaggaaagccaagagttctccagcaccttttcatgttgccttaacagctacagatgcaccttataataagtggcagtgtcgtattatgtattattggtataagcagaagaaagctcttcctggttctgatatgggtggcttcacccgtattttgcattccggtaattctgataacttgatggatgaaatacccacatttgtggttgatcctcttcctccaggtcttgatcgggtaagaatttttattttattcccgtttctccatttggtctcactttttgttgatggtttatcactgattcactcttttttgtaatcttgtaatcttgtatttaggggtatgttgtcttgaatagaccatgggcattcgtgcaatggcttgaaagagctaccatcaaggaagagtaagtcctgtcatttctctcttccttccaactaacattctactgtttgctaaatctcctgcatcttactgttggtgcagctatgtgctcatggcagagcctgatcatgtatttgttaatccccttcccaatttggctgttggaggattcccagccgcttttccgtttttctatattactcctgaaaagtatgaaaacatagtcagaaagtattatccagcggagatggggccagtaacaaatatcgaccccattggcaactctcctgttatcataagcaaggtgagattatctgtgctatactgtttgtatatgtgttatttgacttgggccccaaagattttcagaggcgtttagctagatgtgatgttggtgtccaggaatatgttctgtttgttctgttcatgcattaaaattgatgttgacatgcatttactttctgatgcaggaatcacttgaaaagattgctcctacatggatgaatgtctcgctgacaatgaaaaacgatccagaaactgataaggcatttggatgggtgctggaaatgttagcacaagaaacaagaatcttaaatcatgaattggctctccaccttttgaatcccatcattgttaactgactactttattcttctcttttctgtttgataaggtacggttacgcaattgcatctgctatacatggggtgcgtcacatacttcggaaggatttcatgcttcaggtaagaatcgaccttgtgctgataccttagtgataacatattctatgtcgaagatacttttgttttgtcaaagttacaaaagttgtttctctgctccatattcctaagttctctcacaatatctttcagcctccgtgggatttgtctaccaaggggaagtttatcattcattacacttatggatgcgactacaacatgaaggtgattttctgtttgacacgattgtttaattttaatttttggctgataaattaggaacagatttcacatcttgtggtcatttgtttttacttaaggtcattaggttctctttttagtcactactaagttttgctgactgttaaatacagggggagctgacatatggcaaaataggagagtggcgattcgataagagatcacatttgcggggtcctcctccaaggaacatgtccttgccgcctcccggtgttcccgaaagtgtggtatgttatatataaacctctataatctgatcgtgcttaaaacaagatactgcagtaaggtccattcatagctcaaaggggaacttatttgtatcatgtccattggtttagtggattccggagactaaatagcaacgtcatacacaaatggtcgtccatagtttgatgtagtttgtgaatttgcaatggttttactttccggggagatgatatgcataagtctgttagaagtagttgtaatatcttcaggagttacggttttgcttgtggtcaatcaagtgtgagagtgagaaccgtaatattgaatgactgtccttaataacatattgtgtgatggtgcaggtgacacttgtgaagatggtgaatgaagctactgcgactatccctaattgggacactctctaactcacatccacacacaaaacacaaaccatagggacaaatccatacagcaacaatattttgcctaatttttttttccttctccctttacttcccttcttgtctgttttttcttgtaatggttaaattatgaacttgagtagtaaattacaaaattatttgtttgacacgagacgagacatcttccataattccgagaaagaaaatagaattattttgggtctagttatttgattagtttaccaatggattgcgttcagaattcagaagcagagactaaaagacacaatgcgttaaattagacggagttactaattccgtctattaaccctttttttatccataaattttattttccatttaagaaaaataaaaaaataaaattgcttagtggaggattgtgttgttgttcatctatcttcttcctccacacagctagaaacagtctcctcatcttctgagcaaaaaaatggaagtggctcttctctccttctcttcttccttgtctcctctctgtcaccagcgaatctcaactctcacacccaaaacctcgaattccccaaattaccctcgcctcccggtcatcagatccgcggtgtctcgtaacaagaaggaagagactgtcgaagccgtcaagtctcacttggagaactgccatctcctcgccgccatcaactacaaaggcctcaccgtcaagcagtttcaagacctccggagaactctccccgacactacaaagctcatcgtcgccaagaacactttggtcttcaaagccattgaaggcaccaaatgggaagctctcaagccttgtatgaaaggcatgaacgcttggcttttcgtccagaccgatgaaatcccttctgctatcaaaccctaccggagcttccagaaggaacgcaagcttgaaaacaatgactttgccggcgctgtcttcgaaggtaagttctacgctcctgacaatttcaaagtcctcgagaccatgcccactcgtgctgaggtctacgctaagatgctcggtgctctgcaatctccggctattaatctcgtcactactttacaagcaccagcaagagaggttataatggtgcttatggcttacattaagaagttggaagatgagagtaatgcatagttaagcttgtactaatcttttggagaatgtaatgtacgcaacaaaaggcaattcaattttttgtttatgactctctcaagcaccaattgttattacagtgactgagttttattgaaatgttgtttttcggagtgctctcaagctatcataacggtcttgtttagatgtacttagagaggatagattcaacaactccctgagctatggggtgataagtttctcgagcttctgcaaacacctgttttgccagctgcttctcttctgttccaccagattgtgcaagagcagtgaagagtggacgcaggtacttcatccttcctacctcttttagtgttttcttcacttccccatggtactctctgcacttggatgtgactgcaagttgcagaaacgagaccttcacttcatagtctttcgattctgccagtctgtaccgcttgtccaaggccatgacctgattcatcaatgagcaaagtgggtgttagccataggtttgaacctgatcaccaatccttcctttgttgactagcattgtcattaacaaacaagataagatcctaactcttgcaaagccaatacactttccacaatcatgaactctcccaaagccaagagggtttttccacaatcattattcactagccccacattaatccaagagtaactattgagctaacctaactgacagttagttaggcctttttctcctccttatgtaagcttattgagtagttcaacctaagtcaagccatttcccattatcttagaggaagaaataaagattcactcagcaagtacagctccaagtacagctcccattaacttagaggaagaaaggagtaaagagtacctgagaaggttcacatgatttaggaagattctccaagtacagctcccattcctgtccgttccactcagcaacatcatcctcacttggcatctttccttccttaaactctttcgccagggatatgatctttgtgtaaatggttgagactggttcatatgcatcctctggtataccaacgccctcagtccacagctgtagattgatctctttctctatgccagggatgtttgctttcaggaattcaagaaatgtgtttgtatcgattgacttgaacttgaaagtagcaatgtatttcttgaggaattcgtcaaaagcagttcttccaatctgaaagttttccagtaaatagatgaccattattgtaaacattacataacaaaacacctaagcgaagagggcaattcaactaacctggcgttcaattcgcaacacaaattggaatcctttttcatatgggacctgagaatatacatcatctggatcaacaccttcttgtttgttccacagtttagtgcactccaagttgtccttaaaccgttccatttcatcagttaaacccctccaaccaatgccaatgttcaaagtagctatatccgccccttgaacaacctccacaattctcctctctgcgtaagttgtaaatccctattgccatgaacatgaaataaacactttcccatcaacaaggcaaactctaaaaacggacacacagttacacatcctaatttgtagctaaaagaagcaaaagcacaagacaattcaaagctacctcattcaaccagaagtgttcattgttgatattagtgatcaaattcccagtccagctatgtgcgagctcgtgagctacaacttgagctccagtggcgtctcctttgataacagtaggcgtcaggaaaaccattcttggattctccatacctccataaggaaaactcggaggcagcaccagtaagtcaaatctctcccactcgtaatctccaaacagcttctccccttgcttgatcatatcctccgttcctgcaaactccagagcagccgcatctagaacttcaatggcggcagattctgtgtatacccgagtcctaggtccaacttcccgaaaccctaactcaccaacggcaaaagcaaatagataaggcggtataggctgttccatagcaaactcttccacaactctatcctcaccacaccacagtgacgaccccagcgacccagcctcgagatgtttagcctcctcaggaaccgcaagcctacgacggacgtggcgagccgacatgacggcagagagcgaattcggtatgttcataacgacgtcgtaacggatcctcgcggcaggagtgtcctggcatgggaaaatggatctggcgtgaatcgcttgacactgcgtgtagacataaggatgcaatttggagaaagtttgaagcggcgaaagccactggagagcggaagcagaaggcgaagtggagtagacaattagcagtgaagattgaccggagaggactacgacaacttcggtgccccgaattcgatccggtgtggtggagacggagtaagggataggctcgagagtgagaggatcgaggaccatagcaatggaaatgcagcgagtatcaagagagagttcgccggagaaggcggaggagagagtgaggagagcggagccatggattatggaggtgttgaaatcgaggtagagggagagagcgacatgcgtggtgagaggatgagaggaatcggtgaaagagtgtggatcaatgggtgccattgctgagtgagagaagcttgcttagggttttgaggaaaggggcagttagagaggtggagaagagagtataaagcgggagaaaaagaaaaaatgaagaattgttgttcgatggtaccattttatgatgataaataatgtatttttggaataatttggttaatggagaatcatttagtgcataaagttgaaaccgttagatattaaacggcgactaaatacaatgttaaacccaagttggatgaaccaaaagcacaccaagccaccaacaatcctgagatttttaacaaccatctttttgggcttgagcctctattgagcttcaagttttaggtccatgagttatacactcacacgagtaatctacttagcaacaaacaacgagtttacattttggtattggtgtcagatttatcgtctcattatttggtgaactctattacaagatcaaacaatctatttgtttttgcatttggctcaaaagctacttggtaaaaacttcgccaaaaaaaaaaactctcagtaaaaattacaattattttttcctgatggtttaagttgttgatgacaacaaatataaaatctgatggttgacgattactactattaggagagtcaataaacgggttcgagcacaagtgctgacggcacccacccgtcaaaaccgacgaaaccagagagccctcgagactcaaccccaaataaaattggaaaaaaatgaaaataaaaataaaaatgatgatataaaaccctgaagaagaacctttttcacatttttcttacaatttttattcttgcttgctcgtgtctgatttttcccagccaattttgatctacctttcaaaaattccacctttttctttcttctccatggatctgttcttctctccttgatctggatcgactttactgagtttccttcccccccccccccccccagatatgttctgaggaactctctctactgaattgattggtctttcactcccttcttactctttgatctcgcgacctaaattaatttagggctttctcttttcggagctctcatggttgggagagtcaaggtcccttgttgttccgtgtgccacacgcggtataatgaagatgagagagttcctttattgcttcaatgcggccatggcttctgcaaagattgtctttccaagatgttctctacttcttccgacacaaccctcacttgtccccggtgtcgccacgtgtctgttgttgggaactctgttcagggtctcaggaagaactacgctatgcttgctctcattcacgccgcatccggcggcgctaacttcgattgcgattacacggatgatgaggatgacgacgatgaagaagatggtagtgatgaagatggagctcgtgccgctcgtggatttcatgcctcaagctcgattaatagcttgtgtggtccagtgatcgaggtcggagctcacccggagatgaagctggtgaggcagattggggaagagagtagtagtggtggttttggaggtgtggagatgtgggatgcaactgttgcaggcggtggtggacggtgtaagcaccgtgtggcggtgaaaaagatgactttgacggaggacatggatgttgagtggatgcagggacagcttgagagcttgcggagagcatccatgtggtgtaggaatgtttgtactttccatggggttgtgaagatggatggatctctttgtcttttgatggacaggtgctttgggtctgttcagtctgagatgcaacgcaatgaaggcagacttactttggagcagattctaaggttcctcttttgcttctcttattctttttttttgcctagtatctggcttttactgtgatcgtttctgtgcttaaagtctcaaactttgatagcctgttccctaattagaaattactggactagacccgacttggttttttgtgattgctattagaaatatatattgtaagtgcacagtttttcagattctagtgaaacaagcaactaaaacctggtgtcatttgccaaaagggcaacttgtaagataactttagtttagatgttcttaaaaagctaggcacgaattatagtagttgtcatctctctttgtcattaccagctgcagctacttttcatctgtcaatgcctcaatagacaaacattttttggactagtcctttcctttttagtagtggatccttgaacctacgtttgcaagatatctttgagaaagccctttacattagtatgcttccttctaaagtatatgaccagaaatcatttttcaacgaactgacatatcaaatcatgcaaaaaattgtacgaattgttatacattaatttatcaaaggacgcatcatctaaagatgatccttattttgttgtcctggttctaatattaccttcaattcacttgtttgtatttcctcctattttctgtttttaactgaattgcgtcatttgggactattaaatgtaagcactaatgcgtaaatgagtgttttgtattctcctttcatatcgtgctcatgttgttttaagtttacaacttagaatattccttcagtgaccaacatatgtattattccattgctcttgttgtgatattaaattttaccaactgtagatatggggctgatgttgctcgaggggttgcagaactccatgcagcaggtgttatctgtatgaatataaaaccttccaatcttcttttggatgcaagcggcaatgctgtggtttctgattatgggctcgctcccatcctaaagaagccaacatgccagaaaactcgaccagagtttgattcctcaaaagtcactctatacacggactgtgtaacactcagtccacactacactgccccagaggcttggggaccggtgaaaaaacttttttgggaggatgcaagtggtgtatctccagaatcagatgcatggagttttggctgtacgttagtagagatgtgcactggatccactccgtatgtgaagcctcttcctagttgatatttcagttgtgttttgtgtctgccattgtactaactgtcacttaattttacaggtgggatggtcttagtagagaagaaatttttcaagctgttgtgaaagcccgaaaagtaccaccacagtatgaacgcatagtgggtgtgggaattcctcgggaattatggaaaatgattggtgaatgtcttcagtttaaaccgtcgaaaagaccaacctttaatgcaatgcttgctacatttcttcgtcatctacaagagataccacgtagcccttcagcaagccctgataagtaagagttttaagtccctaagattacttagttttatggtttccctgttttcgttgcttgtcagtaaagaagaccctttcacttgtgttaagattaatattagcaccaacacctaagattatttttgtcatcatgcctatattccttcgcctaacaataatataaaccatgtatgatgtagtgggattgccaaaatatgtgaagtaaacattgtacaagcacctcgcgcgactaacataggggtctttcaggataaccctaacaacctacatcgggttgttttggagggagactttgagggtgtaaggttagtatctgttaggaattctagttaatccttttgttcgcactagctataaacaacctgttctcaactacattggtttgatttttgttttggagtagaaatatacttgcaaaggctgcagctggaggcggtggaagctctgtgcgatctctattagaggcgcaaaacgctgatggtcaatcggctcttcacttagcttgcagacgtggcagtgctgaacttgtggaggctatactggagtatggggaggctaatgtagatatcgtggacaaagatggggatcctcctcttgtctttgctttagcagctggatctccacaatgtgttcacgttctcattaaaaagggggctaatgtgaggtccagactgcgggaaggatctggcccatctgtagctcacgtgtgttcgtaccatggccaacctgattgtatgcgtgtaagtctctgctcccgaggaagctatcagtcactttaaagcttccacaacatgatcgcaaatcttccacttatgtgaagtgtatcagatattatgcttgtcttatatctattatcatgttaataactattctctgctaattggtactatcaataggaattgctggtagctggagccgatccaaatgcagtggatgatgaaggtgaaactgtgcttcatcgagctgttgccaagaaatacacagattgtgccattgttatattggaaaatgggggatctagatcaatgactgtttcaaatgcgaagtgcctgacgtaagtacagaaatgacctctttctatgctaggtagacgggaccataaaatttggcacggatagattactactgggccattttaaagcaagttctgtttggttttattttgtagttcttatactcctatttgcatctacattataacttattttgagcattgtatgtgcttaaaaatgtctactacattaacctgtttggataagtcacaatgaggtagctgaaccatttaatgtgtaccttggttcttttctttcttaggaaagcatatttcattttgtaaacctatgtttctgatgttttatgctacagatctttatacttttatgtttgtttcagaccgttacatatgtgtgtagcaacatggaatgttgctgttatcaagagatgggtggaagtttccagtccagaagaaatttctcaggcaattaatatcccaagcccagttggcactgctctgtgtatggctgcttctataaggaaagatcatgaaaagggtaatgatgaaatcgtagtatcttttgtttggtgaattgcttggtagaagtatgactatatctgatatattttatgaggatctttacgaagttttatctttatttgatgacacgatgattatggtcatctctataagataagaattttttcaagcacatttccaatggtattttatgtagtacatctaaaagatcagttacttgtagttttgcacattaccaaaaaaggatgttatttgaactttttcctgctatttcttacaagagtattgtatcaaagttgaatttattggatgttatgtcattattcgtcttaccatatgaatcagtttacttaacatgtatactgctgcagaaggtagagagctggttcagatattgcttgcagctggggcagatccgactgcgcaagatgctcagcacgggcgaacagcgttgcatactgctgctatggctaacaatgtggaacttgtgagagtaagatgctttcctaccaagaatgtattaccattgatgtttaaacgagaaggatactattatgttttgtccgtgttgatagatatgctgttgtgtagcaccatacatcttaaatccaagggttcaatgccttccctatcaaagaattagatattatatggtgtgaattgaaaattatactggtagttattgagggaatagtgtgccaagtatcttgagagttgatagagttgcatacatttcactcatatcattcattataatttgataggtcattctagatgctggtgtgaatgcgaacatccgcaatgttcacaatacaattcctcttcatatggctttggccagaggcgcaaactcctgtgttagcctacttctggagtctggttcagactgcaatatacaggtaatattgcagcttccctaggtttcatgagttatttgttgacactctcctttactgccaagactatattttcttattatcttggaggcattgtgtattcaaaactagaagatgctaagcttaaccatacgtaaggcttgaactttgccaatctgaatgagattttttacttgtatcccttcttttggtcggaaacttttgaagagggtaaacttttttctaacttgaatattgtcaatctgaacgttcattttcttaaatatacagtcattaattcaatagacataagtctgaacatatgttttgaatttatattctatctttattcttttgtcatgaatatgctaagcttaatggtatgctgttccccgagggttgattctcttgtcaatctggacgagaatgttggatcgttgatataaatacaattggttctatatgtctatcgtttgttattgctgtacaatgataattgtttccttgaatataggtaataaaaaaaagttgtttgtttgacaaaaaaaaaagttgtttaaatttacaatcatcacttcgtcaacctgtgtttaactaatgtttgaaatagaaacataagtagttgcaaggctttgtgcatctaatgtttgtaggttccacattggtgcattcagagctggctttcaagatgtgctgtttttaccttgtcagttgacttgtcttcttctgttttcattattataggatgatgaaggagataacgcatttcatatagcagcagatgcagcgaagatgatacgtgaaaaccttgattggttaattgtcatgcttagaagtcctgatgctgctgtggacgtcagaaaccacaggcaagcactcatttgatgcataccttaatgctattacaaatattatataggtgaaacaaagatgtatattcattgcactgaggtaatgttagtttcctgtcaggggttgtgaaatccgctcatacaaaatgtactttagaagctcgcattttgaattgccatttcccttttcttcctatgaccatcatttaaataatttatataaatattgaataacagtggcaagacagtacgtgacttcttagaagcccttccaagagaatggatatcagaggatctgatggaggcactattaaaaaggggagttcatctatcacctacaatgtgagggcgacttcttaaattattttgctgatatgtacctttctcagttaacttacgctgatttcaaattgtcagctatgaggtaggggattgggtgaaattcaagagaggcataacaacacccttacatggatggcaaggtgctaagcctaagagtgttgggtttgtgcaaaccattctcgagaaggaggacatgattatcgcattttgttctggtgaagctcgtgtgttggcaaatgaagttgtcaagttgattccattagacaggggccagcatgtaagactcagagcagatgtgaaagagccaaggtttgtaagtgctttccgtgtgcatgcacattttctaggccagatatcatggatgaaacattttctactgtgaatttttcctgacttgtaaatgctttctctttgtcttttctggttctaaatcggccaaaactatcatgttggagcgactaaagctgttatggtataatttatttaccaaagtcataaccaaatttggtgttgattgattctattttaggtttggttggcgtggtcaatcacgtgatagtgtcggtactgttttatgtgttgatgaggatgggatcttacgagttgggtttcctggagcatctcgaggctggaaagctgatcctgctgaaatggaacgtgtggaagaattcaaagtcggggattgggtccgtatccgtcagaatctgacttcagccaaacatggttttggatctgttgtccccggcagtatggggattgtttattgtgtacggccagatagcagtctccttgtggagttaagttatcttccaaatccctggcattgtgaacccgaggaagttgaacctgttgctccctttagggtaatatactattatgtaaatttcttacaaacagttcttacttcatatcagaagttcaatccaacaagtttcttaatattatatagattggtgatcgggtgtgtgtaaagcggtcagttgccgaacctcgatatgcttggggtggggagacccatcacagtgttggaaaaattagtgaaatagagaatgatggtcttcttattattgaaataccaaaccgacctataccgtggcaggcagatccttcagacatggaaaagattgatgatttcaaggtaaagctggttttcacttggagtcacaaggatgtggaaatttggttgtcttttcttaaaatgcatttcagttagatgtgcagcatgtcaagagctttgattcttttaacactgagcctttgtaccacgagcaggttggtgactgggtcagagtgaaggcgtcagtgtcttccccgaaatatggatgggaagacattactcgaaatagtattggcgttatgcacagcttagatgaagatggtgatgtgggtatagctttctgtttcaggagtaaacctttttcatgttctgtgacagatgttgaaaaggttacgccctttcatgtgggacaagagattcatatgacaccatcaatcacccaaccacgacttggatggtcaaatgagactccagcaactattggtaaagtaatgagaatcgacatggacgggactctgagtgtaagtttctgaaatggatcatttcccctggattcattgggctgtcctcagctttttgttttcagcatatatttaaaatcgagggttggacttttttttttttgttctcctgtaggcacaggtgactggtagacagacgttgtggagggtctcacctggagatgcagagctgctttcaggttttgaagttggtgattgggtgcgctcaaaaccgagcctgggaaacagaccaagctatgattggtctaatgtaggaagggagagtattgctgtcgttcatagcatacaggaaacaggttacttagaattggcttgttgtttccggaaaggaagatggagtactcattacacagatttagagaagattccagctctcaaagtgggccagtttgtgcatttccagaagggaataacagaaccaagatggggctggagagcagccaagcccgattcacgaggcatcataaccacagttcatgctgatggagaggtaagggttgctttctttggattgcctgggttgtggagaggagatccagcagacttggaagtggagcctatgtttgaggttggagaatgggtaagacttagagaaggtgtttcttgttggaaatctgttggaccaggaagtgttggtgtagtgcatggagtaggatatgagggagacgagtgggatggaaccacttccgtttcattttgtggcgagcaagaaagatgggcggggcccacttcacacctagagaaagcaaagaagcttgtggttggacaaaaaactcgggtcaaactggcagtgaaacagcctaggtttgggtggtcaggtcatagccatggaagtgtaggaacaatatcagccattgatgcggatggtaagctacggatatacacaccagccggctctaaaacgtggatgcttgacccatcagaagttgaaaccatagaagaagaagagctcaagattggggactgggttagggtaaaggcgagcatcacaacacccacttaccagtggggagaggtcaatccttcaagcacaggggtggttcacagaatggaggatggagatttatgtgtatctttctgtttcctagacaggctatggctatgtaaagccggggaactggaacgcataagaccatttagaattggagaccgggttaagataaaggatggactggttacacctcggtggggttggggaatggagacccatgcaagtaaaggacatgttgtgggagtggatgcaaatgggaaattgagaataaaattcctgtggagggaagggcggccctggattggtgatcctgcggatatagttctagatgaaacttctggctgaatctcccaatgtatgattatgttttgaatctggaagattggtcattaggctatgcatgaggctgctctgtccattgtaagacataaagctcacagagcccttgtgccaacagctcaggtaatctatatctatctctcatgatgatttattaatatttttgttaataaagttaaaactatagagtggtaggagatatttaggatgtatcatctattatgtctagacaccactttcatatctcagatctctttttgtttatatgtttttcttcttctttgtataaaataatgaatcgcatgtacggacagatttccttagtattaacaaatctttttgaagaggcttagcatataatattactgtttgaagtactgtacattgggaatgggaaccaagtcggatgtgcttaaaacaataagcactttcttagattctattttaaaataccgagttatgaatcagattctgggcgtaccagaacaagaatgaaaaaagttcattggattaatttatgtccttgtcctggagccatttacagaagccttcctccaaggcacatttcatccattcatgccgacagttctctagtgcttgaggtattgtaagccatgtccgagttctcgattcctgttatggccatgcctccagctcttctttcacatagagtgcgtacattaccgctttacatacaccttctgggctaaattcgttttggtgactcttgctcttgaactcgtattctcccaacaaatcctacaaagcatatgtacttttcctagccattaccaatgttatcatgggccaaatgacgtcggcttccagcgacgggctggaccaatctgcggtttttcagcccatgactcaacaaaagcattgctccatttaaataaaaaaaaactgtctgaatgtcatcaaggtctatttttattgtgggaaaagaagagtaagaatgttgttatataggtgatacaatgaagattgtatactgtttttacaaaatcgcaacaaactatacacagctattacttacattacatatcctttatttctccactgataacaatggctccttcaacagcgcgttggaggaggatgaattgttgttgctcccaccatatcgtctcgtaaaacttaaatgcttgtcctccaagttagagctctgtacgtattgtagacacacctgtacggcgtcgtgtactctcacaaagaaccattccttgccaactagctccaccattcctgatcttgctattgtcaagtgaacatctttgttcgggtttgatatcgctagctgaatatcccttgttttatactcttgatacagttctttcaaggcttccactgcgctcgaatctatgtgtgtaacaggagacatttccaggattacaaaatttattctatccacctccagtccccggtttgtgtatttgtcaacagctacttcatattctcgtagtctgcactttgcaaaaaaagccagcttgttaatgtttctaatagattcataccacaaggaagaataaacgcctttctcacctgtccttgatgtaacttatgttggcaaagtaaataggagaatcgattcgaactatcacaatcccgttgtatgtgtaagcctctggatactgctttatgtttctgtacacagtggtgcctggaagccgccccaagacagctaccaggagaataattaagataagaaatgaaaccaagttagaaaaacaggcagtttcaatacaccgagaggcaattttgaacggaatttatcttaccaatgtgagggtttgcagactcgtggataacgaatgctagtgaaaaaccaacctaaaattgaaaacattgcaactgcgtgagtccttagaggcctatgcagaaatcatatatacattagttagatgaatctgaacatactatagtatctgaatactcacaccaacaaggacaccgatctctattccgaagaacaatgttatggtgctagtgatggtccaaagcgaaaaatccctcttgtccacacgccagaggaaaatagcttcgtcatagtccacctaatgataataatccgaaaagtatacataagaaaccagaagcagaattcatcttcgctccttggcaggttggtttatatgaacttaccaagccactaacggcagatatcactattgctgccaaagcacactgattacgagagagataagcaacagagtgaatgttagccaaaatttagtttcacaattctctgaagtttcagaaagagtagcaaatactagaaactgatatattcaccacgggcagacagacctgtggtatgtatttaaacatcggtgtcaagaacagtagagaacatccaatgatgattcctgttataagccctgataggccagtcttagcttcactttcattattcacagctgacctagaaaaggatcctaaattttgcattcaggacattcacagattatgttaattaactttgaaatatatttacgaaatgtataacagattatatccatagcgtcaattattgatagcttttatcattctcaagttaacgtacctgtagctgggtatgcagaaaataatgaccccaatatatttgcaacaccaagaccaaacaactgtccagtgaaggtaaaaacagttgagctttcaataaaaacggtaaaaagaaccggaatattgtctatagcaattcggcttctagtcaagcacagtacctctgaatttgaatccaactcatatctgttttttgccgcaagcgctttggcaattcccacagattcctggatacaagaaaatgtagaactacttcattagagaacgaaaaaacataatatcaattgacatgcgctactgcatccaaatctaaacaagaaatccttttgttcttttttttataggaagtcagataaaccatgtccattcatttatagtttctcatgattaggttcagctctgcagtacgccagtacccatatgcctactttgacagaactaatgatgttgatatctcaccaagatggcaacaccagtaatgagagctgatgttggaagcaacgtttttgcatgatcaaaacttcttgggaaagaaaatgttggaaggccctgaggtatttctcccacctgaaaacatactgaattttgctattacttcaaacacttcaccgttatgtagctcaacaaggcaactaccatgaatttaatttctgaccagagagatggaaggcggatgaaacacttttgcaatggttgtaccgagcacaatcccggtgagtggcgctgctgctcgtaagaactgaagttcctttttggcttttccctgccatgaaaaaccatgaccttattatcacattaataaaggaaagtcctgtttccctggtaactctggaaaagaacaaggctcataccacatgtttcatcacttgaagaatcaccagaataagagatcccatcacgaaaggtggccactgaaactaaaaagcacaaaaagatccatctaaataaagtacaaataggtagaaacaaaacacgttctttaccaaactgattcaccaatgaaattcatgatatacaagtaaaatcatcatacgacgatgatttaatgtacagtctaagctacttgaggttatactaaaagttataccaccagcaccaggtattagtagtcttgaagtacttacattcctcaggggcagtggctaaaaaaagaatatgcagatcgaaatataaagaggtgaaaacccaaaatttcagtctaaatcatacttacagatcccgaattaaagatattagccaaagaggaaatgtgtctctctttttctgaactgtttaaagctgaaaatgaagtttcaccttatcagctccagctattatgctctctactattggcacaatcttgctgctccgggcaatgctataccccaggaaatattttatttgagataacccaatcacaatggccgaagcacttgtaaatccagatatgactgagtgactaatgaaacgaataagccatccaagcctggattgaaatcacaaacaagggagacgcaacatgacacaacaataattagaagacttctgctttaacggataacagttactacacaggcaagctatataagtagcagtcaagataataaacgttttccttatctgaattctaaccaaaaatagtagtattaccttaagagccccatgatgcactccaagattccaactaaaagcgccaacaaaatggccaattcaatatgtaattcctcgttcgtatcagcgattccacccaaagcattagagacgagaagagaaaccaatgctacaggtccaattgcaagctgacgggatgagccaaatatggcatagacaaataccggcacaaatgaagagtctgcatcaaagagttataaaattgaatcaaagctaacatgattaggcatttctttaaaccaagagcaggagtacttcaatagcattcctatgaattcacaataaaactcacatagaccgtaaattggtggaaggccagctagtttcgcatacgacattgcctggtcaaatccatcaaaagtcattcagcaaaataaacttaaaacaaaactccagattgaagaccaatacataattttactaaaaacttgaattgataatctcttaagctataatacattttgtcacatctttaaccaattttgcagctcaacaagacaatacgattgaaaccaataattccagtttcctattctaaagccaatgattccagcttccttaagcttgaaagtaaagtacctggggaacaagcattataccgacggtgataccagccatgagatcgagcttaaaatactcgctccatcggtaagttcgaatccatcggaaacaaggaaagagagtatcaatccaatcgacgagcctcatgcgcttgatcttcgccgtccatccggagaagatatcgtcgaaaggaatcgaaggaggacgagcttcattggaggtgtcaggatgctgaagcgggatgaccttgacggggcgggtctgacccggaggcttgagcgaagaagacgaaccggttccggatcttgaaacaaggctggtcaggtccttgacgctgagagatgcgtaggacatgatggctcttgcgcacgcttggcgcactttagagaatccgttaatgagagaatggaatactcaaatgttaaagagctttgtatcatttattccatcaatgctcataagctttactctagtgtctggtcaattttgttttttttcaaactaaactttacaattatcattacattatctaatcatacgtcaaaaataatttagtttatagtaatagatccagaattacgataacgtaactacatttaaattttgctaatcacataacatttttaaaattagttgttaattagtaattagataaattgttgtcacttgtaagtttcgtcacgtatctctaattaatagaatagaattcatgaggggtcaatccaatacaagtggcttgcgtgctagttttgatgatttgtttactattctttattttaataggtaccagaaattgggagggaataaaacatgtgttgaaaaaagtgtgaagagggacgttaagccgtctagatccatgatgttgatgagtgggtcaactcttggctcttgtgtgtatgtgtatgtgtccatgatgagaattcacaaaacagttttgatgatttcaaaacctttgatgcacagaaatgaaacactacagttaaaggcaaaatgtttaactagggatttaattccaaaattgtttttttagatgactttcttaactttagaagataatctacttaatttttgttgccattacaattttaattgattttaaaagcttgagaaaaaaggaaccttttccttttcaccggtttcatttgctttcaacatttctcgagtctgccaaaggacaatttggacaattgatatccgctccataccactaagaggcatcacaagacaagctttgatgaaattccaaactgtcttgatggtcacataagttccaatttagatacgcatacacaaggaaaacgttaaacactacatgctaaaagttgagcaaaaactagcaaggaatggattagcacattgtcttgagaggcccattcattaacagtaaaacattattaaacccactgtgatgtgtgagtctagcgggccggtccagtccgcttgacaggcttcagcccgacatccatatgcctcttgtgatgtggttggtcggttactttcccggaatcttctggctcctttagcagaattgtccggtgtcgccgtcctccatcggttggttcctctaccaacggtggttggctcttgtctagcttctccgtcgtccgtctccggcggtttaggctagcttttggccggatttctttttcggttttgttttatgttctcgttttctatagatccagtttgattttgctcctttgtgttctaactcttagagggctcaattccttgaacctcctttgtttaaagggctcaatttgtttttcaagcttatcgatttcaattatataagaacaaattagagttgtggattggggttttctctaatgcctttgagttgggttttatgcaattgagtcaattgtcatattggtttttggaaacgagtgtttttattttacttttaggtgttcatggaagtttcattggcttaagttctacgctgatgtcgtttgaagatgatgatatgactacccaggggagattttcctttgcgaattcgaagatgaagaagattgatgggattctctgaattttgtgttgctccatcggacaagcttgaagtcttggtggttcctggtggttttggagttccctgcaatgactaaccaaatcggcggtggactacatcaattacttcctaaaagggtttcttgcttcaactgggctttaatttagttggacttttatctttattttgtttttgtctggagactgaaagcggaggtttccactcttttgtaatctttacaatctttggtttaaataagagacaacacttatgagcaaaaaaaaaaaaaagtagacatacaaaagtcaacaggcagttaccataaattaccaaacagattaacaaaggaacttcggagttatggtcaaacaaagaaagtaaatgaaaaacatatcagtgtatgtgaggcaggcgtgtgatggatcatactactgcagttctttctccagttcatcgaattcccatccatcaacctcatctgcagagtaatcacgagccaccttaccaaattcagattccagctcggctagttcggcttcagggttaaactcttgactggaaccagctgcaggattgggtgcctgaggagaattgctcagctctggcttttgggtctgagtagattcagttgaagcattcatgctactactgctaggcttgggagatttgggtgatgtagcactgcttttaggggacgtaacactgcttctaggtgatggaatctctatctctaacgttggcctcgctatggattcaaattgctgcctcattttctccatgtcatcaaacagctctttcacacgccggtcgtcctttctggtataatgtaggatttcagaactttagtacaataaatctataccgattactgaaaggtcacataattatgtttccactcacttatccagtttgctttggagaacctggaattgctctttcacgttgtccacaatgctgaatgtggtaatgatctaagtttttgataaaaccaaataagagacgaggaagaatagaaaccagaaaaagaaaaaaaatcaacgaaccagagcacgaccatgcagagtcatatttggtctcaataaaaataatcaatcgtaacctactaagcagcaattcttaccttggtctcatagtctatatactcctcctccagaattttcctcgggtttgatacctgattgtctccctgatctgcatttggtggcttctccgacctgtcaccaccaccacatgcaaaaatgtcaccactattgcaaggcgcaattcaactccaactagagttataatcagaaaccaagtaatatagtagggataatccaattcaacaagaggcatttacccaggacccagattcttcagattttccacataattttctatacgacttattaaaggtgccacctccttctgtacaatatgaaattttgtgttagctttcatttatcaattactagattaaagtttctataaagtacagaggttaccttgtacacagagagtatattcaaggccacatccgagaagtaatcttcatgcttctccaattcgtccctaagaaatgccaatggattatttgttgtggtcgagcagcaaagcaagatgtattgcgagaaacagctgagagtagatagaaatacaaagtctgcttatccttcgtttcgatatgtgagcactgaagaagccatgtatcctcaagaaaattaatccacgtcttgataacttctgcttctttcttacaagctacaactgatttggacaggtcatcatcctgcatgcagaatcaacagaagcagattatttcacgtggatattattaagcgtaagagctacccagcttaaagaaaatcccaccttcgttttcaggtgagcgattatctgattgttggcttcaccaaattgatccctctcctctgtcgcattacgaaaccgagcttgagcagcagctaacgatagatttacctacattgaagaatatttactgatataccttctgtatcacaacaatcatagctacatacatagaatcaataatatcattatatttcagttcaacagcatgatgagcttacgtttatataattacgtcaagtgacaaaattttcgtctgtttaaagtgtgtatgtaaacctccaggataaagcaagaaacccgataaatagaaaaatagattaccctcttcagatcggcttccagctcatctctttgtttctcaagctgtgcaatttcggcacccaactcctgtacataataaatcataaccttaatactgtcagctggataaacatgccaacgaacgctgccacgcttaagttttgttttttttaatcttccttttttcgcagtcaataatcaaaactcaaaagaacaaataaaagtgggagataaagaccttttccttttcaccggtttcatttgctttcaccacacgagcttttagtgcttcctctttctgaagtctgcgaaaagacaaatgacaattggtatccattgatggtatttttccttccaatgactaatcatccgctcaatagcactaagggataagtgataacaagacaagctttattataaatcggcattgtcttgcagtcccataattcaaatttgctactcataagctaactttaatcagaaaatactatagcaaggaaagaattgtacattgaatcagtagtatttgctgaacatgcatatagtaacacaaagaataagaaacttattacctattcttccggtctggtaaatttaccatgtcatatcaaaatttaaccataaaaaaagtcttttgcagataaaaggaaactaactggagtcgataataagtttaacctgttctctgatattcgtttctcggctttggaagttgaatttgctaaagattctaataacaccctgagcttgtcgacctggttcaaagacaaaatatctattatcttccataagtaacattctactccagaagtcaataaatgtatatgctgtcatggaatacatgaaactcttaatataccatatcagcacaaaaagtagagtaagatgataattaacaatacgaattaacttgtataaattgagactaataaagctcacagacttactttctgagcatgtatatctggtgagtcaccattgcttagttgtctctttctaattagaagaccttctaatctggagcaaagacgaatctttgcaagtgtttctttgaaagcctgcaaaacgagaagtctatcacacagagctaccgaaatgagcttagggagaaaaaagaggcttggagatactattatcctcacctctattgttaaaggagtctctttatgttccttgtcttcactctcctgtggaatttgagaggcattcatcttttcgagtttctttctcaaatcagaagcttcagcatcaattctgaaaacatgaattcaatcaacagtgaggcaagatgagtagtgccctatgactcattattcattaataaagagaaacaagagcaaaaagcacatcattatcttcatttatcacctcagcatttcagcattaatcttcaaccctgtgatggcattttgggcaaactgaagcaattcgtcctgcttaacctgtccaaaagcagccaaagcaacacagaagaatagaaaagttaggaggagatccaaacgcccataaattaacatatgctgacttttttactgatcaagcgcttaccaaaacttcatccttgtaacttgaaaagactgtagcaagatcctgcatactgctaactatggcatcatgaacttcctttcctccattcaaacaaaggctgaaaacaatgttaagttctatgaataattgcagtacgaatgaaaatagcaatgaattgtgttgactttccaagaaacagtttaagactccttttggaatccaaattttggcaatgcaatatggaatgccagcagactcacccaaacatctccaggagtagcgtgatttcttcgtcatgtggtggttcaataatctgtaataaaacagtcaaacctttaacccccatagacggcacatatgttttcacatcacccaaatataaaggtaaaatggtactacgtatctgttatcacttatcagatagccaccaaaagatcaaatttaggttgcaaaagaataccatggacagaacgatcccctccagagcttgactttgcagaaaaacatcacggaagttaagtggctcaccgcctatatctggatcgtaatacaaaacctacacatgcaaagggatcttcagaaagaattctgttggaaaaaggtcataaatacaacatatgaaattcgacgcagaatagtaatgcaaaagtcactgttaatgaaaaaccctttagcagaaaaagttaccctatactactacagattagcaatcttatctacttaagtaatacttttttttttatattctaaaatgcaggaggatgatatgatgacatcttcctctttctctttgacaaaaccagttaaggaacatataagattctaacgcagcaacactaaggatcacaatcatctctacttaattactagtcttgatattttacgatgtgggagaattgttaacttcttcttttcctcttatccaaaaaaaaaaaaagaataaaaataatacccattcacgtttctttgcttcatcagaagcaagttgttcctctgaactcaattgtttatcctttagagaactgtcagtagctctatcaatctccttaagcacacttagccatctagtaatcagcaatgccctttcttgacctctatatgagactgcagcttcttccaatctctgaattgtctgatgaacactcttataagccccaacaccctgcaaagttacagtccggattattcactctagtcctaaagtaatgcaactgttgtgtcataattacaactgtattgtaataaaagcccttaataccaaaatcaaaactggaatctagaaaaataagacccaaatactaattagaaatgggaataattaaaaggaaaggagaaattacaatgcggtcttggaacaatttggctccttcagcgacggcttggccagcgtgctggacgacggagtcggcatagtttttgacggttcgtgtgatgtttttgcggtttccgacctccacagccttattcacggccgttcgcagccacgacatattctcagcgatcttatggtctactagggaagaaacctcctcggggaacgaaaaccaattttagagacgactaattactgaaatgagagaactcggccaccgtccatcaaagtttttttttactcggtttaagtttgacgatttgcaggcgactaatatattatttcttttctgaaatgtagcttatttttactatgtaacgtttgtatattaaaccgatttaaataacgagtttatgtataagtattttgttaaaaatgtaaaaaaaataagatcaaaaacctaaactatttttgtgaatactataaaacctctaaaacatttaagtcgttttcttcttcacataacaaataaccataaaatgaagttaaaaaaacaatatgtgaaaaatatggaatttggtggcaaagaaatgaatagtggagttgagaaaaaaaatgatcttctaaagaattttctaactattgaaattaaacttctaattttcgtagtagattacatgatcgagaatatataccaaaaaaattgaagaaatcatagctttcatgacatgaaagatccttgatgagaattaaaattctaatttaaaattaatttaccaatgaaaaaaattaattaattagtttgtcatagttgtgaaatgcaatctcaattatagatagtaaacacaagttttttcttataataattttcttatgaagatactatataaataattaattatttttaaaaataaataatattaatttagattatatattttatagttggtaaatgttaaaataaaatcttcatatctatttttttggtaaaaaaaacaaaacatgtaaatgtttttaaacgttgcccaaaaaaaaaaaaggtaaatgttttgactaaaaaatatccaatcgaaacttgggtcggatctcggatagttttatccaccctaaacagagacggcagctcataactcaatcagccataaaggccaaagaagggcccaccttttagatacacacaatcgtcgcactctcagattcttctccggagcgatcagatttcaccgacgacggttgtttttgcctcctctttcaatcagaggaagccaaagcttagagcaacagttgtaaatctatatatagagagggagagagagagagagagctcctctcgtccagtattagggttttaaaggcaagaactactagaacaagagaaggtacaaaaaaaaatgtcgggcctccatcgatcatcaagttcatcgaagaacatcggaaattgccttccctccaaagaactccttgatgatctttgcaggtaatttcatcaatcgagtgtttttcttcttttttctgtggatagtgaagcgattgggctcgaattgattttcggtaactgatgctttgtgatggggttttgtttcagtcgatttgttttgaatgtccctgaagaagatcaacagtcattcgagagaattttgtttctggtggagtatgcttattggtactatgaagataatgctgtagagaatgatccaaagcttaagtccctgtctttgaaagagtttacttcgctctgtatccttcattgccttctgattcattattctgtgttcaatttcttgtcttcactgtttagtacaatgctcgttaatgataggactatgatctcatatgctcgaagcataaatgatttgtgtttgccacatagactgggcttctctttgtcttttccattgttttctgtggatatttttccttgacgtggcctatagtattcaacagctgtgatgtgttgagaccttatgttactcacattgatgatatctttaaagacttcacttcttacaagtgtcgagttccagtcactggggcaattatcctggatgagacatatgaaagggtaagaaccctgtggggtgatatttaggtttacttattagttaatgcttaccctttttgtttcattgtcattttcagtgcctgttggtgaagggatggaaaggatcgagctggagctttccccgcggaaaaaagagcaaggatgaagaagaccatgcttgtgccatacgtgaggttagtatcaattctgttgtttcctgtctcttttgtgtttcatttattttacacttttgtagcaaaattgatatctccaacaaccgccactcattgatcatagtgcatattaataaagaacactatgtaattagaagaagaccgcttattgggttagattaacctcacttagtggatgcattggttctactttagtggttgttgacatatgaaaatgtgtcaacataatgtgcgcatgaattttttttagtatagatgacggaggtcaaagaatagcaaatagaacgtctcttatatcttctgctcttgaaacagagtaactcattttcacactaatttaacagtttgatcataacacatacaccttacgtactgaaaatagattctcctacgtgataattgaggaagaaaaaatgttcttaggtcaccagtagacagaatcttttgcaaatgagaatagtgctgctgtcaatggtcaactatataggctctctgtatctttttactatttcattggtatggaaatggtcaaaggtttaattgtagctctctagtgctattctcctggtgaatgtagcatttcaggtgctgtaattcttcttctgattgtttgtatagacttggaatatgggttaatgttgaaaaaaaactgaatattttgtcacacttcttatgtattgttcttccatgctaaattacaggtcttagaggaaactggatttgatgtctcaaagctactcaagagagaagaatatatagagtttgttttcaggcagcaaagagtacgactttacattgttgctggggtgacagaagatacagtttttgcaccacttacaaagaaggaaatcagtgtgcgtatttaacaattaacttgtggatctgatcttgtctgtgtatgtatgatgagtctcttatcttcttttgttgtggaatacttgtaggaaatcacatggcatcggcttgatcatcttcagccagcaagtaatgaggtgataactcatggagtttctggtctcaaattgtacatggtggcacctttcctttcgtgagtagtggctctctaatttatacacatagatttttgggtgattttcgtgttttggttcataacaagagagattacaaacttgtgcaggtcattgaagtcgtggatattaaagcatccttcacctgtagcacggagacctaacaagccccttaaaggtttgacgtctttttctcaagcattcattaaaagagaggtttttggtagagatctgactatatatgctttgtacagcactctgcgtgtggaatgcaaggactagtgttggagggaacgggacagcaacagtggaaagccaaaatagaaagtctgaactcaggacaacaacaatggaaagcaacagtagaaagcctgaactcaagagaacaacaatggaaagccacagtacaaagcctgaactcaggaaaggaacaatggaaagccacaatacaacagcaacagtagaaagccacaatacaaagcctgtagtcgaccattctcaggacataaaacctggtggcagtttcataaacttcaagttcaaccagtcagttatcttacaggcgttggaatctggtaattcagcttgactggtcagtttgtcacatatcggttggattggtgttgggagtaatgatgcggttggattggtgggtttgtctatagcaaaaccgttggatatgttcatacacgctggtagctttctatttctttgccatttggtttatatacctctcgtttcttctagaatgaaagggttgttgtaaatgatgttagtagggaagtggtgaatcctttggatcatggctttagatgacaatgttacgaccagctataaaggttaaaagagtttcttatccgagtagtgaatcgatgatcttctttatagcgccctctaactgcttaatcgaagcagaaagtgtttttctttttagaataaaaaatgaactcacctataaaacaaaaagtcgcacctaaataagtgaagtttatgtaatactatgattaccttggaaacaagagatatctcgagattgtttagtttttttcacattgtaatttgttagtataaaaggtgggtgggggaatggtggcctaaattcggcaagggtggcctaaaaaatacatttgattgctatacgaaaacattttaaagaaacagaaactgacaagtggcattttgtgttttacacttttacttgcttgtgtttaggtttggaggttcatctacataagcatcagcattgtgactttgactctccccatcaaaattaatcctaaaaatcaaagcatgttaaacagcccaaccacattgagaattttatctataaatagaattagaaattaaatccttggttaaacccataactcttctttcctcttttcttctccggctaacggtagttttgacgccgttagtttttcctccgtctattgatttttcccgcttcacaatcgcaacaaacccaaagaagaatgtctcgtgtggtcgcagcggacgacaatatggcgttgccgttcttctcgccggagtttggcaatgtctcaggcgcgtcgtcttctccaacaacgttcgcacagctcttgcaaaacgtcgacgactccacgcgtcgtagtcaccaccagcatcacgttgatgtggatctcgcctcgccggaccaatccgtaccgttcgttctctcgttcactgatctcacttacagcgtcaaagttcgccggaagttcacatggagacgcagtgtttcttcagatcctggagctccgtctgaggggatcttctcttccaagacgaagacgctcctcaacggaatcaccggagaagctagagacggagagatactagctgtgctcggagcaagtggctctggaaaatcgacgctgatcgatgcgttagcgaatcgaatcgctaaaggaagcttgaaaggaaatgtaactctaaacggagaagttctcaattcgaaaatgcagaaagcgatctcagcttatgtgatgcaagacgatcttctttttccgatgcttacagttgaagaaaccttaatgttcgctgccgagtttcgtctcccgcgaagcctttcgaaatcaaagaagtctctccgtgtccaagccttgattgatcagttaggacttagaaacgcggcgaatacggtgatcggagatgaaggacaccgtggaatctctggaggagagcgacggcgagtttcaatcgggatcgatatcatccacgatccgattctgcttttcctcgatgaaccaacttcgggtctggactctacaagtgctctaagtgttattaaggttcttaaacgaatcgctcagagtggaagtatggtgatcatgactcttcatcaacctagttaccgtcttcttcgattgcttgatcgtcttctcttcttgtcccgtggccaaactgtcttcagcggatcgcctgcgatgctaccgcgcttcttcgcagagtttggccatccaattcctgaacatgagaaccgcaccgagttcgctttggatttgatacgtgagctggaaggatcagctggtggaacaagaagtttagttgaattcaacaaagggtttagacagaggaaagcagagccaagaagtcagactggcttgtccttaaaagaagccatcagcgcaagtatctctaaaggcaagctcgtctctggagcgaccacaacaactcatagctctggctcgagccctgtttccactattccaactttcgcgaacccgttttgggtcgaactcgcggttctagccaaacggtccatgactaattctcgcagacagcctgaactattcgggatacgcctaggagctgttttagtcactggattcatcttagccactatgttttggcagctagataactcccctaaaggagtccaagaacgtcttggatgcttcgcttttgcaatgtccacaacgttctacacttgcgcagatgctctccctgttttcctccaagaacgtttcattttcatgagagaaactgcttacaacgcttaccgaagatcctcctatgtactatctcactctcttgttgccctcccttccttgatcatcctctcgcttgcttttgcagcgatcacattttggggtgtgggtttagatggaggtcttatgggtttcctcttctacttcctagtaatcttagcctctttctgggcaggaagctcattcgtcaccttcttatcaggcgttgtcccacacgttatgctcggttacaccattgttgtagccattttagcctatttcttgcttttcagtggattcttcatcaaccgagatcgaatccctggctactggatctggttccattacatttccttagtcaagtatccttatgaggctgtgctcctaaacgaattcggtgacccaacaaagtgtttcgtcagaggagttcagatattcgacaacacacctctggtcgcggtgcctcaggggatgaaagttaggcttctagcaactatgagcaaatcacttggaatgaggatcacaagctctacttgcttgaccacaggatatgacattttgcagcaacaaggcgttacggatctcaccaaatggaattgcttgtgggtcacggtcgcttggggcttcttctttcgaatcttgttctacttttctctgcttttgggtagcaagaacaagaggaggtaaaaacaaaactcagtttgatcttatggaggactggtttgaaacttgatttacctttgtttgttttctgtatttttcttttatctctttgttgtatattcttatatatgtggttgataaattgttgaattggagcccaactacttgctatttatttgaattataaattggaagactctgaaaagaaaagactataaatgtgtgtagaatatttggcttgtttgggtttgataagtaaaacaaattttacaactaaaaattgccaacttttttagtacaatagcaccttacacattccgtagaacacatcatatgacgtatgttgatggatttgccaaccatagtcaaggggaagcttagcctatagtctcgtcacttttagaacaccagcctctctaaacaacttcaatctcttgcttcagaaacatgaactatgtacaaactcatacacattccccaatcagattatgggttcctcttccggttcccaacactttcctcaacccctcattaataacatctactgattcaacctcgtaaaattcatctttcacatgcctacactggaaaagcaacaagatcaatcagaatcctttccctcaaatgcaacattaaagttcaaattcacttggaatgaggaaaaagataaggaaccatcaaacaccccattgggttcaaataggtagtgtacctttggccgtttccagtttgctctcgtccatggccagtaaatccagttctaccaaactgtacatgcttcaacatgataggtgataaagcttattattgggtcaaaacaataatagcaaacttactaacccttatttctcaaactcctttgtctctatcaactgaaaagtggctatgtcaacatttcaagcaagtttggtgtaggtggtgtacctttggtatcttggatatacctaaagccatattgatgacatcgtgttatgaatatccatcatctcgttcttcgcagatgcaactgaaagtcctaaaccaaataacagttataactcagccatatattggggttgttatggttctggcaagtccaacttcaagtagaacacacgagtgcttcggcaaagatacttgttcatcaagaacaaaacctgcacgtctctctggcctgaatagttctaccggtaaaaagtctggacccctgtattttaactagaggaaagtgtctcttctaacaacctaggctagccattcttcatcccctcatatccgttaaaccagtaacgttctacataagccggttgaggattactgagtgtagagaagactaaaaaaaccacatgtatttacaccatcttgcttcagttgtatacccattccaactcacagacagtgttacagtgcaaatgagaacaccggaaactgaatcacagcaagaaaggtaacaacatctagatgataccacaacagaagtgctatacatacacacagccaagcaatggccaagttcaaaactttttcgaacgatagagcagagtgttcctttacatcagtcattggaatgtccacaataatcagccactgaattgtctcggccatggcaaaatcacagaacttccgtttgatatctgatttactatcacttatcttcctggtcttagaaggttaaagcaaattgaatactaacctttattttaaaaaccatcaccaccgagctcatccggttgccaaattttactgttctttgaagtttcttcctcttccatattcttagttcttccagatgcattctcagttgagttcttattttctccatcaatttccattaaactcccttgttcttcaattttaatacgagggtcttgttggaacctcacagcatcagggtcattctctacattagtaggtgcacaaccatcattgttaaaagatggtctaaaagagctgctggtaccatcatgtctataaccaaatcgtcttctctcagcattaacatcaacaccaaatcgttcagaatgaatttgaccttcaaagaaatcatcactatagtcaaccctttctcgaggatccaagttattcatgtttccatggtttctatgtacaacatgatcagatggtttcctaaatgagttgccatctcttccataacctcgaccccttacataacctcggccccttgcataaccccggccccttccagcattcgatggtctatgcgagaaaggtggagaattgtgtcttctgacaaccatttctcttgaataaccagaatggtcaggcgagctcatcctctccactttgtaacctgagggtgatcttcgatgagaaaagtctgtatgcccactgaactcttcctgtgatctattcctgaaagacgaggatgaaccatctgatctttctcttgatctaactggagatcgtgaacgaaatccaggaaaatctcgtttggggttgtttacaaactttgttcgtcctcgagcaaaaccactccgacctcgatatggacgttggtgattcataaacagtggttctgtgttgttgcattgtaatccccttgtgaatttttcaccatctctaaatccgtgaaatgcagatgtatcctctttatttgttggtcctctattatatgaaaagctaggggatcttctcggaaaggagtgagcatatggtgtaactccatcatttgcaggccgtctccctctctgaaaattactcataaaagcaccaccccgacgagtgtttccatgattatcaaactcaaattctgcattcacaagatgagagtcatattgaattttagaaacaatgagctttgtttttccataaaaaaacttagataggactttactttttgtgtcctggtcatgcagattgctttctgtgttatcaggtaatctccttctgtcaggtatgaaatttaaccttgggcttctcataattctgccatggtacctctcacgcgagaatttgcaggattcatcactagcaaaagaaacaacaatggagaaattaaatacacaagctttcaataaagtacgaaaccaagaaaggatggaggtaagaaaagcgctcagaaatatcacctccctctgaaagtatattcccgcggttcgagtgggaaatcatgaaatctatctctttccattcggggtggcacaaagctgcctgaagcatctagtgccttaactggagatttaacctgagttaagtttataattcgactctgactaccgtcactgcactccataggagaatcattgtcaatagtagacatttctgccttgagtgaaactggactactgttatctactatttcagggttttcaatgccgcctgacactgtagagacacctgacgttccttcaccatcctgaactatccggccttcagtttcacctgatccatcaaatattctactttgaagttctggagaatgcctcttaatatgaacttcagtacttgccatttcgactaatttcaaacatgattcatcaacagtataattattaaacttaattgatgattaggtagagcatgctttaatatgtttattacctgtataaccaagaagtgcaggttgactccctttttcttccacatggttagaattatgaaagtggacatggcatggaacattaatgttcctttgttcagtttcagaaccaccacactcaggatgtgcaacctcattactttccgtgaaaacggcagctggtccttggaccttcccgtcatcgcacaaatttcttttgccaacttgctcctttattactctagatagatcataaccacgatctgattcaaacccataactgtataactgttcctctagctccttaccaggtaaagtaatcttctcttcatcatttctggaaagttcatcagttccacgagaattacaagggagttctttcgatatacaaggcttgcaatcatctagtattttctcttcagtcaaggaagtaacattcacacctgaagcattgaggttatgatctccatgaccagaataagtcgtgtaaactccaccatgtttcagcacttcgcgtaatttaccattagctaaactgctactctggcccgaattttcttttgatgtacagtcaggatcactctgaacgcctggaattattgtcattccactcaagggcattggtgcattgctgataccatttgaacaaggtaaatatttatccttctgatatggcgtagaacttgtaggtaaatcagggatctcatttgattgcattattggggtatggggatgattcaacattccatctttcctattgaaaacttctgattgagagaaggtatttggctcagcctttattgatataggaaccactgtcttcaaaatgccaaatgagggactatttccttggctgaatctgccaataccctcatgtttcagtcctttaatagatagcccgattggagaaacttgagtactctctgttgcctgcctaacactctcttcaatgatttctgacttcacagtcctaaggttcactgaacacacattcccagctcttgcctctgatgtggtagctggtagagaaggagatttctcaataggaggatatgaactgaggcctagactaagtgagcatgtgggattaacatgattatcaaactgcatcaacgtcaccttaggagaactaaatcctacactttccttctgtctttcagaaacagactttgtaatagcagtcgtatcacgacaacttgatctctctatgtcacgaagacttctgttactgtttaagaatgcaccacttgtgcgatctagagcatcttcccaaacatccatggtagtattcaaatcccaattttctctgttcaggccactgttgccagatttggtagaagtagaatctgtgttatgagcgggacaaactcccttgcttaatgacaaattcagttctgtaggctcttcattcttccaatatggagaattgtttttagtgttacaacttagctgtaaggaaacagtcttagcaccagaagatgcttctgtttgacactctcctctgagagtttccttgtcacctgtcttccggactatatcatgagtcttaagaacagttttttctactttcatccgagtttgatttgaggggacaacaagaccagcatgttcagcaccaacaggaagctttcccataggaaaatggattgaactgccaagtacgttagaactagaagggatgtcaaagcctgccaatggactggagtgaattggagaacttggcttctcaaatttcactctagtttggtcaaaaactatgttcccaatgctcttccctttaccagaaattcccacaggaacagatggtaatgaagaggttggttctcgaccagtcattttctgagtttcgtcagcatgagcactcctagtatcaccttgctcattaggttgtggaatctgagtggagacagcttcttccatttgcggctgaacaaggtacttcctcttcttgattggaatatcactgcagctccatgtagatggtctgatcctaggctgaatgagacagaggaaaaacacatcaatatgggaatctcaaaaaaatgtccgaagagttaaagtggggaataaacacctcttggcttccagacatagttgaacttcgagggtcctaataaaaatcaaaacttcactcttgtacctttttacaggctaactccaactaacacacctacaagatcaatatcattataaagcagagaaaaaggcaaaagaagaattcaaattcaaatggatttcagatgaaacaaacataaatcccacaaggtatctatctaactagaccctaatagacgcaagtaaacagtgaatccagagatcaacaaggcccctatagaaaggaagaacaatcaagaagaaaaaaatgaagtcaacgataagattacaaaaaaagtaaatcagaaagtaatatggttagtggagaaaaatctgaaaaagtatccaaaaaaggattgaatccaatacgtaaaaacaagatcgaagctagttacgtaagactcacagagcagagagaagagtaatcaaagaattagaggttcgcaaatctaccgacaaaaacaaaataagtgtgaaagagaataagaaatccagatttagggaagaaagagaaaggtgttaggggagagagaagaatctaccaaaagaaggaagagtgatggagaggtttgagtgataatggatgatgaggatgatgatgcagtttccaggaaaattaaataaaaagtacagtttagatatgaaatatatgaagagaaggctacacagagaaagagagagatgctaaactttgacaagggccacacaactctgcagcagcaactttgcctctttataacacagtttgactcatccacccttttttttttttacacggctttttcaagaattatttataaatattcggatttataaaatcgattcagcgaattataataaagatttgtataagactgtagtttttcagaatttttgaaaatcattattacatggttatatgtctatatgtttaaatttagtgttctcatttaagttttgctgactaaacagttgtggtccttgtctcaaaacaaaatccattcattttttttataattatgatgtttttttttttttttgtcatccaaaattagttaggactcaaacaaaataaatattaaatcttatgattattgaaaattaagaaattatatttatttctaaagtgaaaaataaataaagattgagtatatactgtactttattgcgccgtcgccggactaaatatatgggtgtggtcatgccggcttaatccgattagtatgcctaggtttaatttcacactaatccggaattaactcacttactttttctgctctggtccatggttttgataatgggccttatgaattctttccgtaatgggttttgactaataaaatattttttggtgaaaagagctagctccacatttaagagagcaactactatattgaccagtcaaatatctcctacatttattagtattactgtggaatattgaaaaataatatcaagaatttagtcatttaccaaaatgagccagatattttaccgtaaacacaaagttacaaaagaaaagaagaaagagagagagagagtcaggcgttacagaaataaagggaaaaacgaaagttgcaaaattttagtaacagctaactcctgcaaacaaaacaaaagcttcgtctgtatctatctctcccttcagactcggtctcacccctacttctccgatacaaccaaaacccaaaattaatttattcccattatcaacccatatgtttatggggttttgatgatcaaccattttgcaacacttttagatttgcggaaaaaccaaagagttgaagtgaaagaacaaagatggctagcttgaaactgggttccaaatctgaagtctttcatcttagtggtcacacatggtcagtcttcttcttcttcttcaatcgcttaaatcattcactaacaaaacaaaacgtttcatctccttttgtaatctgatcaggctttgcaagactggtcttaagcccgatgttatgatccaagtcgtagacgaaagcttccatctccataaggtaccaattctaatcgactcaaaactcttttgaatttctaaactcatacgttcacttttttaacttgtcttgttttcaacatcagtttcctttgttgtcaagaagtggatatctagaaactctgttcagcaaagcctctgagacaacttgtgttgctcagcttcatgacattcccggtggtcctgaaacattcttgcttgtagctaagttttgttacggtgtaagaattgaggtcacacctgaaaacgctgtgagtctcagatgtgcagcagagtatctccaaatgagtgaaaactatggagatgcaaatctcatctatctcactgagagtttcctcaacgatcacgtattcgtaaactgggaagattccatcaaggccctggagaaatcatgcgaaccaaaagtgttgcctctcgctgaagagcttcacattgtttctaggtgcattggttctttagccatgaaggcttgtgcagaggacaacacaagttttttcaactggccaatctcactacctgaaggaaccactactactactatatattggaacggaatacaaacaaaggccacgagcgaaaactggtggttcaacgatgtatcatcgttcctagatttaccaatgtacaaaaggttcatcaaaactgttgaatccagaggcgtaaatgcgggtatcatagcagcatctgtcacacattacgccaaacggaatcttcctttacttggttgttctaggaaatctggttctccttcagaggaagggactaactatggagatgacatgtactattcacatgaagaacaacgaagtctccttgaggaaatcgtggaacttctcccgggcaaaaagtgcgttacatcgacaaaattcttgctcaggcttcttaggacatcaatggttctgcacgcgagtcaggtcactcaggagactctggagaagagaattggaatgcagctagacgaagctgctctagaggatttactaataccaaacatgaaatactcaggtgaaacactctatgatactgactctgtccagaggattcttgatcacttcatgttgacgtttgattcaagtattgttgaggagaagcaaatgatgggagattctcatcctcttaagtccatcacaaaggttgctagtctgatagacggctacttagcagaggtggcgtccgatgagaacttgaaactatcgaaatttcaagcacttggtgctctaatcccggaagacgtgagaccaatggatgacggtatctaccgtgcaatagatatatacataaaggtaaactacttaacctaaatcttcaatggtttcaaagttactatgagttgcttgcttcttaagtatcatattagtcttttagataatgcatgtatgatgtatctaatttggagctatatcaggctcatccatggctaacagagtcagagagagaacagttgtgcctgcttatgaattgtcagaaactgtcattggaggcatgcacacacgcagcacaaaacgagcgtctaccattgcgggtcatagtacaagtcctgttctttgaacagatgcggcttcggacatctatagcaggatggttattcggctcggaggaaaacaatgacacaagcggcgcgttagaaggaaacaagaacacaaacgcaaatatggtgatgcatgggatgagagaacgcgtattcgagcttgaaaaagaatgtatgagcatgaagcaagatcttgataagcttgtcaagacaaaagaaggacgcaacttcttctctaagatattcggatcaagatctaagactaagacttcaccatgcggtaaaggaggtgaggacgctctagtgattcctgaaaccaaaaattgatggagaagagaaatgactaataacgacagttatatgatatggtcttaagacactttgatcacttttgttcttgaattttacatgttttgcctttttcttttatgcaattcttgcttgcttatagggtttgaaagactacatgcggacagtaaaactattttttaggtatgatagaaaaaattggtcttctagtgaatagaaagtggtcactgtaaccattcaaatctttcaatatgcatccaagaattttctaaaaatcttgttcatctcacaactatatatcaaaaatttactttgtcctagttattgggcctaagacccataaatactcggttacccaaaaaaaaaattctagatcctgaattctgatacactgccgttttttcaattctatcttcacaatgcttgtcgtttacacataacagcacgttgttagtccgtgaaataaacaaacggcacgcataaaccccaatactcaaacaagtattaataattctgctattaggcagagagagggcggctctgttgttgatcttcttctccggtgactcttactctctgtgtaaaaaagcaaaatgatgcgttccgttgacgtctacgtgaaaactctaggccctcccgtccgttcaattctctactcgatctttacctctcagcaaaaaccttcgtcgctgccttcgcttccatttcacttttcgttgcgttcgtcgtcgaatattcccactcgttgtttctccaatgtcgttgcgaaatccaattctccgatttacgattttcaaggattccgaaatctcttcactgagagggctatctcttcgtctacgacgacccccgtcgcttctgctcagccgcagcagcttcagaatcagaatcagcatccagctgaggttgatgaagagatttctatgggcttagaggacgaagccaagctttctattcctgtgcgagcttatttcttctccactaggtataattttgttcacaaactttaaaagtggatgtatttgccaatgtgttttgatgattgaagtagtttttggattgtaaattgtgtgcagcgttgatttgagaagcttaatagagcagaacaagcagaacttcatcccacctacttcgcgtatgactaactatgttgttcttaagtttggcaatcattctgatcccactgtaagttcaatcttatacctttattcagttttatgaagctgaggtaccttctcattgtgaaatgttgattcttctatggattgtttcaggatactactcgaggacgcataagtgggagtgagtctatttacatggtagtatttcattatggatcgattgtcttgtttaatgtaagggaacatgaggttgatgaatatcttaaagtagtggagaggcatgcctctgggttgcttccagaaatgagaaaagatggtgagttgcttgcttttcttttgcgctgtgtgctgttttcgcaatgttgcttactttctcatatctctggttctgtaaaactgtagaatatgaagtaagagagaatccaaatctggacacatggatggaggtaggacgggattttatcaggttgcagttcttgaatactgatgggatcagaaccataggatgtgttctgggccagagtattgctctggattactatggccggcaggtaaccatgtcaaatccttacacattgtattctggaatgtggaaaaatgaaaagagatataactgtgtgtgagcaatctgtttctgttataggttgatggtatggtagcagaatttactgagataaaccgtcagttggagataacaggaacgtttacaatgaaaaggaaaaagctgttccagttggttggaaaggctaatgtgattctggctgatgtgattctgaagcttggtctttttgagaggtaaagaaggaagaagactcgatgcctatctcagactagttttgtggataattgcgactgacttgtgttttgggaaaattgcaggtcagatatagcttggaaggatgcgaaatatggtcagatatgggagtttctgagagatgaatttgaactgacacagagttttgcaaaccttgattataagctcaagtttgtagaggtattattattattatcatccacacaatctttctcctatttttcgttgtgtcggaaaataataataattattggtggttttgcagcacaacgttcgtttccttcaagaaatacttcagaacaggaaatcagctactctggagtggctaatcattatcctgattagtatggagatcgcgatttctttctataatatgtctcgggcatccttgtgatcgagatcatcctctgccatttctaaagcatattcatattctttattatggttaccacttttcttcacaatgcaaagtgataactttataacaaagctcataaataagaatgagtttaggagttaggactacgtttgttacagattctctttgcatttaagagcctgcttcttttcagtccaacaagacttggttatgcatataaaatcatttatttcacaggtgcaagccttcttttaatttcaatttcaatgtagtgttgttatattaataaaagtgaaattacgaagcaaaatgaggttttgaactatgagaataaggattgagaaatgttttctaatgaaaacttatatacaccaagtaaaataaggagtcattgcataaagaaagagaagaagggtaaataaaatgaaagatgtactcgaaggtgacgaaaaaaaaagtccatgcaaaatagaagtcatccacacaacaacatacaataatatcgaataccaccaaataaagttccaaaaagaaatgataaaggtacacacaactcctcaagttcaaacaagaagtatgatacaataaaaactagagagcaactccataggatggggcaagattattattaatggaggatctgggaatgtattttcgagcccaaacatgttttccattaatggtgtacttgttcctttcgatcccatcacttacaatctccggtatcatggctgcagaatgtaacaccatctttgcatacagcgcctgctcattcccttcccctccaggcatgattatcgcttctataatctctccaaatctccttcaacacccaaacacacacaccatttaaacactccactactatgtatatgcatgccttatatataaaggttttagtagtacctggtgaagtaggcatgcacttcagcttcagaaagcgggtatcctctagaaaatgtgaggaagacagtcctgtcgtcttcccttgcttgctcatcctcagagaatacaccaaccttgcttgttcttgttgttgcttgttgttcacttaagaactggctacttgatccagctttatgaacagccttgctaaaccccaagtgcttcatatcctctatcaccttttccttctcagcttgcacgcatatatcctcaaaagctgggtaacatatactggttaaatgcttcttcatgtcaagaagaatgctttcacggttctggtggatgactgcgagagtaaggtactctccagtcatccgcgtgatcaaaggtatgatttttttcccaaagttggcaacaaacatagagaaattttcgtaggacaaacaactcagacacataacaacttcgtcagccactgtgttgatgaagaaatcaggtaaagaattaaagttgacgattaggttgcttacaagaccacttttctcgagatagaggagaaagctcatgacctggagagactgattaatgtctcgccttagtcgcacgacaaaacggcggaaaagggctctgtcacacttgtggaaagcattgaactcgtctcgcgtcacggctactgcagatgaagatgaagccattagttagtctttgcaacgcaggtatgagattatctggtgatactgataagtgatgaaaagatagatataagtaagagtgattaaaaggaatttactgaaatgttgaatatgtaaatctggacagacattgttttctttataaagagacccaattattcatgaaccaatgtctattcttattttttcttgaattgtcctatccattcctatttatactctgtcttatatttagctattttcatgtttccatattattttattttctgtcttcttgatactagttttaaacattcctatgtattgtttcttggagtccagttgtacagcattttatttatactatatggtctattcatatatggccaagcaatttcttctctatgtcatttaaataaacttttccaaggatgttttgttccatattgtttggtttcagaggctcaaagacttattgactttcttgagcttaaaccttagcaaaccaagactgaagtagtttgatgcaaaacagagtccaacacatggaaatgaaacataatatatgcagagaaaagaacagagactttgataggagaaaggtgagaaaggaagagagaacacacataatatttatgctaaagtctgggccgagtcacatctcggaatccactagaataagcaagttacaagagggaattccacagagaaagagtctcacacttgagatctcttctctgttacactctcaagagaaaaaccaaagattacacctttttaatggctatctctctctcttgcttgctttctacattgtatctctctcttgctcatttccctttgccacgttcacagcatagcttcatcttatatatacatgtgagaacaccttagatctagtgcttctccaaaacgctccactttgaattcacataaagacaaattgtcctttcttggcgcaaaagcatgactcaaccatagtttgtttacacttaactatagtttcattttcttcgcatataaaatccacacatatgaatatgatataagaaatggagatgaaagaagaagctccacaacattcatataaagtcagaaaatgtcagccaaaacattctcttattcacagagagatgatgtcgtttggtagaatactgtaatacacaaaaataaagttttaagttcatttacaagaagaaaggcttatatcccattgtttatcgatcgatcccttcgatcttgtcttccacctgcgagtacaattccttgagcttctctatgttttcagcggaagtgtcccagtagccacgaccattggcctccaagaaagtctgaagcattttcctgaaggagttgggattggtgttcatgagacggttcagcatctcctcgtcttggatgaaagttgagttggcctcctcgtagacccaattgtctacttgacctgacgttgcactccatcccacagtgttggacagtctcttctctatctcacgaactccttcatatccacttgacatcattccttcgtaccactttggattcagcagctttgttcttgcgtccagcctcactgtctcagatagtgtcctcacctgccagattcaacaaataccttaaggaatgtgttcttgcaaggtaaaactgatcccatatatgaactacaaagaaaattcactcacctgcgcgtttgcagttgtagtgtcagcaatgtaagagcttggtttcttcttatccttcctcaaactctgaactagatttgtagggtcagaatcgaagtagtggctcacatcagtcaaagaaatctctgaagaatccaggttctggaaggtgacttctgcagtgctaagagccatctcaaagacctgcttcttctcagccattcctgctccaggagcatcactatcaaacgcaaacgatttgcggctcaagtacatgtcctgaagctgtttctcatcgttccatgacgagttttcaacagcaagactgatgttggctgagtatgaccctgaagcgtttgagaaaactcttgtcgctgcctctctaatatcaatgccaagcgcctctgcttgttccaacgcgtgtttccttacaaaattttgctctacaggctcatctagctccgccaccatcttgatagctcggtcaagaaggttcatctgtcaagataattcaaggaagaaacaccatgagagaccaaccaacaagaatctaaatgaaagaagagagaaagcttttatctggttacctggttgataaagagatcacggaagacccctgagcagttaacaactacatcgatcctcggccttcctagttcttctaagctcacaggctcgacacggttcactcttccaaaagtatcagcaattggtctcacaccaatcatccaaagaacctgcccaagagactccccatatgttttgatgttgtcagttccccaaagaacaagcgcgattgtctcgggatatttcccttcgttttcgagcttctgtctctctaccaacctctcaaccacaatcttggcacttgccattgctgctgttgtgggaatagcctgaggatctaaggcatggatgtttttaccggttggtaagacctttgggtttctgatgggatcacctccggggccaggctcgacgtacttgccttccaaagcttgcattagactccctagttcgttgtccatgaccaccaacttcaggcactctccaaggaaaccaaacactgttctgagcttatctctgttcgccctgtagaacttggtgttggacaaatactcaacccatggctcattgattccaaacccaagaagcgaggtaagcttgtcagacacatccaccacctgtcctttgctatttgttgttttttccacaaaggcggaaacagcgccacgtgaggcatcagtgatctctttgagaagctctacatcgctcaagatacccttgtcgcttcctctgtaaacatcctctatctcccttccaacacactcagctaatatagaaggaagagctgaaatctcatcctccggacgatctagagcagcaatgttgaccagtgtggccacagcttccatggcggatggaggctctccaatgacgtgaagcccgcacggcaaaagccttgattcaatctccataatcttggaataaactttcccaaccacagaatctctgtctttaggtgacaactccaagccttcatctggaagatccacatccttatcaagattacattgcttagctgtgctgatgatggaactgacgatctgtggacctctccccgtgtccttcagagactgataggacgatatcagctcactcaactgcttcagccctttgtatagaccagcattctcagctggaggagtcaaataactgatggtgttggcataacttctcctctttgcaatggtagcttcagagggattgttagctgcataatagtagacattgggaatgttcccgataagactgtcgggaaaacaagcatcactcattcccacttgcttcccgggcataaactcgagagaaccatgtgttccaaaatgaagaacagcatcagctttgaagatcttttctacataagagtagtaagcagcaaaaccgtgatgaggacttgctgacttggagaaaagcagcctcatgggatcaccttcatacccaaatgttggttgcactccgatgaaaacattaccgtacgcttttccatagacaagaaggttctctccatctgagttaaggttccccggaggtttcccccagttttcttccagggcatttgcataaggagtgaggtcttggtactcacggactcccattttgtaagctacattgaggttagggctgctgaactgagcctccttgtcatgaatgatttcttcaataagagtctctgcattctcaggaaggccttcaacattgtagccatctctcttgaggtctcttaacaccgagaagatggaagcaaacacattgaggtaagctgcagtccctacattacctttatcaggtgggaaactgaaaacagtgattgccagcttcttctctgcctgcaatgagccagagttgattcatgagaacatacattacattcttgagaaagtcatgaaggaatgtgatttcactaaggatgagtggtaatacaataccttagtttttcttttgagctcaccccatcgaatcgctctgatgcagagttgctccactctcttgtggagagcatgtgacttccctgcagcaattggtaaaccacctccataagaaaacattcccactcttgcgtaatgacaatcatgaaaaatgcaatatggtcataagtggactaacctgttctagggtcacgaccagcgaaaacgattggctccatcgctccatcaagctcagggagggcaacctgcagagccacctggatgggatgcagaccaagtgtgctgtttagccattcctctgtcgtctggaacaccagtggtactgccacaaggtaaggaacatcgagctttttcagggcttcgatagccctgggatgatcctgccttgcaggtccaccaacaagagcaaaaccagtcaaggagacagcagagtttacgatgggctgtttcgacaccgggtctacgaaatatttctctactggaccagagaaatccaaccctcctgcgaatataggaacgaccttagcacctctagcctcaagctccatgataacagccacatagtgactatcatcaccagtcacaatgtgactcctctgcaagactaaaccgacaaccgttgcatctttcctcttgagtgagtcattggtgtcccttctagtgtcataccagttccagtactccttcacatcatcgtacatggttggagcaagtggatgccaaattccagtatccaagaacaaaaccggatccgaatactcgattttgacacctttcaaagccggaacataagatccagaaatcatcttaacaaaattctgaagattatcaggagagcctccaagccaaaactgtaaactcaagatgtagagacgagcatcttgagccttgtcactaggtaagtacttcaaaaccttaggcaaagtcctaacaagcttcaacatactatcggcaaaaccagcagagccttgtttcttcctcttgaagagttggaaaaacggagactttgactgacccaattgagacatactaaaagatccaagcttgttcagtctcattacctcaggcattgaagggaagacaagaactgcgtccatcctgtctctctccttctccaccgcatccttaactttaatcgccaattcctcgacgaagatcagagaaccaatgaagatgttggcgtctttaaggtcttcgcagaagttgttgtaagtgttcttgtctctaagctcctcgaccaagtatccaaccacttcgtaggatgcgaatctcgaagtcttgttgagagattgcacggcttcactgagagaagactggtactgagcctcgaggacgacgtagacgattttcaccgtcggaacgttgtctctcttgatcggaactatacgacggacctccgggttcgtctgtgtgaagaggccgtttccagatacagcagatttcaccttgaagaaagatttggctggtttggttgatctgtgtttcttccggaggaaagaatgtttggtactgttagtgagcgaagagagatgctctgctttagaagtggatagagtgaatggagaatacacaagcgaagccattttgcggctgctggattctccaaacgttgaattcgaagaggagaggataggagaagagatgaatcgttttttgttggttgtctcttacactttttgagctccaagtgggagtttatgattctctcatcggtaaacgcttcggaccaaggaactaaaaaagaagcgttggttttgaaggtaagtggtgagagggaaggacacgtggacgaatagttacggaagaagggagagtctacttgtgaggttgagttttgtcggatgtatatccgcttgggacaatgagatggactttgctggcctctgattggctcattgagatttctattcatattttcatggtttgggagtgtggatattgagtgtcttattttctttacttatttgacaagtatttttatgttgctctcttgaagatcgtatttgcggtttcagccatgtaaaagattcttttccgatgacgacacttttactaggcatattcgtcgggtagccggtttaatccggtctagattttgtataatttttggttcagctaggtctggtttgatatttttctacttatttcttaaaaactggctttaatcttttaaggtaaactcaggatttttctttgaaaacgaaatttgaaatatcagactcataacaattgtaacaacaaatgtaaaagttaaaacactctaaaatgtactcaaaattttgatcatcatcatcactattttttttataataaatggatgtaaaaacttatcatgtttcaatatttaaaacttttttttttttcaatatttaaaacttacataaaatatataattaaaagaaagtttatgaattagaatattaagttatatgtaattaaatggagcaatacatgtagcctactagtattgttgttgcatgagttgcatcatattcgaagatatacaatatgtttttttgatataagagtaccgcttcattctcttttttttttttgtcatttcccaagtgtaatattgttattaatacatgggctatactaaaagccccacgaaaagtttactgaactatttgaggcccaacaagagcctatcggattaacgcctactgcagaagaaaatctgtctgcactccacccaagaaaacgcagactaattaatgaaatcaacgaaacggataggtcgggtctaaggttgaccatgaaccgcaacctgaaccaggagcaaagtggtcaagttttgccatccggtccgagtcccttggaggaataataccagaacagaaaaaaacagaaaagtcgacaataaacaaaagagacaaatttgatttgattggttccagaaattcgcagagaaacagctctttgtctctctcgactgatctaacaatccctaatctgtgttctaaattcctggacgagatttgacaaagtccgtatagcttaacctggtttaatttcaagtgacagatatgccccttattcatcggaaaaagccgacggagaaaccatcgacgccgccatctgaagaggtggtgcacgatgaggattcgcaaaagaaaccacacgaatcttccaaatcccaccataagaaatcgaacggaggagggaagtggtcgtgcatcgattcttgttgttggttcattgggtgtgtgtgtgtaacctggtggtttcttctcttcctttacaacgcaatgcctgcgagcttccctcagtatgtaacggagcgaatcacgggtcctttgcctgacccgcccggtgttaagctcaaaaaagaaggtcttaaggcgaaacatcctgttgtcttcattcctgggattgtcaccggtgggctcgagctttgggaaggcaaacaatgcgctgatggtttatttagaaaacgtttgtggggtggaacttttggtgaagtctacaaaaggtgagctcaacaattctcactcttcctttatattgggatttggattggatctgatgagatcacgcacttgttgcttcttcaacatcactcaaactttaattccatgtttgtctgtcttactctttacttttttttttttttgatgtgaaacgctattttcttaagagactatttctgtatgtgtaaggtaagcgttccaaggacgtaattggcttggactatttctgtttgattgttaactttaggatataaaatagctgccttggaatttcaagtcatcttattgccaaatctgttgctagacatgccctagagtccgttcataacaagttacttcctttactgtcgttgcgtgtagatttagctttgtgtagcgtataatgaagtagtgttttatgttttgttgggaatagagaagttctaactacatctgtggaaagtgtgttcaggctgtgatagaggactgttgctttattattcaactatgtatatgtgtaattaaagctagttcctttttgatctttcagctcaatgtgcttttctcaatttttttctcaatttcaaagtttcacatcgagtttattcacatgtcttgaatttcgtccatcctcgttctgttatccagctttgaactcctcccgaccctgctatggatatattaaaaaaaaagtgttttgtgggttgcatctttgttacgatctgcatcttcttctttcggctcagtgttcatgtttttgctatggtagagatgggcaatgttattgttgatggtaacagtggtatagttgatagtatcttaactaatcaattatctctttgattcaggcctctatgttgggtggaacacatgtcacttgacaatgaaactgggttggatccagctggtattagagttcgagctgtatcaggactcgtggctgctgactactttgctcctggctactttgtctgggcagtgctgattgctaaccttgcacatattggatatgaagagaaaaatatgtacatggctgcatatgactggcggctttcgtttcagaacacagaggttcttttctcatcgttctttctattattctgttccatgttacgtttctttcttcattacttaaggcttaaatatgtttcatgttgaattaataggtacgtgatcagactcttagccgtatgaaaagtaatatagagttgatggtttctaccaacggtggaaaaaaagcagttatagttccgcattccatgggggtcttgtattttctacattttatgaagtgggttgaggcaccagctcctctgggtggcgggggtgggccagattggtgtgcaaagtatattaaggcggtgatgaacattggtggaccatttcttggtgttccaaaagctgttgcagggcttttctctgctgaagcaaaggatgttgcagttgccaggtattgaatatctgcttatacttttgatgatcagaaccttggctctggaactcaaagttattctactaaatatcaattctaataacattgctatattatcgctgcaactgacattggttgattatttttgctgcttatgtaactgaaactctcttgagattagacaaatgatgaattgataattcttacgcattgctctgtgatgaccagtttcttagcttcgacgataacatttgtcatactgtcttttggagggcattgaattttgctatggaaagcgctggagcttccatgcttgcattctttaccaattagcgttattctgcttctttcaattttcttgtatatgcatctatggtcttttatttcttcttaattaaagactcgttggattagttgctctattagtcacttggttccttaatatagaactttactttcttcgaaaattgcagagcgattgccccaggattcttagacaccgatatatttagacttcagaccttgcagcatgtaatgagaatgacacgcacatgggactcaacaatgtctatgttaccgaagggaggtgacacgatatggggcgggcttgattggtcaccggagaaaggccacacctgttgtgggaaaaagcaaaagaacaacgaaacttgtggtgaagcaggtgaaaacggagtttccaagaaaagtcctgttaactatggaaggatgatatcttttgggaaagaagtagcagaggctgcgccatctgagattaataatattgattttcgagtaaggacatataaatcataataaaccttgtacattttgtgattgtatgatgaatatctgtacattttatctggtgaagggtgctgtcaaaggtcagagtatcccaaatcacacctgtcgtgacgtgtggacagagtaccatgacatgggaattgctgggatcaaagctatcgctgagtataaggtctacactgctggtgaagctatagatctactacattatgttgctcctaagatgatggcgcgtggtgccgctcatttctcttatggaattgctgatgatttggatgacaccaagtatcaagatcccaaatactggtcaaatccgttagagacaaagtaagtgatttcttgattccaactgtatccttcgtcctgatgcattatcagtctttttgttttcggtcttgttggatatggttttcagctcaaagcttacaaagctgtttctgagcctttctcaaaaaggcttgctcagtaatattgaggtgctaaagttgatacatgtgactcttgcttataaatcctccgtttggtttgttctgctttttcagattaccgaatgctcctgagatggaaatctactcattatacggagtggggataccaacggaacgagcatacgtatacaagcttaaccagtctcccgacagttgcatcccctttcagatattcacttctgctcacgaggaggacgaagatagctgtctgaaagcaggagtttacaatgtggatggggatgaaacagtacccgtcctaagtgccgggtacatgtgtgcaaaagcgtggcgtggcaagacaagattcaacccttccggaatcaagacttatataagagaatacaatcactctccgccggctaacctgttggaagggcgcgggacgcagagtggtgcccatgttgatatcatgggaaactttgctttgatcgaagatatcatgagggttgccgccggaggtaacgggtctgatataggacatgaccaggtccactctggcatatttgaatggtcggagcgtattgacctgaagctgtgaatatcatgatctctttaagctgtcctgtcagcttatgtgaatccaatactttgaaagagagatcatcatcaattcatcatcatcgtcatcatcatgatgctcaactcacaaagaagcctgagaatgatactttggtgcgaaattctcaatacctctttaatattcttattgaatgtaaattatacaatcctatctaatgtttgaacgataacacaaaacttgctgcgccatgtttgtttgtcttgtcaaaagcatcaatttgtgggttatacgtagtgtagaggatgattcaaatttgtgataaatttggtaatcaaagttaattctgaaaatgcaacaccacatgaactatgtcactaaggcctagaagatcgttatcagtaatagactaatagctcgccaccatgtatgtgaagttgggaatcgataagtcggaagagtgagagacgtggcttaacctggtccctctaaatccatacgatcgcttaatgaaatcctcggaataaaacagcagcttctcctctccaaccaaataaaatcctttaagctcccctctctctcccattctcttctcccttttctctgtttcgcggcggagaaaattgaaatggagctcagcttgagcacttcctccgcttctcctgcggttttgaggagacaagcttctcctctgcttcacaagcagcaagtgctcggcgtcagctttgcttccgcgctcaaacctggaggaggagctcttcgatttccttcccgccgtccgcttcctcgtcccatcacttgctccgcctctccatcaactgccgaaccagcctccggttattttttactctctcttatctcttccgatagttttattactggaaattgatttcgtttttgtcgagttaagtcagtttgaaataagaaaactagtcaatcaaagttctaagaattatcacacgtaggttagtttcaatatatatatgtattttggtggttgattggttctctaaataaaatcactcttgttatgttatgccagtagaggtgaagaagaagcagttggataggagggataacgtgaggaatatcgcaatcgttgcacatgttgatcatggcaaaactactttggttgattctatgcttaggcaagctaaggtaacaccttaaacgcatataatggcattgggcaacttgagaaagtttttcttaacccatgccttactttgcaggttttccgagataaccaagtcatgcaagagaggatcatggactcaaatgaccttgagcgtgaaagaggaatcactattcttagcaaaaatacctccatcacttacaaaaacactaaagtaaatattatagatactcctggccattctgactttgggggtgaagtggagcgtgtcttgaacatggttgatggagtgcttcttgtggtaatatgttgctttctctcaatgttttagaattaactgtttagtcctgtatttctcattttaatttttctctcctcaatttcttaggtggactctgttgagggaccaatgccccagacaaggtttgttttaaagaaggctcttgagtttggacatgcagtggtcgtggtcgtaaacaagattgacaggccttctgctcgtcctgaatttgttgtcaattccacttttgaactatttattgaactaaatgcaacagatgaacaggtattgttcatttgggtttgtctatcctttctttggtatttcgccgcgtgacttatataccttgagtatatttatatgacactaacctcaatgatatttctgggtggcttgtagtgtgatttccaagcgatatatgctagtgggattaaaggaaaggcggggctttctccggatgaccttgcagaagacctgggacccctgttcgaagctataatcagatgcgtacctgggccaaatattgaaaaagatggtgcacttcagatgcttgtgagttattctgattttttactgtttcatgttttatgtgtttgttcccaactagtgccaaaaagctaacttgcatttagatttcctagccaaaaatctacacatcaaaaacttgtatctctcaccaactaaaagcagtcacttgctacaagcttcaaatcctagaatctaacgatccagtggcactctgagataatgaaaacaatttgtggcagtcaaattgatgaatttgtctcatctattccaaactaaagatcacgaagactttgcgtccttgcatatatggccataattaataaattgggatattcctcaaaccaaaatgtgaaagaaatttcaatataccagacagtctagttgaatggatattcacttgtatgaaactaatatactttttctttttgttcaggccacaaatattgagtatgatgagcataaaggacgcattgctattggacgactacacgcaggggtactgcgcaaaggaatggatgtcagggtaacattttgattatcttgaacttgttgctttgttatgggacagaaataatgtgggatcatagaaaaaatatcaccttaagctagtcaatctctcaagtctttacaccttgtagagcaggtggcctctgccaatatagcgtgtaaaagatagctaaatggtaagcaggacaagatattctcggacaaagtttctattaagtttcctaggtttctaattcattaaattttgtgatgaatacgtccaagacgtaattgaatgggggatggtaccaaaaccttaagaatcagcgagaatattatacaaactcaccaacttcttgcagtacttatatggtttatagtagacttactggggtataactttacaggtgtgcacttctgaagattcctgtagatttgcaagagttagtgagctttttgtatatgagaaattctacagagtacctactgattcagtggaagctggagatatttgcgctgtatgtggcatagacaacattcaggtacacacgtatatgcaatagataatttgatgccaaatgtgagaggctgttgtaactctggtggataatttctgccacttatcatttttctttttgttgctaattgagttgtaacaatagatttccttgtttaccctaaatttgcagattggggagactattgctgataaagtacatgggaagcctctacctacaatcaaagtagaagagccaactgtgaaaatgtccttctctgtaaacacctctccattttctggtcgtgaggtaggtctatttctgtcatgagctatcttactgtatttttcatgaatgcatggttacaagatattaagtgggaaatcattaactttgatgaggcaacattgtcgaccaaaaagaaaaggattagtgcaacaattgaattatcttttcttttctgtaggggaagtatgtaacaagcaggaacttacgagatcgtttaaaccgtgaacttgaaagaaatctagctatgaaagtggaagatggtgagacagcagacacattcattgttagtgggcgtggtacattacacattaccatcctgatagaaaacatgtaagtacttcggtgaccaccattcctttcatatttgaaattgatattagctgaacggtcatatgttccaggcgaagagaaggatatgaatttatggttggccccccgaaagttatcaacaaaagggttaacgataaattgctggagccatatgaggtgagtttctgactgaagctattagtttcctaccaaaggaattggcagcaacttttgaaaccatgatttcagtttgatttgaatatccttggtttaattgtcaactcattgaaaagaacttttgctttcgtgaatttaagtaaagacgccctatctaacttcaaatccaccaattcagatagcaactgttgaagtaccagaggctcacatggggcctgttgttgaacttcttggcaaaaggcgtggacagatgtttgatatgcagggtgttgggtatgtattgtttctcttgccattcctttattttatatgcaaggtgatgggtgtacataattcttctacctcttagtgatgatattgtgttaatactgctcgttttaatggtaacagttttatcgtgttgggagtaaactgattaagatatatagcggttatttttttggattgtttgtagcagcagtttggtgatattagatgactgtaaccatcatatgaatatacacaagacttgttactgctttgagaaccgtttggtcattttctcaagcggggccatgcaaaggcttttctctatctgtccacttttactgcatttatacaagaacaacaatacatgatgtcatgttaatttctctccttttttttgtgtgtgagacgcctgagggtttatgttttcagataagctacttggtaaatatacagtatgcagcttttaagatcaatctgaccatgcatgtgaatcctgaatgacaggtcggaaggaacaacctttctgcggtacaaaatcccaacacgtggacttcttggattgaggaacgcaattttaacagcttctcgcgggacagctatccttaacactgtatttgacagttatggaccttgggccggtgatattagcacccgcgatctaggttcgctggtaagttgtaggttccaggaactagcaatcctaatcgatagattgatcgaaagtggtcacaaaatatgaaaagtgaactttttgattgaaacatgccattttggtagctgaatagttgagtgtgactttcaggttgcctttgaagatggaacatcaacatcatatgccctggcgagtgcgcaggagagagggcaaatgtttgtaggttctggagtggatgtatacaaaggtcagatagttgggatccaccagagacccggcgacttgggtcttaatatctgcaagaagaaggcagcgacaaacataagatccaacaaagatgtaacaggtatttcatttataaatacatatatcatatatctaaacttgtgaaagtttcaaatcccatgtgctcacaaatctgttctcaattacagtgattcttgacactcccttaacatatagtctggacgactgcatcgaatacattgaagaggatgagttggtggaggttacaccttctagtattaggatgtgcaagaatcagaaaatggcaaagaaaggcaggcagtaaaacccatttttgcaagctgggtttggaggaaattgaagaaaagcttctactaaaaaaaaatgaaagctagtttctagtgttatttataggcttgtttgattgttatacatagtcttattcttatagcaaagggtgagtcctgatgttatccaattaatgtttttttggaatatctccatgccctttgatcatctgatacttaaagctgtacaacttctgaagttgcgcactagcagatattaaagtgtgaatccttgagcatatactggaaaatataggcttgtttgatagtttctagtgttatttatagacttgtttgattgttatacatagtcttattcttatagcaaagggtgagtcctgatgttatccaattaatgtttttttggaatatctccatgccctttgatcatctgatacttaaagctgtacaacttctgaagttgcgcactagcagatattaaagtgtgaatccttgagcatatactggaaaatatgcattcagaatagtgggcaggactctctcaatagtggccctagaatcaggtaactaggtctagttagtaagctagaattgcaataaaatatcaaaaaggcatttccaatgtaatggctacaagaaatctttttccataacaacactaaaccggcatgagcaagctttttaaattgggaacggggccatatgctcgcaatccaagaggaaatcaaacgataaaatatgaatgtttgactttatatcttattttgataaaatgtgttcagcgttcctttggtctgggccatccttaaacgctaggaaaacaaaggtagcgtggtcagttgtgtgcacacctaaaagtgaaggcggtttggggttgagagcagtagaagaaacaaataaagtttgtatgttaaaactgatttggagaatactttcggctaagggttctttgtgggtggactgggttaaaaaacacttgcttagaggtggttccttatgggcggtaaaagaaacaagttcgagagggtcgtggatatggaagaagctgctgaagtatcgagacaaagcaaaatgttttcataaggtggatgtaagaaacggtgagtcaacgtcattttggtatgactcatggtcctctttaggctgcctatatgataaatttggagagagaggttgcatcgatatggggatcccaaaagatagtacattaagttcagctataatgacaaccaggagaagaaagcaccgacaacctttgttaaacgcagtggaaactgagatacaaaagcagaaacagagccgcatagtaacagagcgagacgttgcgctatggaaggggaaagaagatggttttcatccaacgttcctctcgaaagaaacatggtcccagatcagaaacacacaaccggagatgcaaggctacagggggatttggttctcaaatgcgactccaaaatatgctcttcttacttggttgatggtcaggaatagaatagcaacaggggagaaaatggggctgtggaatcaaaacacagacactagctgcattttctgcaaaaatccaaacgaaacaagagagcatctattctttcaatgcgtgtacacgaggaaggtatggaatggtctcataaaagggttgcttctggacaaatactcggacagatggcaagacattattctgatgcttacaaggaaagattttgacaccacgaagagctttatccttggatatgttctgcagaattctattcactcgatatggcgggaaagggatgatagaagacatggagaagacccatcaaatgaggagagacttatcaagtttatcgacaaaaatattaggaaccgtttgagcactctaagaagaggagatgaagagaagtatgtgaatggaatccaagtgtggtttggatcaagaagaacattttagagttctttgaaatttttaaaacaagtttacatgtatatgtataaacgtttatttttcttttgaatataatttaacattagattcaaaaaaaaaagtatatatatatatatatatattcaaaatattatttattgtataagaattgagaagtgttgctattattgtttttaatgaagaatttaatatttattaagtataatagtgctatataatagtataataataagttcggtagataatcattatgtaaatttaaattgtgggacaaaataatgcttaattaatcagttaatccgccggattcataccaaagaaaaagatgatcaattttcgaaaaaaacagtgccaaaattcgactgttacaccaaatcaaggactgagtgtatgagactcacaatgatcttaaaactttgaggtttactgttaactattcgagtatcttggagtcctcttttcactcttacctaaacctcaatcccctctctcacttctctcgcttcgaattctgtgacttgttagttttcaccctaaaaatcccaatctcctggttggattctgggttttgacttcgacgttgctcaatctgacgccgcgttcgagctactgaagtagctaacatcaacttttaagaacatcgctgcgatctcactcccagggatgcaaatccaaggtaagcgccatgatttagtgattttagggttccactatttccccattcaggacgagctactgtcccttgcctagtttacctatctataagtttgttttcatgccttcaaagtctcacagtttttggtctatggttggttctgacagatgatgagaaaagatattagcagaaaggatataattgaggagattccatattctggttcttcgagaatggaattaaagcggagtcatcatcagtggttgacagaagagtctagctcagaactattcagtaataagagacaacaagtggtagagattgatgctcatatgaatttatctccatgggacacttctcttgtgccctcacacttcactgattgcttattcgatgatcctgccattgcgcatacatcacatcttctccgtaatggtcgaaattatactgaggagcaatgcaatcctgtttcatcttttggtttgccactggctcatcacgggagctcttttaatcttgacaccattaataaagttagcaacgtgcccgagttcatggttcagctttatggtcagggaatttcaacatcatttgaaacggctccttcttttaatagtggtcaagagagtactacgctatcctttggccaaaccttcagtaatactgacaggagcttcatcttgccagggcagttcgctagcaaaacagatggaaatttcattcgaaacttcaataatgaaggtgttggtgtcgtaccgattggtgattattatgacaaaggagatgaaaatgtcctgtcaacatttcatccgttggagaaaggagtagaaaactttctatcgatgggtcagtctcttcaaaaggctgattgtaatatcttctcagtgagttcctcctataataagggacaggagaactttatgcctcttctctcttgtgaacaagtacctgaatacgatttcatgaccgaatctaactatcacaatgaaaatgccaatgcgttgtcagcgggacagtcctcatttacggaaggcggtgagatgacatttatggtttctagccaagagagagcaggtcaaagcaatgatcaaatcaggcgcgaggatgatagaagcgagaccctatcttttggagattgtcagaaagaaaccgcaatgggatcatcagtccgtgttagtaacaattatgagaacttcagccatgaccctgcaattactaaagatcctcttcatatcgaagcagaggaaaatatgtcttttgaatgtagaaatcccccttatgctagtcctagagttgataccttgctggtgcccaaaattaaagatacaaagacagctaagaagggttctacaaacacatttccttcaaatgttaagtccttgttgtcaacaggaatctttgatggagttactgtgaagtactattcgtggtcacgtgaggtcagtttgtttgttttttacctgtcctgagaaggaacctttcacctttactcttctgtgtgctgaaacattatttagcagagaaatctcaaagggatgataaaggggactgggtatctatgtggttgcggcaactgtaaacttaataaagtaagcaacctgatataaatggttttagtaattcactggcaggtctgtttgatacaaatctatgtcatctgtttgttttccaactgaattctgcaacaggttctcaatgcgtatgaattcgagcagcatgctaattgcaagacaaagcacccaaataaccacatatactttgaaaatggaaagaccatttatggcgttgttcaagaactgaagaatacacctcaggagaagttgtttgatgctattcaaaatgttacaggatctgacatcaaccataagaatttcaacacatggaaaggtagtagagcaacatagaaacttttataggatatagccgcttagagcatgacaacaagatacaaaagccaatcattgttctaattttgtctcttttcagcttcatatcacgttgctagacttgaacttcagcgtatctatgggaaggatgatgtcactttggcatcttgagaagacgagttatcaactggcaggctttttgtcgtaagtgaagtctgggtgaagtctaggtctcttactaaagtatataatctactgcaagaactccaagttcttagcttttatgagacttaatgtagcgcattgcttgctcttattctggcaaaccaatactatcaaaaatgtttttttgcgatatatagagatcctggaacagaatcggcatcttagactcactcttgagaccgagctgctgccttcgggatcattaaatggtaactgatagatactacttggttattatcaggcgtcggaaccttctgttggtcaatctttaccacagtctctgcgcatccagcgtttggttgaagcatccctcctttgtccttgcttttaccccataataccaaatatatcccaatgacaatgacaactgacccaataaccctacaaatttagaagctcatttagtgaaaatcaatttttctaactttggatacaacagtagtcttagatcaaggttattattaccttcctacgtacactttttccaagaaaacaaaggtgctcagaatagcaacgagaaccatgctgagcgggttaaacgcgctcacaaacacaggccctctctcctttgacgcccatccaataacatagtatgctaaccctgagactagtccctgtagtacaatcaacaatacttcttctctcagcaaaacatacacacaaactggaaaatgtaggaacagattacaagaattgttgtactccgtagattgaagctaaaagcgtcacgtccgggttgattttccagaccgacatgtttttcctttcccatatcaatcccataacagtagcctccaacatccccataatgcacataagagctgttagcgagagctcagctttatattgagccagaatctttgcctgagaaaaacataaagtcctctgtaaccataagtactctgtgatatcacatttttgttcactagagatatattctcaatgttttatctcgagaaatatgttaagct

SEQ ID NO: 1430 - DNA, 100269 bp, Arabidopsis thaliana
gaattccagatgcttcctgagctgatacaggacctgagtctgagagttcggcagttgatgagtgctttgtaagaacataacccatgaaagaaagagcaaaggtaaaacctttaattgttccattgcaggaaaagaaaacaaagatgaattgaaacagaaccctagaactagaagcagacttggattctgagaggaaaatgaaagagacccatctaggtgttttctagtcaactcaagtcaaaccaagctcgtgatcccagacgctcctatggagcaaactccaaggaactgaattggtttataatcaaaatccctgagaaagaggtcaggaaacaaaaagcaaaagaagaataagagagagtgaggacaaatgcagaaatcgtggaggagaatgtcggtattcttgtgagtctgtttgtcggattcaacacatagacgagaaagaaactagggaagctagagaagaagatgataagagcattaatgacaaaagagttgagcagcattaatggcagcttcagtaatttatctgagaatcttttttcttcttcttcttctctttatgaaagaaacagtaaatttagaatgtgggtcacgaaaaacaatcataaagcaaaaaatgtgcactcaatttgatgaaaggttgttcctttttatgaccaattgtctggaaatctctttttctgtaagataatgagaaaacaaatgaaatttgattttaaatttggtatagataaagcatgattactgatttgatgatacttgtttattagtgtatgctttgtgactttagttgactcatagaagatgccgttaacacatgtctcttcttccccactttgtttataagatttaaacattgatttttgtgtgtgattagattccatgtcttgttaattcaccaaactgcccttctacgataccaaatgacaaccaaatgacaaaaggaagcttttgctctacgaatacgaaacattgtccggtagaagtagctttcgttgaaggacaaaatatggcaataaataattatatcattcccaaccatataatagcatttctaataagatagttttatcaaaccatctaaaacacgaatccacaatgtttagattgtagcatatagttttttgagacacatgccaatagacttgtggcataaagagggcaagtaggtcaattacttagagacaaaggtggtgattatgctttgctaaagttttaaggcccacaatacagtacatgtcccacaggtctgttctactctcaaagaccggaccatcgtattaattaacttctttttttggtctcacatgcgtcaattttttttatacagtatatgaagtatgaacattaaaatgtttcttcactgttgtttaacaaaattgttattgttggtgcacaaaaaaaaaaaaggtttaacaaacattttgttttttttaaattgacaatcgtgagtgtaatcacaattgatgctttaaaatttggctaatactttcgttagcattttcaggatgttactaaaacctagtatatttcatagccaatatgatgtttcaatactgttagtgttataacttatgatttaccattaaaattataaaactaatataaacataaaagatatgtaaccatcattattaagcataccacaaaaaggaacaaaaggactagagaacaatgcaagctctattactgattctgctttggtatcaaaaagagacttaacaagacattatgggttaagacagataacgctttataggagaatgataagacataacataagactccacgaaattggaaccgggagagcatgtgggacgaacagaaacgggcattcagatactaacatctaacattaggacaacctttttgggaccatcttatggttgtggctttggagaaaaaacaattaaaacatcaacatccccttcccaccagaaaccaaacaagtttctctccaacttgtctagagagcagaaatgatatcttcaagataagacaatatcagcaatttgttttaaagattcttcaatcctaaaatccctcaccctatcatattcttctacctagacagaccataccagtgatgcaacaagaaaacagaccaaacaatacataaatagtttattctggaattagtgagccttatgagaatctgggttttgctgagttgttggctaatcgcacggcggcttgttgcattttacaagtttacaaagtaagtgataaaaagggacgaaccttgacaatgttataagctgtcatttggtttcttgtcatttgagcaagactccaggtatgagatcacaaggtcagctgctttgcaacctgatgctattgatttcccaacagagagcccccctcgatgattacctgtttattttggtccgtgcacaatagataaataactgcaatgaatcgtctcgaggccatatactgactacattcatcatcatggatcatataagactgaaactttaaattgaagttacctgcatagaagaacccaggtagatcattctccatcttgtcaattgcttccatgactgagtcatagctgctgtcatacaacgggaatgctttcctccaatagtaatggctgcagataacatatattgtttatctataagggtggtaatcttctctttcgtacactaaaacgatcaaatcaaaaaaatctccaaagttcacatacttgacagacacgggttcaccttcaacccccaacagtcgctgaaggtcagaagtcacaacttgttttaattcgtcactacgaagattaaaccagaaagaaaaaaaagtagtcagaattgggtaaagtaggaaactagaaaaatggtataaatgcctcgattctttgtagcttttcgtaagcagtcaaatttcacttacgtggaagctttggctagttcctggttcctactcccaccaataaaagttgtatatagatgaacgtcactaggggaacgatctggaaacatcattgatgaaaaaagtgtacctgcgtatagaggagtatgaagtattgataaatatagaaggaaaagtatagggctatttgtttgagttaaggccacaccaacaagttacctagagttttgaaaccatgcttttgctccttagatggaatgagtaccccaaagccttcaagaggtctctttactttctcctttgtgaatgtggtgattaaaaccgagaggggcatgtaattaatctgagaaaagaacaagatcaacatcgatatgcaattaacttgggataaatagtacatataaaagataactaatcatgcaaggtagttctttgatgtcacattaaggttcattatcagtatttggagtaatactggaccacatctagatgtaggcctactactctcaaacataaacttctgagttgtaaaagacacaattacctcggggagaaagtttagctgaaagggttgtcctcctttcataaccttcatctccttcacattgcacagaggagcctatggtacacaaatttcttgttaattgagaggttctataattttcatctcacatctgacaaaaaaatacactaaccgtcataattacagcatcataatgggggttttgtctctgcgtttcattatgcgaaacacaagataatgaccagttctcctgtcttgatccagaattgtaagacaaagagagtaccttggagtctaaattgatctcatcatgtgagagacttttgcacaacgtatcaggaagaatctgcaatatcccaaaatggaaacataccaacgacaagtagtacagagcaagaaaaacataataagtacggcggaaaataggtttatatgattaaaaaacaaagctggctctcattgcaaatgatcacctgcattccccccttaaaagagaatgacccacgcgaacccttttttgtgccaggagaactctttgtgtctctacttttaccacctttagcagcaaactttgttctgattgcaccgactataatagagccaaaactgaaaaaggaaataatttctttaacatctaaccggagaacagttaaacagctcatcgccataaaattagcatagggaagtactgaactacgtaaaactcaggccaaccccaaaataaggaagctaacgttatttgcaatgctgtctttggcagtaaaacttttctgtctatcatattacacatcaagggaccaaaacattatttgatattaccaagcatacaacgacacgagtaaaggaatgaccaattcaaaacatgactgcataaccgtatcaacacagaaaagaatcttggaagtattcttcgagcggaactcattgaatatagtatagttacatgagaaagtaccttttctctacattccagagatctgggaaagaatgcttcatctggtcataaaacgtagggaaggatataaaattgaagaatatagaacgataaatttaaaaacaaatacaatatgttaagtgcaaagttgctcactgaaagggaatcagggtccgcagcacttgttccaccaacaaaagggtcgatgagatagtcaacaaccttaaaaatcagatacataaaaaggaacacatgaaaggaagatcacagtcgtctgaaattaaaaacgatagtccacaagtggtgtttacgtgcagagaattatatgatacaacacaacacagtgagattatgatgtttcagtcaaaccctaggataggtagcaacaaacctcttgtccaaaatggcgttgaaagaactcgcttacactacagcagagaaaatgggaaatgacgctgaagttataatattctgtgactaacattgctgatggtctggaagacaagtttataatcacctttcttcagcagatgcatctgagacttttgaggactttttcttccataaaaatggttccaacaagatttgaaactgcaagtaaaacctagtactattagggatctatgatatactggtaagataaaaagcactttggtagaagagagcttctagtttctggtggtagtgcacagaaacttatacaacgttgatataatatgtctcaaataactatcaagacaagtaatttcaatgtaataaataagtaacacacttatatctagagaaatctaccttagattgggtagagagcacactacttgtgaccagctctatgggattggtaggtagctagcatgataacaggagaacatatcagcctcgtaaactatacaacaacaactcattacataaagaagcagcaacccattagaaaaaggaaacaagtagggtatttaccatcacaggtacaccattccgcacaatataccgctttttctgtgaaattggctgaaaagatagagaatgctctaataaggggatgagaaacacaaagcaaatcaacaaaagaaaaagaacaaaatatgtctcttaatcggcaatgaatgatcatgcaagaccacagaaagtgctcacaaattgttgtttctcacgaagcccaagatcatcaagtaaactcccaacttctggctcagcctcagtctgcatatgcaaccataccgcatcaagacattatctaaaccaactaaaacaaatgtgtatgaagattctaaagcacgtttgacttgagaactaaaacaacataagtaccatggtgtttgctccttcatcccaaatcaaaccattttgcataacacttctcaacttcccacctactcttccatcagcttcaaacacagtcacattcaaacccctcgatttcaacttgtaagccgccgcaagtccacttaaaaaccatcaaaagaatcgacatatctgtgagcgaattcgtcacaattacacaaaattgacaacaacaacaaaaggatctcgacccaaaaacggaaagttgcagaagagtcataataatgcaggagatgattctctctgtgaaaatttaccttacacctgcacctacgactgcgactctttttcctgaaaccgcttcaatttctaaccaaaaagcaagcaaaaccaaattcaatgcaagatacaaatagtcccaaattctcaatgcgaaatctgaaaagtgaaattcgagataaaaccaaaattttcttacgatgatctgctactgctccagacgccattgctatctgcaacaattcagagtcaaaatctctgaccagtcgaaagcagtgacggaaataagtagaaaaaaacacagcggcaaaattccagcttatcccaaaacgacaataaagggtaccgtttttaatcaggcccattatcatcagtcttttgcctaacgggcctttgttttttcgtcaacggatccaaaccagatttatttgaatgacaaagtttcttgaggagagtgcatggttgacctttttctaccgaattgtttgaactcatgtgaaaactaaacttgttttctctctctctgcatgatgtactaatatatagtatatgttatctaattcgtttttagtttttgggcaactatatggttatctaattctcaaactcaaattagctcgtttaactagtatcttggatttgcgtttatacaattatacgtcttgtttgatagtaccattttttcagtttagtctctagtttgcagtttggcacattaaagttcgaacacaaactacacttgatgacctatttttcaattaggtcaatcaactctggtcaaatactccacagttttctaaagaaatctttaaaaaaaactattaacaatatcaggttcttatctcaatttgtattcccgaccaaaaagcattcgttattcataaggcgatttttattttattttaatgtaggtttgggaaactaaaggaatgcaaagtttgttggtagttatcgtggtagttaatctaatcgattaaatgaaaagtactttttcaagaagaacataattggttttattatgagaaaagtatgtaacattagtgtgaataattgctttttagagcataccatctttgaatattaacttaataaataaattcaaacaggaaaaaacaattataaacaaataattgtgctgagattacgagaacattacgtggcccatttgtacaataagatatttcgaatctacagtttaatagattttagcaatatcgcatggatgtgaaaaggaaaagtcattttgctttaaggtagactaaatttgaagattgaattagttatcatttatcagacatgatatttgcttgcgccatggaactttaaggatgaagcaaactaattaaatatttaatctctgccgccaaatatgaattcgaaatcatatagtatttgatttacacgtataatcatgtatgacttacttctataaagcttttcaaatttcaaaactgaaaaaagtaacaagttgttttccttttgccactttgattatattccatcggcattgtttgcttacactttcttcacgtcttaattaattaatcagaacaaagaaacgattcttaataaatattgtcgaggatttgaattttgaatattctataaactgcttgatctcgactctaggcgaatagtgaatccgactttggttttgagtgtttctagttttctcttttgttaataaaaattaatttagttttggtttgcactaatataaattcaaagaaattagtgattcatttagttgttggattggttgtgattttccaaaaatagacacaacaaaatcgtttgacaaaaacacaagtaatagaaccaaataaccgtttgaaggaaatttcaattatcttttcgatcacttcaactcaaacatccatacgcagtaagcacaagtaacaaaagaagagaataactatacgtttgcctttaagtagttagtaagatttgttgttcataaaatcattagactcataaatgttcagtaagtaagattaattagcagattaaggtagggcaattaggaggtggtccatgctttgtcctaattagtgattagaagggaaatgatcccaaacgcatagttttctaacttttttgggggggcatatatgttttttgggatggctcaagctggtgggcgttaatagctcttatttattttttgtttgttaacactactgttttattaccagaagttcataactaaaatcaataatatgcattcgaacggtttattattatgacacataaacaaaaataaccactaagctatgtactacagtagtagtcagataatttatgctttatcaacaaaaaaaaagtacataactaagtaatatatatgaccgacgacatgttttgtcaacaaaagaagttcgatatttaatcatataattaatattgtacgtattaaatggaatcaaacatgtaattttcatgtcgcaatctggatcacgagatctttccgcaacatgaatgtccaaactaggatccgatgaatcacgttctttgggtcaactcattttcatttaattaaaacaatatcctaagatagcgaattctatatttttgggctcatcatactcatgaagttagaattaattcgagcaaaaatgtatgtacgctcgatacatttttcttggtttttttttcttcctcacaagaagaacaaaacataaatccatgtttgaaaagactttgtatatgctttaaaatcaatggttgaaggttcttgggctaaaaaattcggatttgtttctaaattttttttcactatttccttagttgatgactttacgtgaattcagaaataattagatgggacatatatagatctaaaccaaaaatagtcatatctacatagacgtattccacgaatgagttgttaatggttgatgaagagtcaacctcatgacgagtcctcgtcttccccgtacgcacgattgcgaagttatggtcctatcctattttatatctataattcttcacgtacatatttccaccgacttcttcaaatactctctctaccacactttgatctttcttgtatcatccaaagatctcacttacatcacttcttcctccttccatttaatcgcccaccgtttttcttcactatgatctgtattctactcgaaacacatcgtccacgacaaaaatacagagagttataattgtgaagatctgagtatgttttatgacccctcactattggttactttggtatgtcgcataaataaacaaaatccaccatgtattatttactgcgatgcattcataacataaggccaaaacaatatggccaaattaatatctttattcacaatttcccaacaatataaaatagatagatgtccaagaaaataaaatattaaccaaagaacgtaagctgagagacatagcaggattagttgggcaggggaaagttataggattgtagctagaggagtgagcaaaagagtatggactcactgaacaaaataaataatcacacgtattgataagtttttctatattaacaaaaagaacaatctctcaacaatcttatctactttttccttctagctccaatatcattctagtttctgtcttctttcccaactaatatttaccaagatttgacatgaacttgtttagtaaaacaccccatcttataagcaaatttagtcttgtttctatatatctttttcttaatggtgcttaatatatcgttactggtgtgatttggaatgatcaaccaaatcatgatacatggacaaaacaccaattatctacgaggaggctgacaaatgatatggcttcccaaacaattacgatgtgataggatctaacgtcctaattcccaaaagttgtttttctctatttttctttccgatttcttggttattttgattcgagcgtcaaattttgaccatggtactattcaaggcctccatagctatgcttggagacaaactgagctagaccacgacatgtaagaactaagaagcgatgttaagtttgcctccagtaacaacattcaataaacaaccaaatcctttcgaggtaaaataataattttaaaacgaaatatataaaacttacatctgaaaaattagttccgaccaaaagagttagcacctcttggttttgtacctgcatgctaacatatcaggttgaacaatatgcattaattgaaagtcaatctgaaaaaagaaaagaaatattatataatgggtgtattatcataataactatagaaatagttgtttttttcttttaatgttacaacatgtgagatgttataccttttattaattactaataaaaatacatatattccccatttatgttctactaatatgcagacaaaatggtatttattaccaaaataatgtatcatcaattaacaatatggattattttctatttaagctatgccattgcacccaagccagtgacactgtgacagtgtatcagcataactcacggttaaaaatgggacccacttattctcattaaattcaccaattttaaccattcatggttttttaaccgcggttaaacctgtaaaatcccgtttcaataaattctcacactcttcttcttctttccctggcgctcacttcttttcaagtctctctcttctctctcgagcctcgcgtctgtgtaaagagacaaaacatattctctaaagcggcgacgtttaagaacattcggtcaacgacttacggcggcgttggaatcaaaactccgacaatgacggttttctccggcagacaagtcgttccgatggattacgaaagccgaggtatcacaacggcttctagaagccatcctcgacggagatttcaaaacggcatcggattgcgtctccgatccactcgtcgacgttaatttcgtcggcgccgtcagcttaaaaacaaggaggagcgaagtcgtcctccgtgatgagtctcccagcgaagtccgcgtcgagtacgaagaattcaaaaccgatgtaacggcgttattcctcgccgttaatttcggaaacgcagctctcgtgaaggaattactggtaattatttttcttaatccgagtttagccgtttctttaacgttttttgctttaagattttgaaaccgataaacaaaatttgcattgatttaaatctgtgcaattaattatacaattcgacgttatttattaagcaaatcggtttctaataataatgcttttgatgtgaacaatatttgtaatttaatttttgtgctttgtttgaaacttttgcgttacgttccattaatggaagacgcaatctatggagaattggtttcctcgtgatttccattttgcgtttgtttttgcgcgtttctgcttagtggtgtgattcgtggtacctttttgtctcttgaattaaagaccccaaatatatgttctgtctgaagcttactttactttttcctctttttcgaaattcaaatttcgaacgaacgctgattattacttctctctgccttttctatgaaagaaattattcctgtaaaattttggtaaatttcaataaaattttcgatctaatgataattaatcagaatgagctaattcagtggcgtttactagcacttgtctatacttagctctagtcattttttgttttttaaaaaacgtggatcggattccgtgagagtttttaaaaattcataatctgttgactaactttaatcttaactggtggagtgttaggatccttccaagctgccaaaaatgttatactaataaattacatcttttagcgagtcaaatttgcatgtcaggcggggattattttccaattttgaagtcagtcacacaactttttcttttgcttgcatcgtcacagatttacttttattgagattctcattagcctttgctagaccatatatgctaatgatggatttgcgattagatttgaaatcaacagcgttagttatattaggctaagatctgggaaaaaaacatgtgcatttggattggtcttcgttgagggatattttgagacacaacagtgccaaaatgtcactattggtttgcagtgataattgaatgatttgatttgattctctcttgttttcctgaaaggaacttatgaatatttagtacgacaagaagtgttgatataacaccatgtaacttgtttgtgaaacagaacctgaggccccgccccattaggtgttgtcacttgtcattggctgcatctatagtagacgaatactatatttgcatacttccatctttccttttaagccatgctcctctgtgtcagggttgttccctaatgttcatgtagatccattttcaattattcactttgcattattgtacaactttactattatacacagtttcttttgtcttcttctgcctctggattttcacctcacgtggtgtccttcgcacttagcagtgtagtagcttaagaaaatattttctaattttataacactgatctgacttttcctgtaatatcatctcacagaacattggagctgatgtgaaccagaagctcttcaggggatttgcaacaactgttgctgtaagggaaggtcatttcgatgtctttgagattctactcaaagctggtgcttctcagcccgcttgtgaagaagctctagtaggggcgagctgtcacggacgctcgaggttcgttgagctgcttatgggaactgatcttattcggcctcaggttgctgtgcatgctctcgccactgcttgttgcaggggttttgtggacgtcgtagggaccttgctcaaagtaagttcttcatttcttgtggttttaaaagtgaccggttagaattgttcaatagccatcttacagtagataattcttcatgtttttgcttcattacagtgtggtgtagatgctaattcaaccgataggcttcttcttcaatcttcgaaaccttctctttacacaaatgtagactgtacagctcttgttgctgccattgtcaataggcaagtctctgctgtccgcgtcctactacaggtaattttggctctgcaaaattgaaaacttgttccctgcaaggagagagtatgtatctaagacatcaaagcttttctttcaatgatatgcacaggctggcgtcaagacagatatcatggtgaggcttggagcatggtcatgggatactaacactggagaagagtttcgggtgggagctggagtggctgagccctatcctttaacctggtgtgctgtagaatactttgaaactagtggcgacattttgcgtttgttgctcaaactccagtctccaaacgctcttcacaacggtcggactcttctacaccatgctgtcctctgtggcaacaaggcagccgtcagtgtcctccttgactgtggcgccgatccagaagctcctatcaaaacttcacgaggcattgaactcagaccgattcatattgctgcacgtgacggatcagtggagatcatacaacaactcgttggctttggctgcgatataaactcgaagaatgatgtagggaacacagccctgttgatctcaataaaacacaaacatccagagtgcgtcaaggttctcgcccttgatggtgctgatttcggtttagtgaacaagtttggtcattctgctgtttcgatcgctgagtcaaacaagtggtctcttggattagagcgagtaattcttgagctgatccggttcggtgttgttccacattcaagcaacgcttcagtattctcgcctttgctatatggggctcaagcaggagatgctgaggcgcttaaagcgcttgtaaaagctcaagacatctacctagactatcaagatgaggaaggcttttcggctgcaatgctagcggccatgaatggccacgttgaagcatttagagtcttagtctacgcaggcgcagacgtgaagctgtataacaactctggcgacacggtagtctctctgtctgaacagaacggtaaccgtgacgtgatagagaaggtgatgctcgagtttgctctcgagaaggacagcagaaacatggcaggcgggttttatgctttacactgtgctgcacggcgtggagacgtcaaagcagtgaagcttttgagtggaaaaggatacagtctagacatcccggatggagatggctacactccgctcatgcttgcagccagagagggccatggacatatgtgtgaatacctaatctcctgtggcgcaaactgcaatgctaagaacggaagaggggaaaagctgctggatctcgcgactggtgatgcggagaaggtgatccgtaatgagttgtctcggaggtttgtgatagaaggaagcagtgtgatgaaacacaccaagggagggaaaggaaagaagcatgggaaaggattgagaatgttggaatcaagtggagtactaagttggggaaagtcacggaagaggactgtggtgtgcaaggaagtagagatcgggatgagccagcggttcaggaagaaccgtaaggggaaaggcgatggagcggaggaggaagggattttccgggtagtgactacggaaaacaaggaggttcattttgtgtgtgaaggtgggttggtgtgtgcagagatgtgggtgaggggaatacgacttgtgaccagagagacaatttgtggaagaactcagactcagaattagtgttgtttatgtatgtatataaagaagttttgagaaagggagcttcattttgaaggtagtgtgcttctattgtgttggggatgtttatagttcttgggtttggtatctgcagtatatttgtgaactgtgaagtagttcgagttgcacatgaatgaaaactaaaacatctcagttgatttgagattctccaaatttgattattactttgtccaaaacaaagactattctaaacttacatggattcacaggcttagatccagcactaaaattcggcatgtgatacctggatatcaaaaaacaacatgaagttcctgtctctttcaaaagaacaaaagttacaaaatgtttaaaaaacattacatcacacaagaagtcagcacttttgtttaccagtcaccaactcaacaagcaataaccaacagagataaacagagaagctttgaagttctaatcactattgtaaccaccatcatcgttatccttatcttcgtggtccttcaccactcgttctatgaactgtcttcgaactccagccatcacagcttccctcgaggagtcatcgtctcctcctttgccatcgttaagaactggctctgattgacacagaagtaaggctacacctgaaaaaccaaatcagttgcaagtatgttagacatgtgcctaagaccaatctgctcaaagcatgatacaatcgccaatgtggtcacatcaggtctcagatcagacaaaggctagagatgagacatgacataatcatcaaacacaaataagcacagattacatcagacaaacaagggttcattcaaacttactctctggggtgcacctacggccaaagctctttaagcctacatgagttcctttgatggcgccatggtggtacaccagcaaggtaggaagattgcaatcagggtagttcggaatacaatcagtagatattatcttaacgaactttgttgctgggtatctactacccaattcgtctagacaacccaatagcaaactacattctgcaacactatcagagaacaacaagaaataaacatgagttaatagtgtttcaagcatgtagtaaagaatggctcaacaagagttcacgaatacttgaaaaaacatacccatctttatagagacatacaacaacccaatcttcagcagaagcttgcgtaacctccctcacgaaatcagagcccgagatgggagtcactgttccatatcttttaactttagcagcctctcttagctcagacaacctcttcttcctatgaaagcatcaaaacacattagtgcctgtgaatcatgaagtgtgttgcacaattatgtttagcctattcatcaacatctcaaataagatactaccctcaattgcattcatatccaaaacacaaacgaatcgagaaaaaccagagcttgataattgcattccctagctacatggcaacagatccgagaaaattgaattcacaatccaccaaggcaaggattctccagggaaagttaagattgtaaatacaaaaatcagaatgttcgattcgatctacgaacctgtattcttcgagaaagcgatcatcgtcgagatctttgtcgtcctcaagatcctcaagctcctcctctgtcttcttatcaaaccatgcctgatccttaggagctgaagactcgtcttccgccggagtatacgccggaggtttgaaagccggagccttctccggtagattccccaatttccgctggatatcatcccattgagttgacgctccttcaatgtccttatacacgaaatgataatccgccatcaaagtataaccacctacgaagcttcaaagagaacctttgaatctgagaggagaaaaagcagattgctttgacactctgtgatcgcaatctcgttctttctctggaaagacgaatgataaaaggccatccccgaaattggtctggctaaaccgacaattaccatctggtacatttcgaaccgggaatatttggtttaaaagccggttagatattggtttattattctagagtaatgtattagactcttaaccgttcggagggttcgtatatatattatgagagcatgtatttttatggagaagatccagagataattaaacaaacagtttagcaaaagattttgagagggagaaaaagggcgatcgattagggtttttgtgttttcgtcttagtatcgaagatgatcggagctgtgaactcggtggaggctgtgataacgtcaatccaaggtttatcggggagtccagaggatttatctgcacttcacgatcttttgagaggagctcaagactcgctccgagccgaaccaggtgttaatttctctactcttgaccagctcgacgcctcgaagcactctctcggttacctgtatttcctgtgagttttaacctattggtagattaggtttttgttactagtttgtgtatactttgaggctgattgatgattttggttattggaacttgatgtgtgtgattaggtcgaagtttaacaaggagaattgtctatgttattcgatttctgatctttgagttttttgtatggtttgattgttacagtgaggttcttacctgtggtccagtgtcgaaggagaaagctgcttatgagataccgataattgcacggttcatcaattcttgtgatgctgggcagattcgtttggcgagctataaatgtaatttactgacacttaatgagagcttatcttgtcttaatgtgttttcttttcttttttctttggggagatggatgatgttattatattgattttgcagttgtatctctttgtaagatattgaaagaccatgttatagcactgggagatccgttgcgaggagtagggccactgttaaacgctgttcagaagcttcaggtctcctccaagcgtttgactgcattgcatccagatgttcttcaactctgtttgcaggcgaaatcgtacaaatctggtttctccattcttagtgatgatatcgtggagattgaccagccaagagacttttttctctatagctattatgggtaagcaatttttcctcattgctatctgtttttttcctttgatcaatagatgtgtaaacacattaaatccatccctgttgggtttgttttatagtattttcttattctggtccttgattacctggacttttgataggggaatgatttgtattggactgaagagatttcagaaagcattagagcttctttacaatgtaaggcatttttattttttcttacgtgctttttatacattaaggactttcgttttagttttaactcaacctaagtacttgtatcaggttgtgactgctcctatgcatcaagtcaatgccatagctcttgaggcgtacaaaaagtacatattggtgtctctcattcacaatgggcaggtaaggctgtgttctttatattttactttctttgtttatctagttttcggtcatgggagcatattgcacgagtctgaatcaactgtatgtttttgagaaatgttggtttcacaattacatcctgtgtctgattttaatttcaagcattggttaatcttatgatgtttttcttataatcttgtttgattttacttgtgcagtttactaacactctccccaagtgtgcttctacagcagcacagaggagcttcaagaactataccggagtaagtttgaacccgatcattagttgtatttttcatgtttgaatggagtctggtccctttttcacttcagtccaaagatttcagttgttttgtactccataccagctaaatctattttcaggcttatgattttatcgttcacccttttctcagccttacattgaactgggtaattgttacaacgacgggaagattggtgaactagaggcattggttgtggccaggaatgcagaatttgaagaggtaaattgcctctaaacatttaccatagtttctgtaccaatattaaatattcatccccttccataacttgggcgaaatgctctttcaggataagaaccttggattagttaagcaagcagtgtcatccctttacaagcgtaacattctgagattgacacagaagtacttgaccctgtcgcttcaagatatagccaacatggtccaacttggtaatgctaaggaggcggaaatgcatgtgcttcagatggtattgtgtcccacacttgatttttggaagctagctttattagtttaactggtatgttggacaatatcatttttttctttacaaacctgcagatccaggatggtcagatacatgcccttatcaaccagaaagacgggatggtcagattcttggaggaccctgagcagtacaaatctagtgagatgattgagatcatggattctgttatacaaaggtatgtctacagaactaagtgttttgatatggtttttttttgggaaacattgcttgaatgttgaaactcgtaataaggagtgcataattagcacttggaatcaagttgatatggagatgactgttttgccaaaggaaagtagtagcatcaaacaagttatgtgttttgataaaaatttcaggactattggtctgtcgaagaatctcttagccatggatgagagcttatcatgtgaccctttatacttgggaaaggtaatttaataccatattccattagtcttctgtcctggaaacccatgtttctctgactaagccgtttgactactttttttcaggtaggaagggaaagacaaaggtacgactttggagacgatttcgatactgttcctcagaagttctccatgtaaacagcgaaagtcgagaagcaccaacaaaacttggctcaaagacaaccgtagtgtgaatcttgagaatgttacttttgatttctttgttcatttttgttggtttaaaaagtttcatatttttgtcacaattgccaacaagtagagaagaccattatggaccctcaaatcttttatttcccttttacttaaaaaattttccccttgcgcgtgtatctctcgtgctaacttacgcgagcgttttatcatttgcaagggttagagaagtctcaacggcgtcgtatcaaactcgtttttaactgcgtgtcgtttggggaatctgatagactccttgttgtggtgggctagtttcaggcccattctcgctaagcgccacgtagatttttatttctttactcattttttatgtcgcatcttccccatttcgttttcaacctgatttctccatttccctctcttatcctcaatgaaaaaaataatctgagaaaacgcaaaagaagaacggagcaaaatcctcagaatcgtcgccggagaatctttacgtttcgacataatcggaattttggaattgataattccgatggaaggggttatcacatgtttccatacgaaatgcgtctctcttccaattcgttctttcccactttctagggtttcttcacttcctcggtggaggaacaataaattgatctcttcatcgcgatcggttcatctaagaagcttgtgcgtttcgagctcagatactttagtcgcgagcggttcaccaaaggaagacgagaggcagagcaaagtatcgagcaagaaggaaggagatgactccgaggatttgaagttttggatggataagaatgggttgccaccttgcaaggttattctcaaggagagaccagctcatgatcagaagcataaacctatacattatgttgctgctagtgaggatcttcaggtggttgacttagcatttcaacagttttatttgcttatacacagttccatagggtattccaagtatcaatttccgggttttgatggtaaatttttcctaattacctgtcttttacagaagggtgatgtggcgttttcagttcctgattctctggtggttactctggaaagagttttgggaaacgagactattggtatgagacattctctattatgtttcctattccataaagctacttcatcagttatgcactataatatttggattagactttgtgatttctcttagataagggtgggattacgggtgttttgattcttgtctgaagccatataaactctctttatcacacagctgaactgttgacgacgaacaaattatccgaactggcttgtctagctttgtatttgatgtatgagaagaaacaaggaaagaaatcagtatggtatccctatataagagaacttgatcgtcaaagaggaagaggtcagttagatgcggaatcccctttgctgtggtcagaggctgagttagattacctaactggtagtcctaccaaggtattgcgttagtatatgccggacgtgtgatgaactagtatagtgggttcttagtggttaacttctttaacatggttcaggccgaagttcttgagagggctgaagggatcaaaagagaatacaatgagcttgacactgtctggttcatggctggatctttgtttcaggtgtttggctacctacgatttcggcttcttcttgtcattttaatatatggaatgctaaacatcggcctcggacttacaccattttatttgtgttttgcagcaatacccatttgacataccaactgaagctttttcatttgagattttcaaacaggcatttgttgccattcagtcatgtgtggtgcatttacaagtaattttcattcttttggggtttacttttcacaacttgaatgtctttctgtatttgaaagaatagttagagtaaaatataataatatggtcttacctctattactctatcgctgaatctaaagtttagcttgcagctcatcatttaagcaagtagtcaggtggtgcttgttgcttcttctaatttagattgttatgcttcttcttgtactcagaatgtcggtttggctcgtcggtttgctttggttcctcttggtcctcccttgttggcctattgttccaactgcaaggcaatgcttactgctgttgatggtgctgttgaactcgtggtagataggccatataaggccggggatcctatagttgtctggtgcgtctgtaagccaaattgcttcctacagctagctttttcattctgatctatttttcatacttttgcatttcctcctttatttgaaggtgtgggccacaaccaaatgcgaaattgcttctgaactatggatttgttgatgaggataacccttatgatagagtaatagttgaggtaattacaaaactttgttgcgttactgtaaacactagtgtagtgttcatgtaattcctcactgtttgcatgttttatgcgtcatacacattcaaggcagcgttgaacactgaggatcctcaataccaggacaagagaatggttgctcaaaggaacggaaaattatcccaacaagtatttcaggtatgactttcccatggcaacaagtctactttgagatgttctgtctgattttggttttgcatccatctcaggttcgtgtgggaaaagaaagagaagctgttcaagacatgcttccctacctgcggttgggttacatgtctgatccttctgaaatgcagtcagtaatttcatcccaaggtccagtttgtccggtaggtagaggatgagtgacctggcaaaacttttttctaagtaatctttgatatttccttgattgcatcaaatgttcagtccctacatgtgaggcctccaatgttactgctacatagaaagttgttgacacacttgtaaaggtttaactctcaagctcttttgtagatgagcccttgtatggaaagagcagtactagatcagcttgctaattacttcatgagacggttatctggctaccctactactccgaaagaagatgatgcattggtatgtctttagactttgtgatcgctacagatcaaacacatttttttgtttggttttcctgcatgacatgacattgatagaattcccaatcaacagttggcagatcctagtttgagtcctaggaagcgagttgcaacccggcttgtccaactggagaagaaaatactagttgcatgccttacgacaacagttgatcttttaaatcagttgcccgatacagccatctctccatgcccagcaccatatgctccttccttgaaataaaaaggcacgtatctctgccccctgcctctctcacttaataactaatattttctgaccttctaaaactatgttggttcaggttcgtgttgtagctgcaatttgtgggacatggcaggagtaatttttggtcgtgtccttgatcattacaatctgaggtcgcttaactacggtcagtttttgtgtgtacaagtctagatctgatcctttgcggctcgaaaacatgactaggaagtttccaaaataattttgattttgtaagatttcttgctagctacaaagccgaaatctatctccttatagatggtttattgttgtttatgaattcagaagttgatgatttcaaagttttaatgcattgcaaattgcaattgcaggtagataagggtactaggagcgttatctgccgcttgacacgcaaatgtttcagcatatgattgtcctttttttcttacaacaatgaagccttaagtcgcattgttcaaagtgtacatacatgaatgaaccttcttgttcttccccaactccctctgtaatgttttatctctgttttagaaatttagaatttatcatttccaaaaaaaatgaataacgaaattgagcattttgtccattggatacaaaaacgtcaggacgagccgatagagtgaacaaaaacggcaagcggttcgttgaatgcgttgactcataaaaatcttcgcatctaaaatatctattggtgtctcactacactagtcactagatctgttcgattaaaatccgacggtgtttattgattgttcctgagtgttcccgtaccgaaactcgttaaccgattcaccgttaagtgtggaatcagacagtgaagagatcaacagatatttatctctctacttctctcggtcgtattcgtcattctgccttttatctatttccatatcaacattttagggtttttactcctctaaggtttcgcttcttcttagattctctgtcttccgcttcagttggatcatcgattttctcaattgctctgaagttcagccggtgagtttcttccttttcacgattttggtgtttacttccatcgggcaattcgaagtcttcattgcaggacgagttcagatttgaatcgcttaaattagggttttgaatcatctatctactatcggatcgagattatctgatttagagtcataagagtcttcggagattagctttctgaagcaaatccgtcatacgagatgtttcgtttcctgcaggattagactgatccggagctcttcacgagattaagggaatctatttcacaatttcgtcgatatgacagagagaaacggtggtttccctggtgattattgttttgaggcacccggtggagattatgatgaaggatctgatagtccgagggtctcagagggttccaattgttcaaaaagaaaggtcggtgaaaccttcggtgtctcgaaaatggtattacccttatctggcctatcatcatcagataggaaggagttgattcgtaggctaagacaagagctggaacaaatacgagttttccagaagaattttgagctttctagaacagtggctctcactagctcttctgctagtggtttgactcgagtcaagagttttggaatgtcgcgatgttccacgggtccaggaaagacggtgaaccctataagtgctgcttctaaaccgactcctgtcactactgcggttatgcttctgatgaagcaatgcgaggcgcttttgaaacgattgatgtcacatcagtatggttgggtgttcaatactccagtggatgttgtcaagctgaatatactggactattttaatgttattgagcatcctatggatttaggaactgtgaagaataagttaacttcggggacatattcctgtccgtcagagtttgctgctgatgttcggcttaccttcagcaatgcaatgacgtataatccacctggtaatgatgtttatgttatggctgatacacttcgtaagtttttcgaagtgaggtggaagacccttgagaagaaattatccggaactaaagttcatactgaaccgagtaacttagatgcccataaggaaaaacatatcgtaatacctgtgcctatggctaagaagaggaagaccactgcagtagactgtgagaatgtcgtagatcctgctaaacgggttatgactgatgaggatagactcaagctgggcaaggatttggagtccttgactgagttcccggcacaattaataaatttcttgagagatcacaactcaaatgaaggagggattggggatgatgagattgagattgacattaatgatctcagtgaccatgccttgtttcagttgcgggatctcttagacgagcatttgcgtgagatccaaaacaaaaaatcaagtgttgaaccctgtgagatagaggtatatcttcgtctatatctcatgtttgaatcatctaattgcatcatcactgctaatagggaaacttttatctattgcagcttctgcatggatcagtgccagggaattcatcaatgcaacattgtgatggttagttcacagcctgcttgtggttcgataaagttttttgcttggctctttaatcagagtaacattttttactgtattcgttgtagggagtgaattggatgatgaagttgttgacattggtgaaaatgaacacccaacatccagcatttctcctgtcacgatagagaaggatctggtgttaggaaactctaatggtatcttttcttttgcttgtttatattgacattcttgttctccatagaacttttgttggggtatggttgttacatttgtcatttccaaactctcgtgacctcagattttctcagaagtggccttggagccatattgttgttgatatgcagtgaacgttgctagcgcacttattttataatttttaaattaggaggccttttacattcacttgtttactaactaaaactaaattgcctttcgtgttccctttattgattttatggtgattagactatcccctgggttgtactactgattgctcctcttttgatgcatataatctaggtaatagcttgggaagtgtgtccggtgatcctaaaatgtcaagtttaccgagggcatcaaaggtatatagtggtctggaataacatgcaaacatgaataactgagatttggtgcgacacaatgcatatgtcgatgtggatatctttgttaccttgtcataaagttgatataatttgatatggaggaactcttggaccacaattttttactgttgcggaaccataacaatatgaaatggatgtcatagtttgtttgaatcctgatatatataaaattcaacttacttgatggttcccagatttgttaggataacctaattgtttcttcgtgctcctgtcctgcgctgatacaggggcttggaaccatcgatcttgaacctatgttggatggagctacaagcgcttccccaacaagaggatgtgagtggattttttgttagtggtcaaaagtttagtttttgggtgtggaacttatgttttgttgctttatacaagtagcatctgttggtggattggatcagctggaaagtgcatctccggagaaaataagttctgttgaggcggattgtcagcaagatggtaagaaaaggagtatggcagaaaaatgtttctgctcttctgtctgaggtggcatctcactcttgaccttgaccctttaatacactaggaaatagtgctcagaatgagaagcaattacctcctgaaaagagctacagggctgctattttgaagaaccgatttgcagacataattttgaaagcccgagagaaacctcttaaccaggtttgttgtgcgttccaagttccaacccactattctgggtcctttttgacctttgaattgatttttcgtaaattctatgtgttcctgagatcagaatgacactcgagatccagagaagctgcagcgtgagagagaagaactcgagcttcaaaagaagaaaggtttgcttccttgatttgctaaatcaactgtagttggtgacatttaccagttgtaagtgataaaagcacactgcaacctgagtttataatatgtgccctttcttaacagagaaagcgcgattacaagcagaagctaaggcagctgaagaagctcgtagaaaagctgaggcacaagctgcagctgaagctgcggctgaggctaagagaaagctggagcttgaaagagaagcagcacgccaggcattgatggaggtaaagatgttcattacaacgaaatagtcattactatattataatgggtgaactctatcattaagaaaattggaatatctagtcccattttttcactgaaacataagttttcatggtatttggtgcagatggagcagtcggttgaactcaatgagaacgcaaagtttctcgaggatctagaactgctgaaaacagtcgacacagaccatttgacaaatacaatagaggaggaggatgggcctgatgttgggttgcgtagtttcagttttgggggtagtaatcctcttgaacagcttggactgtttatgaaacaagatgaggatgaggaggaagctgacccgctaacttcgccagcccctgaaatagatatagaagagggagagattgattgaggttgtatgctgatccccaaaaccaaacaatagatatatctgaattctgaatccagaatccatcccaaaaaaaaacatatactgtgagcttcaagtagagagggccgttcagactgaggattggattttattggtactgagagtgggaacgtagtcattcatgagttaagttttgcttggaatggtcgtgagaagtgggtcatcgtctttttccctttgcgttgtgttgtgtgatgttggtacgggttatcttcgtgcttcttgtcgaattgagtatattgtatcagtaaagaatttataacttaaaaagagccttatgtcaaatacgacgtcgttttgtatggaaatggattttttacaccgctgaaaaaataaaaagaaaactcggaatctcttcttcttcactcaagaagtcgctctgaaacttggaaaccacatttttgttctctcaagagtctgttttttttttctggcgtaagtttgaatttcatgaaaagttgttatcgctagtcgatttagtgtaattgatatcctgattaaggcttttctctgcatgccagccaatcaggctagaattgtgaagtataaaagtaagcaaattgacaatggcgactccgacggagctaggtttctcttcacctggtggtggtggtgacgactctgacgataaccctccacagaagcgtacttcaaaacgtactgcttccgaaacagcaacagaagaagaaacgaagaagaagaaaaagaagaagacgaagcacaacacaaaaatggcttctcctccgagcaaccggatctggaacgaagaagacgagctctctatcttaaaggtatttcctactttgtctcatctatctactgcatttacttgattgcgttgcgattcctgaaacggcatatctataattctcagggattggtggattttcgagctaaaacaggactcgaatccaaaattgattgggatgcgttttattgttacgtcaaaggttccattcatgtgaaagtttccaagtgccagcttatgagtaagaccaggaagttgaagaagaagttccttgatcaaatggagaaaatcgatcaaggaaatgatccacattttactaggtctagtgaaactgaagcttttggatattccatgatgatttggcgtaaaattgatgctgaatacactaatggtgttatggataaagcacatcaaagcgagagtggagtaagtgactaataagagtttgtcatttgtttttgatacacaatcgtcaaatctgttacaataaaacttgcttaatgaattgtggtttaagaatgatttggatattgttcaattatatggtttgttgaatcacaggaggaggtgtttgaggaggatgaggaagtggccttaattgacaaaggggctgcgaaaagtggcaagtcacctcatgaagctgttgttgttgttgacaaaataactacgaagaagaacgggactgctggaaaagagagtgatgatgatgatgatgatgtgttgtgtgctgtgcgggatgcgtttgagaccaccatgatgtcgcaaggattaagtgattatcaaaagaagttgcagcttgagaagctgatgaaccttggaactggtaaaagaagagagttgagcaatgaatggaaagcactatgtgttgaggaactaaaattgaatatcaacaagcttcgattttccgccaagcttgcagaggcagcaaatgatggtaaataaaatgaagaaacgccatttcagcatttggtgtttgtcgtttcggaattggcttgaaaaatatagtttacttcttacttcttactacttattagccatagaccatttacctataaatgtggtttatgtctttagctttactacaacttctggtgattgatctacttgggaaagtatttgtaccatttcactttgatttttaccatcacacctcagtgtccttcttcatcataaaaagagatgatattataaagttgttttggtcaatataatatatgattaaatagatattttgatacatgtgtctatcagtctatcgtttaagctaaaactcaacgagacgacagacgataaaaagggattaagtttcttctgtgtagattattcttcttcttcttcttcttccattgtctcttgggttgagattccgatctcaatgtcgatcaatatcggagaaatctcaattccagaccttcctatcttcttctccatgttcttaaccatctacctaatcgcttacttcatcgtcttccgcaattggaaaccacaaatccgtcccgaagcttcaagctgcctgatctcaatcttccatggatctccagcggttttcctcgccacacgcgcagttttctcctcctccgaacgctccttcgcctccgcaaacaccgccgcacaaaacaccgtcctcgatttcagcgtcgcttacttcctcaccgatctcttccactacatcgtcttcaaccctaacgacgtactcttcatcggccatcacgtagccactctattcgtcttcctaacctgcagattcctcgtcttccacggggcttgcgccatcttaggcctcctgattctagctgaagtaacaagcgcgtgtcagaacgcgtggacgctcgccggagcaaggaagaatgatccggaatcacgattagctgtgaaagtgtacgatctcttgtctcctccgttttacgccttctacagtatcgttaggggtgtgttgggacctttgtttttcgggaaaatggtagcgttttacgctcgaggtggtgctcatggtgtgatacctaattggttgtggatttcttgggcaattgttgttggaattgctattactgttagtatactttggatttggaatctctggatagaattgtttagtgaaaggaaagctaacaaaatcagagtagacaagaaaattagatagtttcttctttcttctctagatcattgtttgatcttccttttcatgtactatatataatatatataccattattattctcaccttttagaattcctctaaatgatgtatgttttggaataatagatttgcttttgggtaagcagtatgtgcaaaatgcacttttaattcaactctgtattgttcagaagttcttctcttaagagtttcttccatacacatatgtcttgtctctctgctacacttggttgctcacatcttgattcttgatattgatgagaaacgttttctttatgaagtgtgccattcttggtgagttatatttggctttataactctctttgtttacggccaacaccaagtcccctgaaaccagcaactggtaagccatatattcttttacttggaagaatcaaaagttagctggggaagtgtaagaaattacgaaacacagagattcatatcttcgatcattggattgtgaacttttcatgtgttgaagaggataggaagagaattggggactaaacataccatccaagctgagacatggtgttaggcagtctgttgtggaaagctgaatgatataccatttggccaatgaatagcataaaatacacaaatttaaccaatttactgagaagagcatggaattagagaaaaatcttttaagatcaaataatcccaaagataataaggaaaatgaagggattgctcaaacaaggggaattataagggacacatacaacaagtcattgttgaatctcatttcagttcttggccttgatagaatggttctccttgattctagctctggtatccagcttcacaaaacgtttaagatcatcaaaactaagagtctcaacgttcttccttctaagttcgctaagcgccggtcgcttatcaagcagatgccataaataatcagggtgatctgaattaggcaagatcttagggtccaatccatctttcagagtattagcactaacaaccatactcgatttgatctctttgctcaagttcgatgcttttggtgcatcattacctccatctcccctcccaaccttcttcgctttaccagcagctgtagcaaatgttctttggcacacaaatcgcattacatctttggatctagaaatggaatccccaaacattcgaataaggttcatatcaacaaccttatacctgcaaattcacaaaataaaactaaataaatctacacaatcctataatgttcgttctcggatttagatcaagattcgagttttgtcgaagatttttgggtgagggtttaactcgcaagatagagataggtagcgagtgcatcgcgggaactggtaaaacttattaaaaagtaacggaccggaaaattaaaagacccgtctaaaagcccaccaatagtaatgcatacaagtaacacgtggcaggtatggttgaccgagtgagtaacagaacgtgagaaaaccgacccgctaaataagaacccgcccaatataataagctttctccttaacttctgcctcacgcaaaaaaaaaaacttcctataaaacctcatctcctgcgttctctaactacttctcacctatctgacaagaaaagaaaccctaaacaacataaaaagaaacctaaaatccatacaggagacattcaaagccaatcatgccttggtcaaagttcacaaaggtagctctaggtctaggagctgccatagcggctgtgagatcaacaatgttcaccgttgatggtggccagagagctgttatgttccaccgattcgaagggattctagaagaaccagtaggagaagggacacatcgtaagattccgtgggtgcaaaagccgtatatcttcgacattcggaccaaaccctacaaaatcaataccgactctggaactaaggatcttcagatggtcaacctcacacttcgtgttatgtttcgccctgatgtaagttcccgcgaatatccaaaaaatttcactaataagattttgtgatatatatgtaaaataatatataactgttttccgtgggttcgtgttaggtttcgcgcctctcgtatatataccaaaacttaggtctcgactatggtgaaaaggtcctaccagcgatcgggacgaggtggttaaagcggtggtggctcagttcaacgctgacgagctcttaacagaacgtccacaggtctcagctcttatacgcgaaacgttgatcaagcgagctaaggagttcaacattgttctcgatgacgtgtcgatcactggtctctcatacggtaaagagttctcacttgcggtggagcggaagcaggtggcacagcaagaagctgagcggtccaagttcgtagtggcaaaggctgatcaggagagacgagcggctgtgattagagcagaaggagagagcgaggcggctcgggttatatcgaaagcgactgcaggggctgggatggggttgatcaagctcagaagggtcgaggcggctagagaggttgcgattacgctctctaattctcccaatgtcgtctatttgccaagtggtgggaatatgttgtttgcaatgaacggtccaagcaaagttgttgcttgaattagttgcaaaaatatggtgttcaatggttatattgatttgtgtgttttaagattttcatttttttatatagtttcctagtattggatcaccctagtatactccagttgagactgttcttgcgagtctgagactcgcacacatgacacatgacacatctactgttaagtcgacattgacatcaaattaaacaatcactgtgccaatcaaacttatgcatagacctagagataattaagtagtccaagttcaaaggttgatctaacctggatcagtgcccttggtagctatggcacatacttcctcactagggaaaatgggagctgattatccagcagctttcgattagatatcaacaaacaaaatgcaaattaggttatcttagaaagaaaaaaaaacaagctattcatcggatcacaagtcacaagtgtcacctcgaaagaaacttgggcccatctatattatcttatgggccttatcgaccgattcaaatattgcaaattagtgtcgttaaccttttttgaaaacatacggccattagtgacaatttaattaatattctacaaattcgagcagtgtcttctacatttctttgtaaagtctttggtttttaattttaaggtcaagttcaccatgagcgaccaaagttttgaatttttcaaggtttttattttcattttatcgttgtatggagaaagtttcttatatcttcatttgaacattgaatagaattattaaacattataattcaaggtaggatggtcaaacaattattctagatttccctcttaaattcccaaatttaacataatttaagcttttggtaaccaaaaatctaacatcttacaaaatttaataaatgtttttggcccaaagaaaatttatagtgctggcaaaagaaaaattataatgaatgtgctcttaattaaataaccaagatgagttgattaattatggattttgtaacaaaataaataatttaaggtgctgtcattttgcccacacgtctatgattaaaaacataatgaagtgtcaataatctctatgattaatagttttggaatcttactcaataagttccaatttataaaatcagtgaatagcaaagatatataaataatacgcaaagagaaaagaaagaaagaaaaaaaaaactttcagcatttgtacgtttctagaattttacaaatcacaaaagcaagagagaacattcgtgttacggtaaccgcgtttcagaggatcattttctcatatctctctcgtagccaatgacactttctccacaatcctctctctttcttcttcgtcgtcatcatttgattcttctctgtaaattactctgatttttgtagaaatcgaaactgggcttgatcaattttgactctttgcatccaatttcgattctaatctccgtaattgttctccgaatcgggtcaatttcaagttgggaaacaaaccctagcgaacctccattgatgtgatctctctctctctctcacaacttgagaatcaactctctagaaaatatcagaaaatcgttgaaaaaatctggtcttttctggagggaaatgccaggggtagctgtgaagctctatagcgtcttctttaagttactattgaaacatcgtcttcagaatctgatttcaatttcagctgctgatggcttatctgattcctttggtgtttcgacccgatccgatgaatccgtcgccgccgcgaatccgtctttcaccgacggtgttgccaccaaagatatacacattgatccaatgacgtcactcaccgtaaggatctttcttcccgaatctgctctttctccagaaccagattcgttacgccacaaggataattataaccaccaacccagatctgatcggagacatagctatggccctaatcataactctccggcaccggcggagaggaacgaatctcgaaggaacagctatggttgcaacaacgagaatctagaaccttatggtggatatgcgccatctgcgaagaggaattctcggaaactaccagtgatgttgcagtttcatggtggaggttgggttagtggaagttctgattcggctgctaatgacttcttttgccggagaattgctaaagtctgtgatgtcattgtattggccgttggttataggcttgcgcctgagaataggtaccctgcggcgtttgaggatggagtcaaagtgcttcattggcttgggaaacaggctaatctagctgattgttgtaagtctttgggtaatcgacgtgtcaatggcgttgaggttaagaagttgaatgttcaaggacagattgtggatgcttttggagcttccatggttgagccttggttggctgctcacgccgatccttccaggtttgtatctgtgaccttacttgcttgttgcttgatgtgtatcttcccaatgaccagttgtataagctgtgatgcttaaagacaaaaggaagtatgaacttaatcagttaatgagctagagacacctggagttagatgtaaacgaccttagtatggattgctctcaagaatttagatagtgtttagaatatttggattttgatgtgatccatgaaatgcctttaggtttactgaagctagaacatgctttgattcagattgttacagcgatgttggtacttggttgcagagattgcttcctggaatttaaacttatttcggcatataagatcttaagaatagtttcatgttgatctaggagtaacttggtacaaagtcaggattctttggacaactagttagatgaactaagatagcttatcttccattgattgcaatctcacatcaacttctgtgtctcaacctgttgcttcatatgatgttaaaacagatgtgttcttctcggggtgagctgtggtgggaacatagcagactatgtagctcggaaagcagtggaagctgggaaacttctagaaccggtgaaagttgttgcacaggttctaatgtacccctttttcattggaaacaacccaacacagtccgaaataaagctggcaaactcttacttctacgataagcctgtctctgttctagcctggaaactcttcttaccagagaaagagttcgactttgaccacccggcagcaaacccacttgcccataaccgcagtggaccacctctgaagctaatgcctccaacacttacagtagtagctgagcatgactggatgagagaccgagccattgcttattcagaagagcttagaaaggtaaacgtagattctccagttttagaatacaaagacgcagttcatgagtttgctacacttgatatgcttctcaagactcctcaggcacaggcctgcgccgaagatattgccatttgggtcaagaaatacatttcactccgcggccatgagttctcttactgaaaatttttaccctgttattattcattttcttccttttttttgtgtgatagcaagattttctgggtaggattagagacaatccaagatcgagtcttttggcaaaagctataaaattttattttttggttacttatgtattcatatgtacgtattctgaataaaccatttttggttcgaccaaattttcaagtttgttcttggtttgtcatcattcttgaatgctgaaatcttcaacttcttttgtaactttataatgaatgatgaagatacggaataataatagctaaaaagccgaagataaactggaaagggctcagttcgaacaaaggtttgggaattacaaatcacatttaaacagagatgactagacaaactaaaaagagtattacagaagaagaaggagatcatgaagatgattacttggaaactttcttcttccctgcaatagcaattttcttgcctttaagagtcctgcagttgttcttggttctctgtccccgacatggcagcccttggatgtgccttaccccacggtaacactggatctccttcaacctcttgattgcaagagcattgaacctcctctgcacaacatccacaacacaaatcaataattcattcacaaaggcctaagaaccaaatcaaaacaagaggaaacccaaactaaagcaatgaaaacaccaaatagatagcagcctaagttcttctccaatcttcaagaaactgctcgagaatggactgacagaaactgaaactatgatgcacattactcatgtcctaaagtgtgtaaatgtaagggaaagtgtattaccagatcaccctcaatcatgtacttggagacttcatcacgaagaatgatgagttcttcctcagccatgtctttagtaatcttgttctccatctgaagatcaacaagaatctgacgagccctagttcgaccaatcccatgaatgtactgaagagagtactcaattctcttattagccggaatctccactccaccaacacgagcacatctgatgcttagactctgcttctgcatttcattacaaaaaaaaaaaaaaactttaaaaacacagagacaaattcccccaaaaattgatggagtgttctataaccacccctaacccaaaaattgacgaacaagaatgaagtaacacataaaaaaacatgaagtcaagctcgataaattacaacatcatacgcaagagagagtccaagagaaatgattacattgggagtgtttgaagctgggagggcaagagtgttgcgagagagaggattggattttgcccaattgcaaatgagtgagagcgagtgcgctacgggcatcgcaaccatctgcgccattgttatgttctcttcctaggaatttcggattctgggaaactaattcagaggtgacgaagaagaagaagaagatgagctgaacggataaggcaaacgtcgaatccaaacgcttctcttgtttttgctccgtctctacttactctattcaattaattgcttacaaaactggcaaaataaatacttgttgggctttgttttttgttgagataggctcgctattgtataacacggcccaactagtggactataacaaaaatgcaaaaaccgagtggactataataaagtgatacaactataaaatgaaaaaaaaaatgatttacagatattttcttaacaactaagatgaatggtgtgatcaatgacacacatttgatcagaagacgaaaggcatgagccttggctccatgtgggcacgtagctattgaggatagagtcatgatagaaaaagattgtataaaaaaaatggtaagtgtatagatgaaaagtcaacggatgagaatgagtcttgttaactatttatcgagatggtcgttcacttcgttattgtcacatgttgttgtattttaaggtgtttggggattttttccatcttgcatatatatctgattcattggagttgtacacttgtactcatggttttgttggcaagtttactacaatatttcgagtgttttcatgatgtttattgtttcgtactttacacatgaaactagtttaaagcttgtcgttcttctaataaggatatcactcattgattttgacaccaacgtctgaatagtgaatacaccattatttgttgaggcgtacccattactgtcacgtaaggcctgcatttcattattttgtttaggctgacccaatttattttatatatttacttcggatatttatctattctataaccttaagatgaattagttgattttaaaaagaaagtccaccttttctcaaacgggccattataatgccttgattagaagatttggttcgaaaaagaggaaaatatgattaagataataaaaaaaacatcaagagataaatgttttattatgataggaacacaacatcacaatctttgaagaattaacaaaaaaagaaggaatacatgtgaaaattaaaataaaatctcatagagagtaaaacatattctgaagatgaatggcaacacatctcatcagaagacgaaagacatagcagcgaccaatgcggtggcgatgagctgagggtaggcggagaaagtggcggcacttggagacggagccttagccatgggtggcattggagccatagccggaccatggtggtgggttccgttgtgcgactcagcagtcatgaccatcacggccaagacaatgcagatgaaggcgaagcggatcaaagaacttcttggtgccatttgaatgttcttctcctttttcttcttatttggtttctttctttgttgttctctgtatgatctatcaacaaagggggtcgaatttatagagagagagaggggtcctataaaaaatgtttagtgggttaaaagtcaacgcatgtgaatgagtcatgatgttgagacgacctaaattcgttataatttacatgttgtttacttgaatatttaaaaaaatggaaaaaaggacagagtgatcatggttatgtgtttgaatttgttagtggacacccatttatatgttcgtgaatgttctgccgttctggaacagctgttacataagagggacgtttcttgactaagccaaattgacccggtttgattagggattgattccaatccatgttctgttgccggagaccaaagaaaatggtgtcttttgtgaggccgatcaggggctttggctcttgatgaagttcaaaaagaatagaaatgttagcgttggtgatagtttgatatttccaataaagcattccaactgtaccaacaagttttaaagatcaaacatccgaaagtactatacaatcattcttgaaacttgaaagcaaaccagtaaaacttaaaaagtaacaccatgattcttttaactaaatttagcaaatgttattattaatatgattatttatctgtttgaaaaaactgtaattctagtaaacaaacaaataataaaaagaaaattatttgataaaacggtagatacagtatgtttgcaaagaaaaaattagttaacgaatggaaaggagaaactgatatgctaaacgaatattctacgtaacgctatccataactacagttacaatttttaggcccaattagtgactatatgaagattaagttggacctaaagagacagtgctttttagtgggcctaaatatgattctggtcccttgcattaataatttttcttacacatcgtaggctccgtatatactctttttcccaacggtctctcacgtattatttattgtttttgtgattttgtcgaggtccctctcatatacaacaatactcttctatattacatttttctaaattttagttcagttcagtgcaccaaaacaaaaacgaatatttggttagctgcaattttattttcttgatgtaccacacaaaagttaaatatattgaagtatagtaagtttgttgactacctataatgtaagctatacggaaaagaaagatgtatgtatatatatatacatacacgtcgactataaatcaaatatctaatttcttttaacgtctaataagtaataatcgatcggttacctaggtttctatagtactttaatggaaattgtaatgtttacattatctgtttatcacattacattatatatgagtcatggcgggtttttttttctttgggtgttaattaagagtgtggcatgaagggttaaatattcaattaaggaaaaactaatgcaatttggttatataatttgttttcctaacagatttctaaatttaggttggtaattaaacattataatagactaggacatatagcctaatgtctttcagaattgatctataattagatagatttctaatatttgatccctatttggatatatgcacataccttcaagtacatggcgaatattcctccatgcattaacgcgaaaccccactccgtatttggagtattttaatgcaaattgttcctaaccttcatttcttctaagcaacttaattagttcaatatgagaaccttatttcaaaatactttaataaacaaactaagaaatcgatatgattaaaccctgaaatctatataaaatagatattcttgctattaagtatttacacatatacagcagttaacatatttggaacaaaatacaatagtaaacatatttggagggaaaatggttccaacaagtgtagttttccaatgacatctaatatcaatcactttgcttataaatatattttttcacttacatttataataaataaggggtttgtctgataattaatatgtatgtaaattttctaactttgataagtacataactcttttaaatatcatcacgataagaatacgtgaagataatgttttggacatttcaaggaaattaaaatcttataaatcttgtataatgatgtcaaaattaataatcttatgtacatactaatcgtcgttaatagtataccattgacgatgctagttcagttcttttggcattcagctgactagatgagtttttgtttatttaactgaaaatacttaaatataatagcatgactagatgaattcaaacttgactttctttattaagcaagttgcctaatcatgacggtgtagtgcaaactaacaaattatgacgtaaaaagtcgagttcctcaaaatgtttttaacaagaacaaattatttacaaatagaataatgaaaaagagaagatgccttgatgacagaataagcacaaggctttgaagaggggaccgatgaatccaaacaaatctcaaatcgtttcttttaaccaaacttttaatcaatcaatgaaattccttcaattaccaattaaagtaatatcatatatcatatggtaatcataagcttaaaataacaattttgcaataaagcaaacaaataattaatcattatggttcagttttttaactcatgaaagtcatgttgccaccattatctacgataaaataattagtctgtctttatagaaacaacaaaagataattatgcaatgttcatatcatcatatgcatatatgtacttagttgattgcatttaatttatctacacctattaaattaagtatggctttagtgcaaactttgataggtaatgaatcataagctcaaaagaagtttgtccataattattgtaatacaacctcacacacttctcaccaaatctttctttaattgtctccgcaatcattatttactgcttcacttattactagtgttttgctttaaatttggatttatttgtcttttagcctgtaagtgacctgtcaaaggagagaatctttgcccttcccaactcacctcttattatttataagtaatgcccattacttgatccaacgctctcttgtttatatttttgactaactcaagctctctcggttttgctttaattcagcattagttatatgtgtgatttattagcttgccttagaaaaatttcaatggggagaaaaccgtgctgtgacaaaattggattgaagagaggtccatggactatagaagaagatcatagactcatgaacttcattcttaacaatggcatccactgctggagaattgtccccaaactcgcaggtacttcattatttatacatgcatgcattattaggtttcctttatattcgttttttttcttggggagttaaacgtttacgtgtacatgaaggtttgttgagatgcgggaagagctgtagattgagatggatcaattatttgagacccgatctcaagagaggtggtttcactgatgctgaagaagatcggattatggaacttcactctcaacttggcaaccggtacgataatctgaaaaataaaacttatccatatattttcattagccggcgtcaaactagctttttcatatgaaatctctctcgaatgtaacaccgtatactttatttagatccaatatgtttgagtcatcttccttttaagtcatataaatatctttctaagacttgtgagaactatttattttacattggttacaaaccatatttacaccaaaacttagataattgacgtatatacttgtgcatggaagtgggttaaaaattaaaaataaaagtttgacgtatatagtacttgtgcattgaagtgggttatttctgagtgaagaatcggctacgaaaacaaattatgtggagatttctacatacgatattactttttgtatatataactttcatgccatagattatatttttttggtttaattcatgagacttgtaatataaagtgttatatattgatataatcatgttatatgctatacgctttaattttgctttttcatgttttatggatgctttggacattgtaggtggtctaaaattgcctcgcatttctctggtcgaacggataacgagatcaaaaaccactggaatacgaagatcaagaagaagatgaaacatcttgggttggatccggctacgcacaaaccgatgaatgatattactcatcaaaccgatcctaatcaagataaaaaaccaaatatgtgttctaccatcaatgaaggagaagagatcaaggatcaaactccaaaagatgatgttatcacagaaacaacaaaaacattaatgttatctgataatgatgaggaacttgtggcgaaaaactgcaaaattctatgtgcagaagaagtagacttggaatctctatttgaaacgcaatgcaatgagatatcctcttcgtctttctcttcactatgtagtaatatttcaagaagtgaatcttcatcatatcttgcagaagattcgatctctttagagcaatgggacttggatatgacggatccttttgtaccatgggacctcttcgccaatcttgatgataatcttttcctcttatgatgaatgtactataacattgtaatataatatatctatataattatcgcaagtaattagcagtttcttttatgtaaaatgtggattatgcatggcgtgtgatgttgtatcataatttgcccgtacaatatgtatgcatatatataatgactaattaaaaaggaatacatatatgatgaaaatattttactcagttgaataaactatatatatcgtttgttttgaaaagtataatgtcaattttagtttgatctgtcaaagtcaggatcactatcatcgttgttgttcaaataatgtttcattgtcaaattggaagtgttcacacaaaaactatatatcgcttcacacaaaaacgggcacataggaaacccagtcatatatcccacatgtgcgacacaataagttttgtattaatttatattatatgctcactatatatgttatcaatgtgttctttacttctttatagttaggtgaattaggtcaatgcgacctttcgtggattagaaaaaaaacatagaataaacaaaacttttgatattaacaaaacctttataagaaaaaaaaatgaaactcacgaaaattgacccgtttcagaattaaatatgtgttctccaaaataaatggtacctacctacttttacaaaaagaataaaataacaattgtacctactttcattcgagagaatgcatttggttattattattactttgtagtaaaagaatcaatgaagtaatcacttctactaaaatatcaaataactcttattcttcttctttaagaagatttgatttgatcggaccaaaataaattaaggttaaacattttttaaacagttttagatcatggtgatcatagttgttgggataaaagccaatgacgacgatgttgcttgcgtcaagtgcttggatttttgcaatcattgaattaacttctatacttttcataattatattattaattgtttttaacaacaaaattttgagtgaaagaaatataactaaactcttacgtgtaagcgtacaaccttataataactcatcaaaaaaatttacctgttaagaataaaacttgtaaatgtttaaaactctacgtcttcgtttatgattttaacatgaacataatctcaaaccatctccaaagctgtagacaaaaattcgggaaggtagacaaaataagcccattgaattgaatatgggccgtatgagcttaaatttatttgctgatgatgaatcagatgcttccattgagcaaatgcatgcatgccagagaataccaaaactatcattcattcataattaagtagactaaacggaacacataattcatgatgaatacaaccaaagtgttaaaggaaaccaactttatattacatccatattaagcacctcgtgatactaagctacaaaatataaagagaggctgaagaagcataacaaaacagcaaaggcagctggaggagcagcagacgtggtggtatggtcgcgagatatgacctcgacgatcatcttctgacctttctcgcaatgaccagaggttccgcttatgaaatagtaagggacagagtgatcaaacatgaacctggttttgcccgtattcgagtagaatctcgggtgcgacgaattgcattgcttgtaactctccttcgtcacttgcatcactgagtctttcttgtacttgaattctttcaaaccccaccaaaagaaacagaacaaacgtaagtaaaataaataaataaatcaaacttgatgttaaaaagttctcgaaagtttttgagttgggaagtatgcttacgaatgatgtctccgacttggaaccgtttattagaagcccaatcattgaaactctcagaagaatttgcaggaggaactacccaattgagtttgtgttcatatgaagagacagaagctgaaatcgttaagacaataacaagccaaagaaacatatttaaagtctcagttttgatgttctgcgcctcagaatgatcagcaaaaatagagtaaatcctggctgataaatttcggattttataagaaatggagtagggttggttacgaagaagggagagatggagatagtggagagatatgtgttagtggttggttaagtaacttattatttctctggtttttttcattgcaacacgcgggaacagaggacgaccaaatactctcagctagtttgaacaaaataaataaaaaaggtttattttagagaatttgtattttgtagttaatactatctcatgaaatttatgaaattatttctttttatatactgattaatcagaattaaaaattcttgtactatatgtgatcagactataagctctttttacattagctcattaggctcaaccttctcacctctcaattctcattctgtgaaaccactcgtaagccacaccacttaatccgttccttgtgcaaccgcttataacagcattgtaagtcacaacgctcggcttaataataccttttgaaggcatttccttgagaagggtatccaaaagattgagtttttgctgtcctgtcaaaactgaagccatggtcgtgtacgcgtaaagatttggctcaatccctaccttaaccatatggttccaaacccgtaacacctcatcatataacttccctttctcaagagcactgagcaatgccccgtggcttttcaccgttgtcaaccattgctttatagatttgggtcgcagctgaagtctcataggcctttgaacacactacaagaactgcgttctaatgtctgctctgcggtttcaatcctttatcttccattttgctaagtagcctaactcccatctccatatacctctcctaccagccgcactcagcaagatattgaaataagagaccactaactcgtaagacaaattgttcggttcaggtccttcgtcaagaagatcctcgtacatctctaacgcgctgccaccatttcttagccttacccatcagccaaatcaaatggttgcagactaactctttactaacaatataatgttcttcacgtgtacatgcccatataagcctctcgtgctcttccccactcggtttaagccctgcattgtccattgcatataaaaagcttcaacactcttgttgtccaattttcatctttcaccagccaccgcctcatcagttggtagcataatcttcccaatgaagttttcgtgcttaacaaactcactctcaattgtaatcagcgtcattccctacttccctctttgattatatctctctcaattcaacagcgaactcgagagctcccataccatcttcatttcttctgtagacgagcaaagccgttgatatgttagatcgggttaggctcaaaacctttttccctgactaaatcaagaatcccaagggccttgtgacactgagacttcccttcttccatgtaaataaccatcaaagtattgtaagtacaatgtttggaacaatcccttcttcctccaaatcactcagtatattctgtacttctccaaacccactcgactgtttcatcacaccctaaaggctgttatatataaaaaggtttggacttatgacacagcctgattcacttcttcagtctcttgtccttgccaaaaccccttatcatagcacaatacacttgtagagttaattctccattctccttgagaacaacatccacatcatcaatctctatcatcttgaattggttttttctcctccatttacagcgtgtgattcataatgatcaacagaaactgaactcgaatcttccgtggaaacttctttcccgagctccaagtgctccgtgttccatcctaccccaaccgatgatcccagcaaacttctatttggctcacacagaaacagaacttttgaggtaggattaatggccaaaccttcaagtttcctataactcgaacccacagaaagcagcatattcaacaagacaatgcctctttctagtcagaggactaactacaaaacaagaacaatccaactcaaattccaatctcgatccaactaaatgaccagaatttaatagccaaatgcttaaagcttgcatctttttccaacacaaattcaccagcaagaacaatcaaagagaaaccaaacactcgcaaaattcacaggaataaacaatttttaaaaggtcgcaacttttctgtaaaattcatcacctaacacaacaaaaccccgaataaatattcttcaacaatctggaattcgaaaactcagacgcagcccaaacagatatggttttgggttaagtgatggtgtggtgctcttgtggccatccaatcatctcccatgagcgggggtaagctacaaccgctgcaagaggaaaaacatgtaagtgtaacagtgtcgttttgacaattaaacccaatacattggcccaatactcgtgttttaaggccctttacggtgataatttatagttttttttacgttttactttttaatttttatctctatgtttttattttactgcaaaatatggacttgatctatacataaatgctataatttgagaaaaataaaataaagtaaaaaaatttgtgtatgaacgtgtgttagctttgataaattagtttttttgtaagtggtaactataattttaggttacaaaaattatattctaaagtatttttatgtttattaattattatcattcaaacgtgaatagattacaagttccacatgacatagatgcattgaagaccatgctttaggttgggtacaaaggatatatgttcctttgtaaaaatccaataaacatgtctggcccatgcacataaacatataatgcatgtataaaatgtccacaaacattattgtgtacttatatatatatttccccttcctatgtttacatatgtgaatgtatatataattatgatgggcaaccatgttggtggatcacgattgttaaaggagaaatataaatgtggattctccatatctctaaagccgtcttctagctatgacaacatgttgctatgtcatttcatcttgtctatcaataatgaatgaataatcacatacatatgcatgtgtatgtatggtttggttatgttgaagatccatgacttagtcggagattaatcacatgtaacacactgaaggtaatcactagacgtacggtaaaatatctttgtcttttgttaagattaataaaaagttgcaaaatgattaagatttggatttgtagtagacagacagactgatattccccaaattataagctgagctgtttgatctctataagaatatcttgtcgaagaatgaagattttatttttagattcatcatatacaaactcacacactgatatgtatgttcttataaccttgacctgattaataagctatttcacaaggtttccatgcattattaatttttcaaaatggtcctactcctacggtcctctcctaccacatggcgatcttttcacaagattcaaatttacccatccgaaagaaacgtaatcacttttcattgacattaaagaaacaaattaaactagtgtcctttttacttgattaggtacatcatacatggttatataattatatcgtatgttatttctactctgtttttttttctcaacatttttgcattgtgaatattttcatgtattcgttaatctagcaccatacaaaagccttcgaaaatttgtaatgcatttagtatcataatagtgttgatagaagaaaaaaataagtatgaaaataatttgtcaaactgagataaactttaatacaacaaggttggtacgccgaaattcctagacaaaacaaagcctacccataatatataattttgattaattaacattaataccataatgttgattgttttctatttacgttttgtcgtgttcgggatcctccaatcaaggaaacattgtttatcagcagtcgaaccatcgcccatgtgctgaaactcttctcttaacagtctcgatcaatcctatttaaatctgatttatcctttgtcggcacttattcatggctaatatcttgtactataataattgactccacatacataattacataacataaacaaaaaaggtatataaaagaggaagacttgttcattatataaaaaacaacttgcacatgcaagtatgtatgtggtttttgttcttatcttaacctctggtctcttatataaaccacctaaatgtttccatgttctatgtatcccaaagcttgagagaaaacagaaaagaaaaaactccatagaaatcaaaagtagaaagaaatgatgaagtttaagaccaagaggtttgggattagatttggatttggtaaaagaatcaacaacaaaggcacacaacaagatcaacaacaaaagggagttggtaacaacaacaacaatagtagctgcagcaactgtgagatcaaatgggaacttaggccaggaggcatgcttgttcaaaaaagacaagagagtattggtgaagacttgatctccattagagtctctacttttgctcattttcatgatctttccattgaagccacctccacttttggtaagtttcttgtccctcagcatttctcaacctttatgtttcatcttttgggagacttttaaatgactctttatcagattcataacataagattctatttatgggtttacaggagaacttaagatggtattatcattgcttaccggtttagagccaaaacaacaaaggctagtattcaaagggaaagaaagagaggatcatgaatatctacacatggttggtgttggggataaagacaaagtgttgttgttagaagatcctggcttcaaagataaaaagcttcttgatcttaacagcatttccactacttgtccgactataatcgtataaacaaaactaaacaaaattgtcaaattagttgttttgtcaatttctttgtgaaataatatcactcaagaaaattaactatagctatggttgtcatgaattaaaatagacattccataatatcattcgactatttctaagttgtaaacaagctaatatgtttacatgttgtaatatagtatatgtcaaagtttaagagctcatgttttaattagctgtttgctgaagaaacatttaaacaagaaaatatgatgcacccattaacttctcatttttattatcattattgttcagatgatttggtacaaattagttgacttttctaataagagaaccaaagctaggcggccaaacaaaaccgaaacttttgcataaccgagctggtcaagacccctatacagaccaatatcatcttcagttctcggtatactccggttgagccttaacttctcaacaagtcacaaaatagcaatatcatgaaatactaaacatccgtcacttaggtggtttatgaatcctctctttttacaaaccggccctgaaaaaaaaaccaatgacttattattaattatcagcaactccacgtatcaaccaattctagttctctcagcgagttcaatcatttaaatataattctacgtcatgtattggactcaaatgtgtgtgaaaattgtttaaaaaaacaaactactagaagaaaagcttactttaacacgaggacgtttctcggcattgagtttacgaacttgatatcgaatccgcttagagaaaagacggttttgccgtttctctttataccggagcaagctggcttctctatgccctctccataacctctccgtcgtttccatctccggcactgcccataaattccccgcctctccgccgtcattaaacccctaagaccaccaacacaactctactatcaaatcttgcttaattactagcaacaatgtgtataatttaagcgttttcgcaatttaagtatttcagtctgccgttacaactttctagtcaaagcttaaatattacaagtatctcagaagtgaaaaacaatacattaataagattatcatcattacagtggcaaaagaactcgtgactcattcaatatttcaccggttttacatatgtcaaattaattagtcaatttaagcattgattatgattatataataccagagaaaaagacaaatagagagatggtttgcttacatcagcggaagcatgcaagtccggcactgtctgcggcggttctccgtcgacataaagcgtacctttatccgaccaagcctccatgatctgctcataatcaagcttcagagccaacgaaggccggccatcgtttccatcgcctccgccgcaacaacgtggagtcccgctccgactcatcacttcctccacaacctctgaataactcacccaccgctcctccgtcgtctcctcctcctcgctcgctcctttcctcatcgccgtccttagaagggaagacgacgacgatccgtggtcttgacgatcatacggagaaagattattcctttctccgccgcaatctacatcggtggccgcggaggaagggaggagatcgtggatcgaagaaattgtactgtcggtggcggaattgaagaggtaagctgcaacggtgtcgtattgctcttcttctttctctcctccccccagtgtagtagtagtctctgctctcttcttctccttaaacggcgtcgtatccggttctttcttcttgctctgttttttgttgttgttcttcttcttgctcttcttgcttctgggattctcgttgatctcgtgagaagtgttgagctcgagcttgagactgagaaatttgggttttttcgtttttgttctgatcttacgagacgcgtcaagattggaagaagacttatcctccatggtggtggtagcttctctgttttttctcttcttgatcctcttcgatgatctcgtactctgtttttcttctccgacgaccggacttgctttgttgctacacatctccgatctctgtctctctctctctctaacactttaactcttctctgctttctaagttttgttctcattttctcgctcactcagaagtatgtaggtggagcgagagggaaagctgacagtgatggtaccttttgacacgtgtctatcagtcattggataaagctattgtaatcttggattctgtttggatgtgcaggagataataaggttggattagattactacattacatctgtgtcttaaacttctgattagttaattatatattgggtaactccattcttattttcaacttttcataaagcaccttgtttttctactttttagataccaacatttttataatgttcacattttttaaaaaaggtttgggatatgtgcattagtaaccaacatttttataaagttgacattttaaatatattttaattcaaattaacatgaggttgacattaagcaaaggtaattaacatgatcagtttttctttaggcatcaacagattaacatgagatttttttgatccaatattatatctaaagtgatataaatatcttttgacattcctccgtgagaagatatcatttgcattatttgtattccacgctgtaatcaaacgcaagggaattgtgaactctaaaattttaaaatccgaatccaattcataaattgacaagaacaaaaaaaaatgaacccacttcatttattaatttcgtaagggaaataatgctgttgaacttgggtttatcgtaaattggctaccaccaccgacagcaatgacaaatgaagtggtatatagtacagtagcatcctgaactattactgtcttttgatgacacttttcgtggaaatagattttcttttgtgataacattcacgtgaaaccaaaaaaataaagttctatacattttctttgtcttgtacattttctctacaaggcctgcaacgtcatttattctcataaagttgatgggtgtaaatttgagagatttaaaaagcctactttagaaaattcatatgcacaaggggatcgattttttacccttcaaaaagtggattctgtagtaaataaaacaatgttgatattctaatgccgtttaaacgtgatctattagaatattctagtattacgggttttcacatttttgatagaacaacaagaaatggacatgacaattgtctatgaattcgtgttaataattgctaggtttgactagtattttacaggtaaaacttaaaacctacgcaaaatttggagttacgaatgagcccatttaagaaacctgacgttggccaaaaagaaaagctgaagaggaaacaaaaaaaaaaagaaaaggtttgggagagagaaggaaccaatcagagcgaatgggaaaaagagcaattcttacgggtcctacctccattgactaattattttttgtttcggctcaaagattaattatattattttaacgtttttgttctttttatattttttattataatattttttgctttattttttaattgtaaaaatgccatacgataatatactgatttatttgatttcacattctctctaagatgttttaatttaactacgaaatttttatttttatttttgaaacaagataataatagaaatagtttataatattctctgttttaaaataattatcctctaaagtttttgcacagcaattataaaaaaatatttatttaattttatctacttaatatattttctaattttttattagttaaaatatttaaataataagtatataattaaaatttgtaccaaacatttacatttaaaaaaaaaaaagacaattattacaaaacaatattttagtgctagaacgacaactaaattaagacggatggagtacaacttatctattaatttaaatttttacataactttttttaataatcagtcaaaaaacacacaaacaaatatttccaaaatttaaatattttctatgaaatatttaaatatgtttctaagcttgtatttacacattggctgactttggcaccaaaagaggttagtacattaaagcatcctaaatttattaacttgattaaaaatgtgtaatagcctttatcatgaatattataaatagtacacaatttagtattagccaacaaaattttaaaataaaaatgtagaaatatccatttatatcattcatgatatctaattcacaacacatgacaataggaactaaaagaccattagaccacacaaatcataagcatttccaaaaaaaataagtttattaaacaaaatatgaaaatttgttctaaccaaatttcaaaatgacatttaggtttatatttactccaattaatctcgatttataaacgtatatataaaataaatttacggcctcaactcaaaagattatacaaatctctgatccatccaaccaaaacgtggacgacttaacttagaaagaaaagaagaagaagccgacggtggcgactgtgccgacaacagagaacttagcagttgtcacggcaccactcttgggtgactctgcagtgggtccatcgcttggtccatcagcggcggaagtgctgtcgggggtgggagccggtggggaggagacggtaggtgcctcagcagagtcgctaggactagaggcagagtagtcatcctcggggacgggtccttcggcagccggagaagatgcttttggagaagaggccgaagatgatttaggtgcggcggctggagccttggttggagctgaaggagccttggttgtggcagtcggagccttggttggtgcggcagtgggtgatggagattttttgggagaagctgagggagcgtcggcggcgaaagcggtggcgatagttaaagtcaatagaaccaaaacgacaaattgacgtgccatttttttttctgttttaatagtttttttattgagattaaaaggaggatactccaaaagctaaagcagtattttttatttatttatttttgttttatttttcttattctatggagaaatactgcaaaagctttaggatgtaagaataagacatgggggtgtgaatttatatgtttttgaagatgagaaaaattagggaaattgatggatatgagagaaacgatgaatcttataatctacttttagaaagtactttaaaattaaacaggactagaaaccaattcttctatttatggattcgtacacaatttttttttttttgaatactaatattagtagctgagactgagattttgacttttgtttgattcattgattgtattgcagaaaattagaattagagtctcaaaatacattttgggcaatcttaaagagtttactgtactttcgaactaagcccaaattaaaaccccaatatgaagacacaactgacacacaagtcattaccaaaggtccaaaacatacaaacttctgcatggtgaagttttctggggcttacggtttcgaagacatttgttaatgttctgacagagctagaaaacagacaacttctctttaattctatctttttgtttgtgttatatgcatcatttttttgtcatcatcgtttgatgtgcagtgcagtttttaattcctctttattttatttgcaatgttcgaattttcttccttttctactcttcaagactcgagtcataaaccaagcatgatattacgagtaaaagttgggtcaaataaattacgtagcaggttattgtaaagacctaatttctctcatttgtttgcttaagatttaagcttcaccattcaagaaatgacacacccaaataaaactagagaataactcacaaatcaaaacaaaaaaccataaacattagaatggccaatcaagatcaagatcaaatgttcttgttctgtaacaacttatgtacgtgtggtagattttctccggtttactcagaccgtactctatccaatctatcaacactcttccttcctctctcaatctgatgatgattctgatgatgctgatgatggtcaacgctcttccttgccttttcgtggaagtcaacgcttctcctagtccgatctaagtgctgctcgaacgtgattctcagcttactcttctttgaaggaccctttggaggtttctctttctcccttttatcaacgctttgcctcggcttctctcttctatctacgctctgcctcggcatttccaaatcgctgctctgtttctctaattgggccgtgctcgccctcgaggagagatctctctctacggttgtgatgaacttcttaaggtgtttaatgtattcaggatagtgttctagatcacagtggttaccgccttcgagccaaagcggttcatatttctctttagagagttcccatagttgttttccatgagaacagtcaacaacttcatcacaagttccctgccacaagagaagaaccacaaagagttatatacactcagttttcgaactgaaaaaaaggaaaagagagtaaaatgaatatggaactcacgtgaatgacgagaaccgggcaattcacaagaggtattttgtcgatattctgcaaatattgttaaaagtggacactgtgaaaaagatagaggaaagcaagaaaatcgaaaatgatccatctaagaatgatgtatttaataccttgaagatgtcgaaccagtatgtcttcttcactggatacattactcttagaccagaaagaatcgggctatggagaacagcagctcttaattgaggcaaccgagcagcaagatctaatgtaggtccacttccaacggattggccataaaggattatgtcttcctgttttgctccataggtttcctcaagacatttataagcagcttcgatatcagcatatgtatggtgctcacttggctgcagtcacacgaaaacaagttcggttatttagtttttcactcgaatcgggtaaaatcattatcgatatctctacttgtcgattctcaaaatgacaaacctttccagtagattgtccatacccggagtaatcgtacctacaaatacaaaagcagagaagcaacatttatagagctgaatcaagaagctatgaagttgttttggtttttaatgttctcaaggatctgaagttgagagatgcattggttcataaagattattgtgagctaattaaagtttccacacaatctgagacatagaaagagtttaagcatcttaacgcaaccaagttgtatccactatccagagagaaacacacaagaagacaacaaatcaaaatttgggaaaagacaatgaacaatagactcaaaaacaagtaaatgtatataaatgtttcaaccaaaagcttgatcagcaaaaactcgatacagagaaaaatcataataacacaaaagaacaatcaaacagtgtatcaaaagaaaccaagaagaataaacaaatctccagaaaaagaaagaaaaactccaaattcattcgttttcacttagcaaaacaccattaataccaaaacccacaagggaccagataaaaaatttctaaatagccattaaaaaaagtctatgactttgatcaaatccagatacaaaacagaacacaatttcagagcagaagagctaatcatcatcatcagagctatcttagagagaaaaggactaaaactttaacataccccatgagattaaccttaagatggatgctcaattcgatgaagagctcatacatctggcccagatcggcggcgtttccatgggaataaagcagagtagaggtagccatcggatgtctgacgtacatagccacgatctctgttcctctacgtgtcggaagcttaaggatttcaacgttttcacggtgaggaaatgggttcatcagaagaagtccggtcagttcatcgtaaaccagcttgtaagacgacggactcggcgggaagaaagcgaacttcgccgcaactgatgacgtcacacctcccatctctctctctctctctctctctctctctctctgcttcacagtctcttttagatgaagaacatttttgtagctgctgaaagatttgagattgaagcttttgcttgtctcgggaacggagagagagagagaggatttaggaagaaaaagtggcactttgaaatggtaaagcaagagaatgaacaaaaactgtttattaaagtttcgagctttggcttattattattttaaaattgccatattttaactacagaaaattgaagattactttccctgaaaaatgtttttttatgcaatctgaaattaaaagagattaagatattaaaactatagagattcgcagacgagttagagtttatatgtcaatggagttacattttttttataatgttacttttgcagataaaaaggggtttagagtaataatttagcgttggtggagtgataaatcaaagcttatgattaaacataaacatgtgtatttttatagctaggaatggcgaaatataagagtgagagaacatgaaaggcacttaaatgttatgatttaattggacaagaaataaatatcaacaactaacgataaaaatataaatataagatgacaaaagaatgaataataatattagtaagctttttattgttaagaaaaataaaagaataaggaaggggtatgtatgtatgttggtttgcttaatgcgggtccatgaaaaattagaagcggaaagcaaattttggagtggtgggtcttcactcattcatgccttgtgtgacagcttatcatttttaatgttattttatcaatttaataattattattattcgtaaaaagaattttaaacttgtgctgtaatttcttatatttctatttttcttcttctcatgatatatactatttaaaattattttacaaactgttgttgaaaaaaaaaagctattagaaaaaatcaaacctctggaaaacgatattattctgaaaatgataaattaattaataacacaaatcttgttatataatgggcctaagaagttgtactcatgggcttcgtcgaggaaaaccttaacgtcgtggtggcaacaagtcaagcttgtgaaaaatgaaccttaaaagaacacaagtgaaactcacatactttttgtttaacctgttagaagaagaatcttagagcatctccattggtgagatacttcatgagtatctcataatatattattaatatgtttatgtttaatttaagtagaaaaacttatattaaaattgtgcttccattggtatgagtatctcattaacattaacatattattatatgtttttatattaaatttaatatctctacaatattttcaaacatatcaattatttatttttacaaattatattattaaatagttttattatttttaaaaccataattaaacataattaaacattactttacatataaaatcataataaaaaatatataaattaaacataaaattacatataaaaccatgataacataaattaaatagaaaaaatatataaattaaacagaaattacatataaaaccatgataacataaatcaaagctaactatattatctattatggttttactcttcatttgatgatgcaccaaacttttgtcatatatgctcaactaggtcatcttttagttgttggtgcatatctctatcacgaagtcgaattcgattgccgagaatgttgcaaaataaaaatagaaaattttaaatgtttgttttctaattaaaaaaagctattgtatttttaagttattattatgtttaatgcttaactaacaccaattaaataatattcgtatataatttaaacatatacatgatagagcttgttatatagataatttaattttatgaatttttaaagtaaaaataaaaaaaataacaaacatataaagtatttaattgatgttataaagtatagataattttatttataacaaagaaaagaaattaataacaaggtgacatatggaagagagagaaagtttctccaagtttctcatttcaaaaacgattctgagaaaaactgattaaaaaattattattttcatatttttgatttatttttatttggagtttttcagtgagaaaccaccgatggagatggtcttacttgcttacttcgacaaaaaaaaatcttaatatatataaataatttatgtctgttgagtacatcatcacatatctataatcaaacgattatataggattttaattagctgttatttttgtgaatagcatgcgatcaagtgaatgaaaagcgaattatagatgaaaacaacaacgaatgtaaataaaagtcaaaagataacgaaaagtgtcatttacgaagatagagagtttactttgaaagaacataaatttataccaacaaacttattgcatgagggtcccaaattacgtacacgtgcgtcaatttttcatcatttagtttcttacattcctcttttgacaaaaaaaataaaagtttcttacattcctcttatatacttttttgttcttctgcgatctgcattctcaattattttgtctgattgactcgataaatttacgaggttctcttaaaaaaatgtttacacgaagtatttagattttcctttgttattttactagctagttaaccatgaaatcatttgagaggacaagaatatatataaaacattattttattctcagtatcaaaaaaaaaaaattattgttttcataatttcaatttttttttttatgtgttctagtttttgttaacactatttttcccaatgaaaattattattaaataacaatgttttgggattgtacataaataataataataataataataaaaataataatgttttgcataccgccgttttaccattttgattgtcaattctaaatatattgttatcttttatagttattttttattattaaaaaaatgtgtactgtttatgtcaatagtagaattagacaaagtatgtgcaatctttttcgcaatattcctattttattagcaaacagtaaaaaaaaaaaaaaaaacaagtaaaacatttgtcatagtctagttattaattatagtgaaatcatatgattatgtaataatcatgtttttaaatactaataagactatatggatatcataagcagatacaagttttagcttgttatatacatgcttaattaattattttttcatatcttaagataatttgaaatagcttatatatgatattgttaaatttaatatctaatccaatagtactggattttttattatatatatatatatatatttttttaaataattattaaacattaataattagatatgttaaattctagaagaataaattacatgttatcatattgggagaatagtcatatttccattgttatcactgatttgattccaagtgtgtagtatgagagatttctgtaggatgcaacaatatactttctttttatttacactaaaatattatctaaatcaacaataagaatgattatataaagattattttttctgttatacataagaaaagagttgttggtttctcttttttgtctctacacaattaggaatgttcccctatagtatagtatatattttactttcgtggatcttcttagatatactacctttaatttggttgtttgtgagtgtgagtgttagtgtaagtgtggtgtgtgtatgtgtatgtgtatatatatatatatatatagagagagagagaggtatatagatagaccaagaagaaaacatcataatagatactcaattatcaataaaaggatcttaatctaattcaaagacaatgctggtcttatccatcttcttgtcgttaggattgttctttctctctattttgattctttatatttcaatttctaagaaaaatgaaacaaacgatcatcactcatcactaactggcagcatgggatggcctttcattggagaaactatttctttcttcaaacctcatagatcagactccatcggtacattcttgcaacaacgtgtttcacggtaataattaacatgttctttttatttcttttgttgttgttgtcaattgtagtgcgaaatttaaattgtgtagttagcaacaacaaaaaaactgtgtagacaacaatatacacccttcatgggaactcagttttcaaaaaataattgaaccaaattggctttcagcaaaaaacgtattagccacttaatgcctaaacaccaaataacctattttctttaaaggatcattatatttttatatataattaattaaaagaaaaaaagtaatgttcacagtactacagaagattcatatctgatttttttgcatacatgacaatttgattgcctaccaatgtttttatgattttattttgtaaatccaatttatatactatacaacatataatatatctttttttgtttgtttaagcctaaattgacaataactgtgaatgttgttattcaggtatggaaaagtgttcaagtcaaatatatgtggtggaaaagcagtagtctcatgtgaccaagaactcaacatgttcatacttcaaaacgaagggaagttgtttacatcggattatccaaaagcgatgcatgacattctcggcaaatattcccttctattagccaccggagaaattcacaggaaactaaaaaatgttattattagcttcatcaatctcacaaagtcgaaacctgactttcttcactgcgcagagaacctctctatctcgatactaaagtcatggaaaaattgccgagaagtcgaattccataaagaagttaaaatagtaattaattaatcactgaatccttataatcaatattgttataattctgatatctttgttgcggttgaatcatacagtttactctcagtgttatggtaaaccaactcttgagcatcaagccagaagacccagcaagactttatgtattgcaagattttttatcttatatgaaagggtttatctccttaccaataccgcttccaggaacgggttatacaaacgcaattaaggttagatccaatcgtaatatacatcaaaacgcaattataggttttgttttcgtcgttttatatcaaaacattaagccactaatttataagaaaataaacaattggattctaggtttttgcagttcttgtatataacttgggtcatgatgatgctttaatttatcatatggttttcatgtaaacacatttatctgtatgtaaatacataacatatatacacttaaaactatatagttttaaagtcattttcgatgtttgccaggctaggaagagattgtcggcgagggttatggggatgataaaagaaagagagcgcgaagaagaagacatgaataatgcaataagagaagaagattttctggattcgataatttcgaatgaagatctaaattatgaagagaaagttagcattgtgttggacattttgcttggaggctttgagacaagtgctactactctttccttagtcgtctattttctagcaaaatctccaaatcttcttcacaaactcaaggtattctctctctcttctcattatctatatatttgtgcatgtatacacatacgtatatatgttaatctatgtgaacgtatacaggaagaacatgcagccattagagccaagaaaggggatggggaacttttgaattgggaagattatcagaagatggaattcactcaatgtgtatgtttcataaacccatcccatcattttattttatttttgctattttttcgcaaatttgttttggtacgtagccaagtttttttctgatcatatgttgatactactttaaaatcatatagaacatgttcacttatatcatgaaatttactggacggaatttgcaggtgatttctgaggcactacgatgtggtaatatcgtcaagactgtacatagaaaagctactcatgatattaaattcaacggttaacaaaaatgtcaatcatttttttttttgatcaaaaaatgtcaatcaaattttactaattaatgtagaaatcaaattagtgtttctctaatatgtttgagttgcagaatatgtgattccaaaggggtggaaggtgtttccaatcttcacagcagtacatcttgatccctctcttcatgaaaatccttttgaatttaatcccatgagatggaccgtaagtaaattatttagaaacagataacattcaaatgggtttttttttttttttttttttttttttgtcaaaaataacattcaaatggtaagcaaagaaaaaaaacggaaatattgtgaaaccaattttggtttttaaattaaataggataaggctaagatgaacaagaaaacgacggcgtttggaggaggagtaagggtatgtcctggtggtgaacttggcaagctccaaattgctttcttccttcatcatcttgtcctctcctataggtttgtctaatcactcactatggttgactaattttaattagtgaacactgccttatccgacataatcatctattatactttggttaaaattttggttggtttgatttttaaatcgttttgttttgtttattttcttctcaagttctcatgtttcagttattttatactgatggatacatctatttgaaaaaatatgtgttttatcatgttttaatgttcaatatagctaagaagtttatttataatggtaggtggaaaataaagtcagatgaaatgccaatcgcgcacccttacgtggagtttaagagaggcatgcttttggagatagagccaacaaaattccttgaagattagctgctttaataaggaatccatcttagatgaaaatttaattaataactattaaaaatgtaatgtctaataatatgctccattcccaaatataaagtactctctagtcatagagttttgtgttagttaggtgttggagttttgaaataaaatgagtatttgcctttggatatggtatatttatgttttgtttctagaaaaattatctaaaatattactatttcgagtttttatatcatatccgcgttcaaatatttaattagtgttactaggcaatctaacacaatacttttaaaataactcaaatcatgtgtatactataaagtagttagtgtattcgaccacactaataagactttaagttaaaacatgtgtgaacttaactactatccattccattatatcatatgaatatttttctttatttttttcgtgaaaaagttacaaaccagacacataaaccacatgtaattagaaaaaatacagaaacataactatagttaatgtttatccgtctttacataagaactctaggaagagataatctagaggggaagttaccattttggccttgaaaagatttgtcgaagacatacttagcgttaagagaagaaggattaacttgcatgaaaaggtaattaccggcaaagagatcaccaaagtgtgattgactctccttcaacctcttcaatatttttaaaattccagtttttaccctattcgctttcttcctcacaaatcctctaagtcttcggatcttaactctaaccctaatcctcctccttcctcccaatgacaccactcgcttgaacctgtataacagaaaagaaagatggttcatcatgaaagtcttcgataatatcaaaacacttgtaaggaagatgattgtgtacacttatataatataaatacctgtaagaatagaatgacgatcttcttcttgttgtttcgccgaagacatcatcttctagagaaagcctcttgtaagggagattagtgattttgggagaggaatccatggaaaatggattagaatagtgactgtgaatatttctcaagagatttctttgagaaatgtatatcatcaattatatgagttgtcattgtttcaatgtgtctggttggtgggtcgatttattgaagtagttaggtgtgtgcgtacgtgaatttaatgcgttaccgcaatttaatttagcataaattttaatatattctttttccaatttatcccccccccctacaataaatggttttctataaatctgtgaggatatcactgaaatatatgtgatacttataaaaaaatgatgaaatattttgctctagacgaattggtaccgtcattctacaaattaaatctacatttagaatgcaatgcccctaatatttattttctaaaaaactgaaatgcggtctaaaatctcaggtacaataatacacatagaatagtttattgtttttagcgtaagttggattagcatggaactaacatatatatctctgttactgaagtaaggtacgaggttagatgatttgtaccattgtgaggtatatagctaccactttttcggacagcatgtgatttgtatagtatagctaatacggaggctctttatatgaaagaaaaagtagatgtatttcttatgattttctcaattttcaaataaccaaattataagaatcaaaatttatttgaacaaagaaagaaggaaaaaaaaagacatgggcacatgaataacaatttttttactccaagcaaagaagaaagatagaaagaaagaaagaagtcaaaggttttgggacaagatgaagttaggaaagtgagtaaacgaacaagcattgtttttttctttatacaaaagatccgatctttctcggagaaatttcagtgattagattcaaactaaattcccaaaagaagttgaaagaagatgaaagagagagaagggtcgtcgatgtctggtctacttgtttgttagtagagctttattcttgtctggattggtgcacggcaaatcggacacatttgaagatctggtccacactcgcaacaagtcttgtatcaaaaacagaagccaagttagtttgatgttttgatcgattaagtagatgcagaagatggaaattgtgtttgtttcgattttacctgatggccacaaccaaaggccatgtctttcgggttgctcaaacaaatcggacatagctgttcaaaagatccaataacatcaagttttgaactttttcaaataacgtttcagactgattaatttccaagtatatttctgattttagaagtacctggttatcagaagcagagcttgtagggggtgggacgggactagaccttacgtgatagccttcagttggatgaggaggaacactcggtttgaaacttggaagacgtgaaggctttggactgttgtaggacgatgatccaccgcgcattggaggcggaagagggaatctctccgggatatatccatttcttcttctgcggaaaaagttaaaagggtaaggaaaaagttgacaactttgggatgaaaattgataaagattatgtttggggatttaccctaaaaggttaagctctattgtcgccttgtattgttgaggaatctccatgagagcagaaagggcaaactctgtttccttcaaggattgagctttgttctttgccatgatctctgtgaagttcacgaactagaaacagaacatcagattaaaacaccaaactaacttcgatgttattagctagaaagaaacttacttggaagttatcaaacgctctggccggaatattatcgtcaaattccctcatcatgtcccaaggtccatcccccaccccgactaagacgattgatagaggaagcttactgtcacagagaaaaagttcacatcagaaaagccagccaaaaagagatataacttcaatggagagaacaatgtcaaaagattggacaatattccaacctcgcttgcacgatcgcatctaccgtcttctgttcttgtggacttaactgtccattttccgtgtcaacacttcttgtaacctgaaatggttcattgaggtttcttcttttgacacaaaaacaaaggttcataacatcatactggttttattcgtacctgcccatctgctattatcactaggacgtgatattgcccaccactctgctcaacaatggtcatggccatatcgatgatcggagcaaaggaggttggccctgcagaagtattcaacattcacatttaagaatttagctagcatttcatgaaaatgcggccaaataaggaaaagaaataaacctgcaagcttaagttgaggcacgatctccttataccgggaaagtacttcctcaaatccattacagaatctatcctctgaattgaaactgaacacgtcttgatcatgtgttgatgcatctccaaaaccataacatggaatcaagttgtcctcgtcaaaggcggctaaggttcttcctatgatagttatcgcttgttcataaggattgggactactgcctatgaagtgtaagcttttcctattgaaggacctggcccctgttatcaaacaagcaaagtatgattttgagagtgaaaccatttgatgcattacacaaagacagaatctagaatctcaccaacctgtccattcgttactcttagtgaaatcaataccaacgatgagatttgaagattctagacccgcccgtgcaagagcctccgtcacctaaaacgaaaacagaacataatgtgaatcttttctgtcaaacccatgagaatctacagttttcaagttttgtaatcatcaaagaacacacactagattccactaaaaaccaacgcgagactcagctaacctgctccaaagaagagtaatcatcagaaattttcgaatacttgcgctccaacctcttcttattatcactaccataactttgagaaggcggtgcagaataagacggagcagagtaaggctgagtactatataaaggaggaggaggttgcgtatactcaggaggttgggcataagaaggtggaggagggtaattatagctttctgcaccatactgaggataactttgttgagaagcccatgaagatgaagatggtgatgctgatgaagcagaagttgacctaaacgatgactgtctccagttttctttagaattccctgtccccatcaaacttaacaaaaaactaaacctttttagattcaaatcaaacctctcaggtcagttccgtaccctgcaaaacaaagatttagcctttagagtatattcatgaaaccccagaaaaaaaaagcagaaactttgtttaagattctgacattattagaagatgcaatttacctatacctaattcgttaagaaaaggtgaaagctttatctttgacagatgttgaattatctcaccgctctttaaaatcgaaggttggtagagatgtttatataaagaaaggagattcaatcacgtcacgtaattttccacaacaatacgcgatttagtgacttctagattaagataaaagtcctattacgaaaacctactccaacactctaacccacaataagtaaaacaaacaaaaaccagtttctgacaaatctacgagctttccaatttcgccgaattgaactgaaacattctctgattcatcaaaccaaagactaccccaaaatcgaaaaataacattaattcgagattgaatctcccgacattcatcagaaaatgacccaattcgattgagaggaaaagttgtctacctttaaactaaacgaagcagaggaatgacgaatcagagaagtactttgagagagagtcagaggagcttcaatggcggatcgaatactaaagagttcgcctttaaagtttcctccttttgttcgaaagcaatttcacttttcttctgtttgttgtatttggtttgtttctatgaaatcattaggagactaatcacttttctgtttttaaaaaagtgtgaagcacgctaatggtggaaacttcttctaattttaccccacattttattctctcttccaacaattggccctataatattattatcgatatccaaagtcataacatggtatcaattgacaatttcttttgattacttgaaattcttaaattgaccatttcttaaaaagtacaaatagtcaataactaaactaacattttttaattccaaatttttaatctagaggattgtattatacatatgtaaattatatgaataaaaaatacttaaagaaggaaaacataatcaataattagtttaaaaaattgcaactcagaagtttagaaatgatgtatcatataaataggactgccaaacaaaaaaaacttcttctgtatgatttgggcaaatactaatagtataataacaatgcaataaatacctttggggatgaaatggatggttatcagaagtttccgaccacgtgacaatcctatcctatcttcaatatctttccttcgtcgtgcggttaaattgtcaatgttccttaactacgtcaattttttcccttttcggatttactcgataggtactgttgaatattgcaccttgtagactacaaatattgagagtttgacttttaaattatcatccattcgtcttcttttttctttgctcgagagttctcgctcatgatgcactcatgcttataattgattaacctttttttcttcttgtgtgcaaattattgattaactaaagttgtcttaatttcagtataaaagtttttgcttccttcggtgagcaagacacaacacgtgaaacttaaatggacttacattaaagtatgaaacttcgtacccgtgatttatgctactcttttttttctttcttggacagttccttcaaggagcaaacaagaaatacgtggactgcactttcaaaccaaataattatagaataaaatcgtattagttcctctatatagttcataaaagcatttcgaatctaatggactggagtaaactagaataacgaatgttaatatgcattatataagtgtaatactgactagtgaacgccacgacattcttaatatccattatataaataataaatgtaacacaaaccactatattcatggttgaataacaaatgtatttattttcttaacatttacaccaaaaaaattaaaacaaatgttacctgaagaagattcactgaacctagtaattaataagtactctccattttgtttggtcaacttattcatatactttccataatagtataggaacattaaaactgaattgaaatcaaagaaatctattgatgatttattatcttctacaattgaatgtgttcgagtgtttgaccgtttcataaaaatatataaaagttacaactataagatacaaaaactaaaaatcgaaaacacaagtataaagcccaataagaaactatataaagcccaatattattctttaaaagcacatgtatgctacctacaggcccatttagttttaaccgcgtgttttagttaaggagcatagaaacaaccctagtccttgccacagaggatcacagctaaccaaatattcccttgcacgtaaaatccgacactggtctatttcgtcgtcttcgacctcgagggaatctactgtagctctcacactatccactcttcatcggcagctagatttccgggtcctcagtatcgggtcagatctagatccggatccggagacgctgagaatgaaacacttcagaactgagcgagtccgtgcgactccgaagctcttcacctacgttctcgtcggtttcatcgctctactcggcttgacttgcctctactacggctcttcgttcgctcccggatccagaaagtccgatgagttcgatggatctaataaccgcgttcgcaccggaatcggatccttgaggaatcgagatattgtgcttgcagtgagccgtttcgaagttcctaaaagtgttccggttcgtgaatcgaatcatttgtttcgaattgagtagagatgtctagatttttagtgttcaagttaagatttgtgtagattagctcgttgaatttaggtttctcatgtagtggttgtactcattttgatcctgtgcagatatgtgattcgagacactcggagttgataccgtgtttggatcggaaccttcattaccagttgaaattgaaactcaatttatcgttaatggagcactatgagcatcattgtcctccatcagaacggcgtttcaattgccttgttccgcctcctgttggttataaggtcagaactctgtctgtgttgcatatgttatggctctagtgttgtggttaatgatgattttgttttatggagtttttcagatcccgttaaggtggcctgtgagtagagacgaggtgtggaaggcgaatatcccgcacacacaccttgctcaagagaagtctgatcagaattggatggttgttaatggtgataagatcaattttcctggtggaggaacacatttccacaacggagctgacaaatacattgtttccctggctcaggttcgtaccattatcatcatttggttcctctatccttttttgagtatcaagggtagagctcgaatctttagaacaactgtgcatctttcgctttatttttgttaccaatgttgctttagccagtgaacgtcaatggtataagggtatagcagtatgcaacattattgattgacactatttgactagaagatgtatagcgttgtccatttataccaaaaattatgtgggatattctgttgctcctataccgagcatagttgttttggctctgttttttattttcaagttcttctttcagatgacaaaaaaaactgcttattgctttagatgctgaaattccctggtgacaaactcaacaatgggggaagcattcggaatgttcttgacgttggttgtggggtagctagcttcggagcctatcttctttcacatgacatcatagccatgtctcttgcccctaatgatgtccaccagaaccagatccagtttgctctagaacgagggattccatcaacacttggtgttcttgggacaaagcggcttccatacccaagcagatcatttgaacttgctcactgctctagatgtcggatagattggcttcaaagagatgggatcttgttactggaacttgataggttgctcagacctggtggctactttgtatactcgtcgcctgaagcttatgcacacgacccagagaacagaaagattgggaatgcaatgcatgatctctttaagagaatgtgttggaaggtcgtggccaaacgagaccaatctgttatatggggaaaaccgatatccaacagctgttacttgaagagggatccgggtgtcctgcctccgctttgtccttctggagatgacccagatgcaacttggaatgtctcaatgaaggcttgcatatcaccttactcagtgagtaagtatccgcatcctatttcaaacttatataatatcaagtttcactaagtttgttattcattccatgtttgttatatttacccagggatgcacaaagaaagatggagtggactcgttccctggccacggaggctgacagctcctccaccacgtcttgaagaaattggtgtcactcctgagcaattccgtgaagatacggtatttcctctctcctacagcgaaagctctttttgagtccagagcttgagaacttatatttcaaaactgacatgcatctcaacatccaaatacttctttattggagtgtaggaaacatggcggcttagagtgatagaatactggaaactgctgaaaccaatggtgcaaaagaactccataagaaacgtgatggacatgagctcaaaccttggcggtttcgcagctgctctaaacgataaagatgtatgggtaatgaatgtcatgcccgttcaatcctctccaagaatgaagatcatttacgaccgtggccttatcggagccactcatgattggtatgtaaatgacttgatctcgaaacattgtgcataatccatatgatgttaaacgaaattcccttgcaggtgtgaagcctttgacacatacccacgaacgtttgatcttatccacgcatggaacaccttcacagaaacccaagcacgtggatgcagctttgaagatctgcttatcgagatggatcggatactacgcccagaaggatttgtcataattcgtgacacaactgacaatattagctatatcaagaagtatctgacattattgaaatgggataaatggtccacagagacaactccaaaaggtgatcctctgtcgaccaaagacgagatagttttgatcgccagaaagaaactttggagcttgcccgccatttcagtgtcctgaaatctaacagtcaacaggcgaatgaatgagatttacagcatcagaggcgcgtagctgaggaaaatactcagcaatggagaagtgtaaattacacgacattcatacatagttgttaacttgttatgcatttgttgtaggaaactgcaaaatcttcttattttgcgattttcatgttcctctttataattaaaatctgcttttgtgagaaaaataaattgcttcattaatatgtaaatcaccattttccatcaccaattataacaaaactgagcacacaagctgaaatagagcaagtacaaagtgaaatacaaaacatatcagacttaatatgacgacgatgttgcttcgacattcttcttctttttcttcttcttattcttcttcttcgaaggaaggtcactggaaccgagttcttcatgtttcctcttgttgctgctacgaacacagttcattaaactcttcagaaagacgtatacttaactctaccctgatctaatagtaagaggaacacacacacacacacctaactttgcttcaacacagttctaacttctaagttcatttcttatctatcagtatataccaatctaaactaaaaatctgatataaactacttttctgattcaaacaaaagttagagatactcttttgtctaccttcaacattcacaacaaacatgaggattacttgaatgtttaaaaccttttttatcctgtacaaaggaaacaacaaaacagatatgaagatttatggtacctggcatgagtgtcatccaaaacaatcttgccatcttcatcaacttcacctattagtatggactcttccatactaatctctccatcttcatcaaattcacctattttgcaggttattaacaaagtaagacacaacttgagattcaaagaatagatccatgataccaaacgcagtagtaatgaagtatacaagtgaacaaacctatgggatctgtttcctcattcatttccacatctgagtctgaatctgagccccaccggtctcttccatcatcaaagtcccacctctctccatctggaggcatccaaaactcaagctcctcctcaacagcttcatcattttcatgttcgatttcatcagcaacatcctctccattctttttcttttcaactgacttcttgtttttcttcttcttattattcttcttcttcttctttttcttatcttcatcctctacgccattttccttcgccggtgtttctccaccttccgctggaatagatccagactctttctctcgttccttctcctctgtcacataagtaacaatgtaaccattaaacttatataaaaaaaaaaagaacttcttgcgcaaaagatttttgcaagctaaccaactctaatcaagcttcaaagtagatacctaatctgttgaggaagcgccgtccagtgatatgcttccaaatatgttcctcagtcttgtttaccgtatcgcccgttagcttacatttcagttttgagctgacaagacatgccaaaaaccaacttcagcaaatttccgaaacacaaacttcctcaacaaatgaactcaaaatctagcagcatacactctcttcagcattacattggcatcaaaaacaacattcacgttttttctgaattaaaaaatacatgaactctactttttaggacaagaaaccaaagtccagctgcagaacaacaaaacaaaagagaagaacatttcgtaacgtttacagtgtctataatcttaattcaatacaaaatcagtcaggattgaaatcgcaacttttgacatgagagagacgaaggagtaagtaaacaatagattaccgagcgttaggatcttgttcgaacaagttaagaggaggcttgctatgagataaggcataatcaataagccctaaacggcatcgtttactctgtgaatagaccttcttgtctttctcgagtagctcgtgacccgtctgcacgcatttaaatctcccgttctcgagtttcttatactttggcttccccaataggtcggcgccttccttcgtcgtcgtcacctcttcctctgtcgccgccattgaggttctatttcttagcaatttgggttgtttcactgaaggaggtctgcaagtagttacacgattgtgacttgccgttttagtgtaattgagatcaaactgcacgtcgtttaagttttctggcttgtcaaagttctgacaatatatgggcctttatgatcataaatcagcccaataaagataagatatcagaacactcagctcaatcaaaaatatttcttgtttgttccgtctcaagggaaaccatgtaatgtaactgactggagcacatcagaaaaaatagaaagaaataaaattttgtgaaaaacggaccatgttttattttgtaaaattcggttaacttttttatgaattatctactcgtagaaaaattgatgctttttaggtgaattattacaatgaatgaaaggtaccgacaatgataaccgttagcgcctttttctgggttccaataagaacacagctcatgactgttgaactgtggtccggtccaactctcaagacacgatatccttttttttttttttttctgtaattttcaaagaagaaaatacagttttgttatatacccattttcagaaagatctaaaaacaaaagtcttatataagagcaagacattggagagagacagagagtgtgaattgccattaccatcactctctttgtttcgttactcgcaatgaaggataatcttgaaagagcaaaacttatggtttcttctactgtgttttcatggcttcttctgtgtctctttgcagtgacaacatctgtttcagttcagcctacgtgtacttttccggcgatttacaacttcggagattctaattccgacactggaggtatctccgccgcttttgagcctattagggatccttacggtcaaggtttcttccacagacccaccggaagagactccgatggccgtctcaccattgatttcattggtaagaaatttgcagagaaaaacagagcttcaataaaaaaactttgattcaaataacattaaaccaaaaaaaaaaaaaaaaaactttgattcttgaactgtggtttgcagctgagcgtctggggttaccgtatttgagcgcatacttaaactcgttaggatcaaacttcagacatggagcaaactttgcaacaggtggttcaaccataagaagacagaacgaaactatctttcaatatggcattagtccattctctctcgatatgcagattgctcaattcgatcagttcaaagccagatctgcactactcttcacacaaagtcagttacgtcttttagttgatctttaacttggctgtgtcatgatgattttaacaagtctgttggtttttctgccttgcaaaaacagttaagagtagatatgatagagagaagcttccaagacaggaagagtttgcaaaggctttgtatacttttgatattggacagaatgatctctctgttgggtttcggacaatgagcgtcgatcaacttaaggcgacgatacccgacattgtcaaccatttagcttctgctgtccgggtgagatttgatgcagttcatgaaatgttctccccgcctttgatttgcttctgactacaagttttgctacactatatattgttcacagaacatatatcagcaaggaggaagaacattttgggtacacaacacgggtcctttcggttgtttacccgtgaacatgttttacatgggcactcctgcaccgggctacttggacaaatctggctgcgtgaaggctcaaaatgaaatggcgatggagttcaacagaaagctcaaggaaacagtaatcaatctcagaaaagaactcactcaagcagccattacatatgttgatgtctacactgcgaaatatgaaatgatgagcaatcccaagaaactaggtatacgacaaactggtccatcgcaattcaatttgttgttaagtacctattctgtagaaagttttagcgttctcattacttgtttttgcaggatttgcaaaccccttgaaggtatgttgcggctaccatgagaagtatgatcacatctggtgtggaaacaaagggaaagtgaacaataccgaaatctacggtggctcttgtcccaacccggtaatggctgtgagctgggatggagttcactatacggaagctgcaaacaagcatgtggctgaccgtactctaaatggtttgctcacagaccctccagttccaataacccgagcttgttatagacagtgagatttagtagaagcgctagatgaaccgaaataaagatttgatccttagactcttagggcaataatgtaagtgttttaaggaacaatcaatgatctatgcaatcctgtgtaacctttttgagttgtttgtcgcaaagaattcacagttggtggatcttctactatcatctatggaggcgtctagcaaaccagaagttgtttccttctagaagtagtttttagtgattgctgcttctaactcattgaattcccaagcatcattagcagaatattcacctgaaccccaaaaagaaaatattaagagtgaatcaagctttgaatgattttgaagaaaaacaaaattgataagctgacttgtgaatgaacgtaccaattgaatctcgccggagagcagtgaggtgagcacaactgcagcaaaaggaatgatatattagtaaattcctttttttggatctgttagtaatcaaaggataaaactttgtttcaccttccaagagctttcgcaagatctgcacagagagatcttatgtatgtacccttagagcatataacccggaatatcagattttgtctgcaaaagagaaacgagagatgtttagtgaggcctaaccaaaaaacattgtattcaaactgcttctgcactatacagaaaatggataaacctgtcatctaaactgcgttcaatgtcaaactggaaaattgaaattcttcttggagaaagctctacggtttctcctcttcttgccttctcgtacatcttctcacctccaacctaagcagaaatgacagttaaggcgttagaaaagaatgatacacgataaagcaagtatataagattgagcaatgctcacttttatcgcagagaacatcggtggaacttgccatatttctccaagaaatgatgtcaaagctttcttaatgtcatcatcttttatatgctcccaagactctcgctgaatcacctgcagcaaaagtacggttaagcaaactctgatgagtcatctaatgtagaaatgaaccataaaatcaaggaaaggggttgttggagtacaggagagtcagcgtctagagttgaagtggcttcaccaagacgaaaaactccgctataacctttgatcataccttggtatctgcagatacagatgacttttatgttctctttctgtaaatcatcataagcataaactttggatcaaggaatgacaaacctgtcaacaaccttagtggctttaccgacgcagacgattaatagaccagtagccatgggatcaagtgttccagcatgacccacctgagaaacactcatcagctagcagcgaaaaaaaagcatacaaattcaaatattggacaagacaaggatataagcacaaacctttttcactttgactaatcgtcgtagcttaccacagacagtgaaagaagtccatcctgagaaaaataccataaacaaatcacataacatatcatataccaaaagaaacaaaagagagaaacatttataacacaaattgcttctcacctttaggtttgttcaccaaaagcactgtaccgttaggaccatcccatctaggaggaagttcaccgtttctcgtaacaagaaaaggttctccatcaccaccaccactagccatacctttctcattgggagatttcgttaaacccttaaagaactgttccactttcttctcagtaacaacaacaacatcatcctctgacttcttcttctcctccttctccttcacttcatcaaaaaacaccaacttatcatcatcctcatcacaattctccataccaattcgtttaacctcacttctcttcccaccaagtgctgctactactttcttcttccctctaactttcccagaatcatcactcttcttcaaaacttctccaggttgcagaaacgccttatctaaacactggtcaggataatacttcttctctaactgatacaccatcttataatgcttatctttctcccatggataagcaaaagtatcataaaaatacaattcctcttctctctgatgtaacctatcaaattcaacaacttcaggtttcaattcaacgaatccttcatctgattttctgctactggtctcatcttcagaatcagacccgtatagtctcttccttctcttactgtagtatttcctcttggctttatccatttccggatctccagaaccgggtcgaccctgttcacgctccatagccagtttattgtcgacccatgaatcgaattccggctctgctgagtcaggtgcaccggattcgatggctttagggggacgacgacggttttgagagagagatgattgtgtgggacgattgatgatcatgtcgtattgaagtgggtatcgagtagatgttgtggagaggaagagagaagccaagtagggtttatggatgtttctccatggtttgactgaggagaagaagagaggagaagtcattgacattcttgctgaagaagacattagtcttgtgaagtgtagagatttcgccattattgagaacactggaggcgggggaaagatgaaatccacctccggtgattattgcagtggttctccaacggagaagagaaggtgatgatgttaaacgataaattaaaacgacacgatgttttctcttaaaggtctaagacggcacgttgtaagtatatccttagaagcctcgttgttgactattgcagattaatgatttggtttggtttttgtttgtactactgatatcgctgcctcactagattagattattgcatgctgttaaacacgttgtaatacatgttgttgacaaatttttgtaaatgaaagactaatgattagtgactcgtacaaaataatgttaatacatataaaacaaaatgacttatgaatggatactatcatcacatggactaagcacaagttcagatattgatctcaagatccttcaaggaccaagtttttgttcttagtataagactaagaggtctgatgatgtaacaaaatcatgtttttgataatgtcttaatatcagaactactgaggcgggtaggcacaagctttactggctcaacgataaatccagatttccgacattcttcttctagaagtttgacctgagatggcccctcagggcagaaaaccaccacagctcctccgcttccagtgaactttgcagctgcgccgatcttacgtgccacttccaccatctctatgttcatagctcccaaacattcatctccaaacatactcctagagaaagaaaaaagaatcttgaattgtgtttgccttttattttgttttgaagattttctaatttgttaccttcgaagatcgaagttacggttcatgagttccttgaggttggagtaatctttcttaagcaatgcagttcgaccttcttcagctaattttgcaatttctgccattgatgatattataaactcatcaccgtctaaccaccttctacgaaccgtgctatgtacctgcatcatcaaacataaacaatgctcagtgagaaggaaagtaatagaatcagaagcagagtagtgaatagctctctaaccttgccagagtcactaggattctcagcatagatgagatgcagaggaggaagaagattgatatccattatagtgtatatcccatatccaactttatccatatgctctttactaaaatcctgcaaaagtaaagaagatcaaaacagagcaaaatcgatgaaaaatgaaaatttccatgtcaaaaagagtggcaaagatcatcctcaccatgtgaacaagaccaccaccatagacttgagcaacacggtcttgaagaccagcaacaataccaagttctttctccgcattaagaataaggttaggtcggacttcgattctgattgattgcctgacattgtagaagtcgagaaggcagctaagagcagcagatacaattgcactagaacctgaaagccccgtctgaaaaaaaacatcaaaactataggcttcagtataacatatatcaaaaactgaattcataatttacaacaaaatgagtttgtaacaaacctgtcttgggatattggtatcataagaaagagtgaagtttttgtcatgaagttgtataccattttctttgcaatagtttcggaatactttgcaaatcgccattagtaaccttacacctccatagtatccatcattttccaatcgataaacctagaaagaaagacaatatttcagctatttagcaatgatcagtgaaagacacaacacatactttgatagattcataagccacaaatctttcaatcaaaagttaaaaaccaataaaaatacatttctaaacaaatgcagctaagagaaacagttcaatagagaagagagaaacaaataatttgggaacagagcacatacgagattatcgagagaatcgaactggacaagatcatggaatggatgaggtttgatcaagagatgatcagatggttcgagcttagcccacgcccagaaattaccaatggtaaatgaaatcgtacgaccgaagtaaacatcgctagggtttccaagaaacccgattctagcaaacgagcgatgctcgaacacgccattatctttgccagaaatcgccggtttaggattcggatccatttttttgaatttacaatgtttcttaagactcttttgccaatttatagctgattttaaacttatctttagacccgtcggatgacatttacacgtcaggtctggtgtctgtttttttcgtgtgacgtcaggtctgatgtctgttcagtaaacagttaaggtagttctgtaatttgagagtctcgttgaccaaaagaaacaacaacaaaatttagttgggcctaaactgataattgggcctgtaacaaatatatgggtctttatgacgaaatttaaatactgtgtaaaagctggacatcaactcggacacgaataatccaaatgaactaactaaaccgaaattcatcgacaacttcatatcttcaatttaatcaaactgagctattcacattaggttaaaatagccaattagtcttttaaccaaatctccaatctaaaccaataacctgaataccttgagagattagagatagtatgtacatatattaagtaagtatttctcacatctatatcttaagattcaaaacatgttagaaagaaaaaagaacaaaagttggatgatttcccaaccaattggctctaactcaaatatgagagttataaaaagcaagcacaacagacaaaagaattgaaaaaccttaaaagggacaaaacaggttattacaaaactggtgggtgtgatcgttaacaaattaaaaaactgatgaaccaggttttgctcctcgtgtacgcgtgttttatagatacgtatgatttaactaaatgaagagcgttggaaatttaatctaactttgttgggtcaacaaacactctattcgagttcagggtccaaggttgttggatccacagttctttttgtttttaaccctagctaacaatgtttttggataattcatttttcctctatccatgatttaatagattaataataagtaccgtatttgctgggaagtttcatgtaatctttcttcctttttattcttcttcctccatattcatttatttgggttgacaaattttgggttgaaagaaacaggaaacaaacaataacacgttgtatttaatatagtcaaataaccaaaggagatataatcaaatttcaatgcataatcatctagtttccaatacttatataatcaaatagttagaccataacaaccctttttcaaaaaagaaattaaagagcattttgtattaatgttcttcttatatatatcacaactcgctaaacgtattattcgtgttgttgaaagaacaaaatctaactagttgataaatagcatacatttataaaatttcgatggtaattaaaaaggataagaaaatgtaaagagatagctagataagatacaaaagtccattcatgtaagtagttgcaaaagtgaacatggtcctccttagcattcaagcttcattaaaacaaaaaaaaaatgtatattcgaattacttggatattcaattaagcatatattttctttaaaaaacaaaaaaaagtgtttgaaaataaatagaactaaagaataggtcaaagcagttcgcgttaacatactggtcgtttcgtgaaactcacaaacctaagtccaatgctttgggttacatagtgagaccggttccgtaggtttcaacttgagtatgcttattatttaatcaaaagatggaaatgttataaacttataattattctgaaaaaggtatggtaagaatttgaaaaaagcttaaattaaaaaaaaaaaaaaagcaatcgaatgatgatgactttttaagtttatattattagatgatgaaatagcatgataaaatcgtaatttttgaacattgccagattggtaaaacatgcaaaacattctgtgagcaatcaaaagttatatcatagaaaaactaaatttatttttttgtcaagtttaggttacctagatattcattcacttaaactcatgcgtacttaaattatcaccacctattaattatttaagatgaaatttaatcatataatagattaatagtttaacctttatatatataccatcaagttttgaaaatcgtaatcttctatagatctgagttttaattaaattaaaagaattagggttgttccgataatagtacaactcggtcccctggaacacgtaatatcttgactagctagagaatagcgaagacgaagacccagttcgaattactatttataattgtttgacatagttggacatcaaattgctgttaaattaatatattagaaatttagaacagaggcttagctttattcatctaatattaagaaaaataaagattctacattgccgggagtatgtaatattgacttgctagttgctagaatagaaaagaccaaattcaaacatttttttttctttcgatatatgccaatgtccaatctcattaatatattacatcaccagaaaataataaaaatcaaatcaagataaaaaattttcgatatatccgagtagcatataatacttttacgtggtagattatcagaaagcagtatgaaaaatgttatgatattttcaccagaataaaataaaataaaaagatatgatataattggaagtcaaatgttagtttttaaaagttattgaaaaacgcgtgataattttactcgaacttaaaagtttttaattatttatctaaatgtccaaactttatcacctcaataattatatatagatttggatattgactatatacatttgtatataatctaatcttttaaaaagttaataaaatacttggatatgattgaaattcttcccacttataacctttaatcaccaattgtatacggcactaatcatcttactgcttataaaactttaaatttatttttcttcacacaatgtgttggcaaataagtttattgacagatcagcaaggtaaaaaagcattctgaccgtaggatcaataaccagacccacttatagtaacatccgagggatatgattattttattcctttttaataagatattcatttatttttgttaaaagctaataacactttttctccttaattaactgtcaataaacttaattaatttccagcagttttgggaatagatataaaccaaaaagcatcaaacggctataattggcgttacagttttcttaagaggagaaggattagatttaagcgagattttttcggatatatatattctctgtttttctttaattaaattgtttcgtgtttttgtttcgagttttcttcataaagttttgatttttgtcgggcttcgattttcggggtccgagatattcttcttcttcttcgcgataatttcccccgagaaaactcttctgggtaaaatcatgtccgatggatactatagttctaagaagacagacgatatctgcgatgatgtttgtggacaggttcgttctgtctctcgtttccacaaattttctctaatttcgtattgaatcggatttcgatttttgttcattgtttcgtttcgcattaatgaaatcgatattctgatacctttgaaattggatgagaattcgtagtaatgtggttttaaatttttccgatttctgattgtttggtaattttcatagggtttgtgttcttattcttatgttattgtcggaatttaaggattgagaggacgattggattctgtctcgattgtttttttttgtctgaatatttgaggcgaatgtctcccaaaatttcatgaacaattttaggttttgtttcatgataatctgggattttcgattgaatttggtgtaatttgttttagggttacactatacaaatacaatctctgtatagcgttacaaggattgtaatattcttttctcgatattggaatctaatttcagatttttggatttacaatggactatttttgattctctgatgttgtgtgaaatttttctgagtattttcctgggttggtttatgtttggcaggatggttctcgagcagccaaggccttctctagggttagatgtgtactacgaggatttgatttcaagacatatatcttcttcttcaccattgtccctattttcatctttggagtctatttgcatggtcagaagctcacatatttcttgagaccgctttgggaatctccaccaaagccgtttcaaacgctaccccattactaccatgagaacgcctccatggcaacactctgcagtcttcatggctggaaacaccgtgaatctccgagaagggtctttgatgctgtgttgttcagcaatgaagttgatatgcttactatccggtggaaagagctttatccttacataacacagtttgtgatccttgaatcaaactctactttcactggtttgcctaaacctttggttttcaatgggaatcgagcgaagttcgagtttgctgagccgaggctgagttatgggaacattgcaggacgattcaagaaaggagaaaacccgtttgtggaagaagcttaccagaggattgcattggatcagctgatcagactggctggtatagaagaagatgatctgttgataatgtctgatgttgatgagattcctagcgctcataccatcaatctgcttagatggtgcgatggatacccaccgattcttcatcttcagttgaaaaactacttatactcattcgagtacttcgttgacaacaaaagctggagagcttctattcatcagtacaagcctgggaagactcgatacgctcatttccgtcaaggcaacactcttttagcagattctggttggcattgcagtttctgtttcaggcacatcagtgagtttatattcaagatgaaagcgtacagtcacaatgaccgggtcagattctctcattatctaaacccaaaaagaatacaagatgtgatctgtaaaggaactgatctgttcgatatgcttcctgaagagtatacgttcagggaaatcatcgggaaactaggtccaatcccgcggtcttattccgcagttcatctaccagctcatctgatagaaaaagctgagagttacaaatacttgttacctgggaactgcataagggaaagtggctgataagggtttgttcttatcagtctttgtagtgttaggtaatttggtgggggaaacggcttattatcagtagagggagtgtggaacagagaatggtacagtttcttgggactcgaggaagagtgatctgataagtggagtctctggtttcagcattacctctcttgagggtatataacaaccttgtctgcttataatctcatactgacccatatgttccaatgtgttcccagagcttgttttgggaagttttgctggaatagtctctctctctctctctctctctctctctctctctctctctctctctctctctctctctgtctccatctatctctttctctattaactttcaaactattttcatcatactctcgcttttagactgtacaatttagtgatttctttacattattatcctctgagattctttgtaatctttatttattttattattccgctttctatattccgtttcatcaaaccatcactttcattgaagcttaatgcctaatacattcaccagatccttcattgcagcttcctatacataaattttagtaactaaaagaaaatcactcgagatctgaaaccactgaaactgtattgtctacgtaagcaacataaccgctatagtaaactgctactacaacgacaacaacaaaatacacgaaagttcggaattgccgaattggtatgaattgcgaagaactaaaagatcaaatatggttgtaaaaactagaaagggttccaaggaaaattgaagtgatattcataaacaaattacttggcctctctgatcgatgacagaaacagaagccaatgtggacagatcatactttactggctacttttatctatttacattcctgctgctgcgcctttgttcttattgtttttctcaaaatctttcttgtttcctttatcagggaaaacgcaagaacacgcaatttcttgtctttagcttcaaaaccatcccaaccaattcattaagctgtcctcagaagcaaactgcaaaagccgcaaaagatcttagttttaagtttctcaatgattttctaaatatataaagtaagtgtgtgtgtgttttatgttctcacggaaagtaaatcagggagagtccctaattctgcattctccaaatctgaaactgaaaagtttcctgatccgtagtcaacatttccatgattaggaatcgacgaagcttcaattttcttggacattaagttatcttcaataacactcacattccctcccactttagctattttgtctgatgtcgaaccagaagaagcttcttgaatgttctccagtccctgattttaccagaaacataaacatacacgcaacaagaagaacgtcattgatacttgcagagaaaggaactaacctcggcatatgaatcaagaaccatcttagaatcatcatcaaaagctatttcatcctcatcaacagaaatcacaggtctaacttgtgtaatagtactagttttcggtgtgctagggccacctcgaaccccagaactctcactctcatcgatggttttctcctgttgctttggttgctgatatgtgatcttagagacaacatattccccaatctcgccttcttcagttcccaaatggtactggtgcaaaacccagttagatttctcgggtttgaatccctttctcgcgctcttgtagagcaccatgatcttcttgcatcccttctggattccattgagcatcaccggtttggtttgaccagtcttgtgccagcgaaccgtatcatccttgagactagttggtgtgatccttctccgctttctctgcccattttgatatgcatgtgccgtcttgttaaagaagaagacactagttccatctttactcacacctacaaacatattaatgagtgattaattactcaatattagcatcaaattaacagacgatttgtcttattattacctggaaggttttgagggtgagtgtagttgataccaacatcttgagtgactgaacatataaagtcttggataagaagatgtggttttaagccatcaataccacacttagcttccaaatgctcaatcacttcctcatcggttggctcgaatttcacacctttaggaaggcctggccatggagtcagtacctgacaaagcaaaataagaaaaatactatctcagtattcacataaacagggccataagctctagttacatgtgttctatatttgttactttacattgctgttgtcgatgcggtaagagcagttaaagcagttgatataagctccgcagtctttaatctgcagagctgaagacagagacgcattctttacattccttgagatccatgggccatccactatccaagtcctgtgtagagttttcatcggtttagtgtcaatagcaaagctatatatacaaggtttaagaagacggagaaacatatttgtggtactagattcaagcgtttcttgtcaaaaacagacaaagatttcaagaatcactaaaaatttctctagatgcttaggctatgaatggcaatagttctcaaaatgagtttcaagttttcagtgtttggtttttgctataaattctagttcttaaaaaccttgaagttaagttgtttagattctggtttctaactaagtgactaaatcttttttggaacacttggcttctaagatatgttctggctatatgttttcatgaacttaaagatagaaaattgatttttgggggtaaatgtagatagataatatttttgtttacaaaaaaagaactatctgaggaaaaaaaaaaccgaggattttttttttttttattaggggtttttattggttaaactttaaaacactcaacaactaatttttctaacatttaatgaatataattgttctgaaggatgaaaaaatagttgaaatttcggattttaattcataatccagcattaaaaaagcaaatgtcttttcgagattttggaacaaagatgaggcttttctggtctttaacaatcacaaaagacaaaggaaaaaaaaaacgattgatatagattcatcggaataggcagagagtttaagtgaactcaaataaagcaaatctggactatgacaaagatcttgacattgggtttatgatattcaagcttacctttccatgacctaatgacctataaaccaagaccaaagaacgaccgagaaagaaagaaagagagagagaaaacgtttctccaacaggctaagtaagtaaaaaagaccgagagagcagagagaaaaaaaggtcgagactttggagagagaagtagtattatacgtgtgtgttgatgagcgggaaatagaggttcgtttgcttccgaacctaagcttcgagcaaagcttctcaagaacacaactggctaacgttaggctcggagtatgtatctttgtgttgacttagcttgactagactttggtctggatacgaacctgagatatgtaaggatatttttcaatgccgaagcagtggagagcttcggaattcgagcctaaatgggacttcgtaaataagtggttttagtagggccaggcataccttgatcaccaagccagaaaataaccttattttaatctttagtttttaccccttttgttgtttacctgattagacacagtacttatttcaggaaatgaccgtgactgttgtctgttgatataaatagtaagaataaaaatgacaattttgcgaaactttataaacagtaggagagctttcaccctgctcaggtaaatttatctaatcgcctccaatctccattatagatacaaataaatcacttggttgtcaagcaaaaaaaagatacatatgctttaggcagagtaaataaatactcgcttatatccttatcttgtaaagttgtaatagaaaaagatggattaaagtaagatttgatgacctttttcaattataaatatttctagaagccgattaattctttttttgcaatatctttataatttttttgttggaattattatatttaaaaggaaaaactaatttaaaagcatacgaatatgtaaacaatttataagacaaaatatatatacgtgttaatacagtcctctacaatatttagaagatataaattgattattgactaaagattacaggcttacaactatttgtcacttgcgtgtccaatattagttatatatttattgcatacgaaaacaaacaaaaatgtcgttgtagtatagtggtaagtattcccgcctgtcacgcgggtgacccgggttcgatccccggcaacggcgattatccttttaaccttatttcatattttacgtgggctttgtaagaagattaagaatccgcgagccttctttcttaggcccatatcgttttggggaatccctacaaggtgcctaatttatcgtttctgaagaatacaagtaatctatgttcatgaagattcaagagaacgattgagtgactaatggcgagtttgatcgcttgaaaatcaaatgcagaagaagagttgttgaccgtcacacacagaagtcagaagacagaatgatcatgaagaagacgattcaatataagactcatgtttccgggtgaaccataatacatattaataagtccctgaccgccacacagaaggcaacgttacaaaatactacatttgcctatctttctgtgtgcctgtcagaaactcacaaagggcaatagctccaaacaaaatcatatcatatcagatttgtttgggcatcaatcgctttatccatgaagacgatcaaaatataagactgatgatgtttccaagtttgatttcatatatattatcagtaatccccataaagaaccttacgtggatcgagctgaccgctgcagtagcttgaggagacgatagagagttcttgtcttcctttccactcttcatgtggcttcaacacaattgggctttctatagcaccagaatctacacacagcattgttgtgtaatcctcatctcccatatctgcaatactcttggccttcttgtcccaagggttccacacagctgctcataccaaagataccaccaacatataagaaacaaacttcacattttgtttacccattggatcaaggggaaaaacaaattcttacgcacctgcatttggcatgccttcctttcgcaactcgatagttcttttcctctcatgatctatgatggcaatctttgtcggcgtgttcaagtacactttatcaacctacagggtttactgacgatacattagattctgcttgtagagaagttttagcgaaaaacaaaaggcattcgtgtgcgtcacattacctcgccgtcaaaggtaattgcatctgcctgctccgtgaatctttctctacgcatcaagttgtccagataatcaagcgtctccagaccctcaacccgaacttcactgcaaattgtatgccatgcgatgtttacttagcaaaaggtgttttaaagaatttctttgattagagagaggttaagaagcaacccgagacaagaacaatagctttgaccatgatgatgatttaaatgacgatacagataaatggaggaaaggcgacataccttatatcggatacatataagtagttacgaagtgaaaacataaaggaaaatgcctttgtgtcagtgttcctcacacgcgggattattgtaagttttccaggactgatagatatgcgaacacgaagttcaaagctgcaacgaagtaggcagagaaagattatgtcgatgagattgaaatggactaagagagatatcaactgtacacacctatgaggccatatcttcaaatcatcttcagtagacttcaatactaaatcaacagttgattgctggttagccggaggcagaggtgaaggatcattatcaagtgaccagaatctgttacgggcaaatccatgtcgctcaagtgcaccaaaatttccaaacttcaaagacgacaaaacatggttgattgcggcagagggaaaaattagtcagtgtaacttaaaatgatcggaaagatatctaacctgtggaaagctgataggtaaccctcccctgatcgcctttggtggcttcaattgcgcctaagtgaaacatagtgaacagaaaacattatcaatggatttcaattccatactcaacaactcatttttttcaactctaaaagcacaatttacaaatgatctgacacatgctgcaaaacaaaaagcttgttaagaagaaaaaaggattgatcattcatctctatcaacatgtaagagtatacataccttggtgctcatataaagcaacttctctctcctttcgtttttccaagaaaccacttgccctccatacaaaagcacctgaaaccattatccagcccacaaaaaatgtaacttgacaaagttttcgagaaaattagcacatgtttttcaatgagactccatcaagctaaaccctctctaatccaaacaacaacattagtgaaagcatcaacatttaagctcaaagtactaaactactaaacatcaaatcttctcagattaccaccatgatgctatgagaaaaaaaaactcatttagggtaaaaattgaagaagagaagagagggaaagagtaaaaacctcagcagttgatccggcagggtcggtcaaaagaatgcgagaagagccatcacgatcattgactacatttaaaggcatcgatttgggcctaattaacctcgatcttattcccctcacgaatgggttcactttccctttcttccactccagcttcaccacccacaaacaaaaaaacccagatgcatgcattatcaataaattaatttatacacgaattagagaattaaaaaataaattaatggtcattcataacataggaatataaaattgggaacacgaattagagagaaacaaacaaaaatttcaacaaacacaccactgaactcgaacgcgactgggagacagagagatcgagagtgatacgaagaaagagagagagagactgttgatgtttgttgaaaatactgaccttgattgatcgaatattggctttgattctttctcagagatttgggttttgagtccggagcttgatgaagaagaagaaggccattgtgcgcatttgtagttgttctctgcatcagcattagcgtcgatactctgccacgtgtgcatttgtctaataaataattttgttttaaagagcagcaaatattttaatttcgcattgaagtaattttctctcaaactctgtatttatttatttcttaaataataaccttttttatatattttttgtgtgcaaaactcttttttatatatataagaacatgtttaagggatttttttttttttttgttttacatgcttttctataatcatgcatttattttttaaaatatttgtgatgccatgtttttataattattatttgaaaatttagaacaaaaacaaataatgttttactatcaaaggtagtcatgacaaacagaaatttaaaaaaatatgtaattttagctttcaatttccaaaccatatatatatagagatcaaattaccaataaagccaaatcctaaaggaggacgaattttataatttcgaatcttttttttgggtttgtggggttatatataaaaatattatatattcatacgcatcaatatcacaattctaaatttgaatagacatttaaaacaacatgcaatggatcaattttgttttcttcagtaccaattggtaaggatttggcttttgattaacgctagctacattacgctagaggagaacatcgaatcaacattattaaactaataagtattatttatgttgatctatactatatgattctaaattgaatgtgaataaccgatggattcacattaactagaatattagccattcaatatgcaaggaaatggtgggggctggaaaatgcattcttctttctttcttgtttcttaaataaaagaataatcttatcaaatatcacaaactgataaattaaaagcaagaaaaaagtaagtaaaccgaaagagtatatgccaagtccagaattacggatgtagctttttggaagaaaaatgttacgtggctcatttacagatatattaattaccactaggttttaagggattaagagtacgaagctgattagctgttttgcactcagaattacggtggtttaattagatttatgcgatgtttggtgcgcatggaccgacgttattgctttcactctttttgaatgaatctgctatggtagatgtgcatagggaatgagtgtgaagctatgagtgtttttgatgatgttactgattcctattagtacatcgtggtacatacactattggttgcaataagatggtggtaacaattattcctaagaagaagtctctctttctgtgaaacagtacatggttttatatatacaagatctggaatgcaaccagggggttatgtgctgagtttggaaatcatctcttctaccaacttcaacatggttccaggtattcgctctccttcttgatcaatctcccgcataatttgctcaacaatctcaatctttgactgtttgtttttgatgacatagccagagcagtcccttagtagtagcagtagctctctagccatttctttagccctccgtgtcccgtctacgctcacttgaagcaatccaggcatcactccttctctaagtatcattcctcggtttgtctctctgtcgttgttgcatataccaagtagtattcccacggcatgctctttacactgtgctgacccttcttcaatggcttccaccagaaccccaattgctccaccgatgctggaaacagattctggtgaatgagaaattatgttttcaagcaaagctactgccttatcagccaattcggaagatttatcgcaaaagttgatgacttgaagcaaagcatatggtgctcccgaagctataaccaggggaacaatctgatggagagtagatagattttgtagtgttgctatgccatcaaccttggcctggatggtaagtctatcgagcccaataagtccaactaaaagctgaaccaacctggttgatgccatcttaaccttgtttttgttgcaggaagagagaatcagaagaaatgccatggccaattcaagaactaccatcttcgtttctgactggagaatttctagcaacgttggtactgcgccagatttcacaattcggactttgttcctgtaagttcggtaataaacacaattattattattttgcctgttactaccgcacatgaatagttaaacacagatagaaacacaaacctttcactgccaaaggcaaggctgagtaatgcagatagagcaacctctgttgtgatacagtcttgagattgtaacatcgagagcaaaggagaaatgatctctctttctgccaatttttgtctttgcttcctgcttagattagtcagctctatagctgcttctatttgagactctctgttaccgctaagaagactctctaccacaatctcctccattgcagcactcttcttcctatctgtaattttggttaataacttcacttggaagaagagtgagggaagttgtggtggtgattggtgaagtaaatatattagaaaaaacaaacatagaaaatttggttgctttaacaagcaatgttaggctttttttttgggcatccattgtttcatgttgaagcaaactcacctaaagcttctttttttttaactgtatgtttatttattttttgttctttttgtttctgtagcttaaaaccccatttgggaaagtaagtatctgtttgaatattttgttcttgattgattgatctatccaatgttgattccagtagattgaacctttaactttcctcatgtagaagcaaggtaagcttatctgcattatccagagtcattgatcccaagagattatattattcaagcaatgtgacaggatagttttattttcctctgcaaatttctgttttccattctagttgaccttgtatatttatcttattatagtgtattttttccacgttattataatttgattaattagattttctttgaactgggtctttagctctcaacaatagctatactgtttgatatgaatatgtgtctctttcttgatttaaacgcttatgagatttctaataattatgtctaacttttctttaataatttctaacgaatgcaaatcagttgtcttcaatataataaactgacaaatgatacgcatgtatagaatttaaaaacatttcatctaacgtgaatcacctgatacaaaatgaaatgatttaaagatcttaagtttataaattgcaaaaataatgaccatcacgtgaaaaataatatttgggtgtgttttttatattttagtcgtctataaatgcaaaattttcaatagaaaataacatatttttttattttaatgttttacatccttctcttttggttaggacaggaatatgatcaagtttctatccccattggtccctagttcgaatatgtgtgtaagaaaaaagtgcttaaattttcttcggttacaagtatggaattcagaaatacgtacagtatatacatttttaaaattatatatttccaacgaaaactatacaatatacaacttgttatcaaataaacttgctgactaaaatacattgtaaacgataccgagtttgtaaattgtaagaacgtctccaactagaaaattcccattcaagtctattattgttaccattttttagtaattattaggtagataagattatttctttaggcgtactcatgcatcaagaaaaaaaagagatcaaatattataaaattgaaatgtacttttgatattctatgttgtacagcgccgttgtctttaagaaaatcattgtcttactcttacattattcatgtaacaaagttaagacgtacgcaatagattcataaaatttagtctaaaacttcagtatagttggacgtataaaaatcaaaatcaaaactttttaaaaaatttggaagtacatgtcgcgaaagactaatgatgatgatacataacttaagaaaaagccttctgaagaaacagaaatgtaaacaaaaatataaaaacaagttatcatgatgatggttgagtatcattcaaccttttcttgcgctgctcgattatttcaacacctgatctcttccttgactgcgaaatctgcagataccatttcacaatacaccaaattaacatcaacttacaaacactaagagaccctttcattgctatgctcttacagacctatagaaactatataaaaaaaaaaaaaatggtaaatgtaaatgggtacataccttcatggcatcgtagagcttcctcttcttacgggacatcaacactttgggcatatcagcgtcctcttgagctatttgcatagcatccggaactgattcttcaccctcaccttcagccaacacaggcgctacaacatccttacttccatttatttccatcttcagttcctcatggtattgcttctcctgcgccgccatctacataaaataacccacaaagttaacaacttaatcaacgcatacaaaagtttgacaggcttgaattgcttatatatcagcaaagtcaaaccttcttcttgttctttgcagcttcggcttcctccgcacgactcataacaccagcgtacaataaattttgaggatcttcaagatcctctttcccaacacctggcaatggaagcacttcgtttcttgctgctgcctgtagtcttttgatggtttcggcataatcaggaacgtatccttctgcttcattgtccacaaatggtgacaagtgtggcggtggaattc

SEQ ID NO: 1431 - DNA, 86574 bp, Arabidopsis thaliana
agctttactggctcaacgataaatccagatttccgacattcttcttctagaagtttgacctgagatggcccctcagggcagaaaaccaccacagctcctccgcttccagtgaactttgcagctgcgccgatcttacgtgccacttccaccatctctatgttcatagctcccaaacattcatctccaaacatactcctagagaaagaaaaaagaatcttgaattgtgtttgccttttattttgttttgaagattttctaatttgttaccttcgaagatcgaagttacggttcatgagttccttgaggttggagtaatctttcttaagcaatgcagttcgaccttcttcagctaattttgcaatttctgccattgatgatattataaactcatcaccgtctaaccaccttctacgaaccgtgctatgtacctgcatcatcaaacataaacaatgctcagtgagaaggaaagtaatagaatcagaagcagagtagtgaatagctctctaaccttgccagagtcactaggattctcagcatagatgagatgcagaggaggaagaagattgatatccattatagtgtatatcccatatccaactttatccatatgctctttactaaaatcctgcaaaagtaaagaagatcaaaacagagcaaaatcgatgaaaaatgaaaatttccatgtcaaaaagagtggcaaagatcatcctcaccatgtgaacaagaccaccaccatagacttgagcaacacggtcttgaagaccagcaacaataccaagttctttctccgcattaagaataaggttaggtcggacttcgattctgattgattgcctgacattgtagaagtcgagaaggcagctaagagcagcagatacaattgcactagaacctgaaagccccgtctgaaaaaaaacatcaaaactataggcttcagtataacatatatcaaaaactgaattcataatttacaacaaaatgagtttgtaacaaacctgtcttgggatattggtatcataagaaagagtgaagtttttgtcatgaagttgtataccattttctttgcaatagtttcggaatactttgcaaatcgccattagtaaccttacacctccatagtatccatcattttccaatcgataaacctagaaagaaagacaatatttcagctatttagcaatgatcagtgaaagacacaacacatactttgatagattcataagccacaaatctttcaatcaaaagttaaaaaccaataaaaatacatttctaaacaaatgcagctaagagaaacagttcaatagagaagagagaaacaaataatttgggaacagagcacatacgagattatcgagagaatcgaactggacaagatcatggaatggatgaggtttgatcaagagatgatcagatggttcgagcttagcccacgcccagaaattaccaatggtaaatgaaatcgtacgaccgaagtaaacatcgctagggtttccaagaaacccgattctagcaaacgagcgatgctcgaacacgccattatctttgccagaaatcgccggtttaggattcggatccatttttttgaatttacaatgtttcttaagactcttttgccaatttatagctgattttaaacttatctttagacccgtcggatgacatttacacgtcaggtctggtgtctgtttttttcgtgtgacgtcaggtctgatgtctgttcagtaaacagttaaggtagttctgtaatttgagagtctcgttgaccaaaagaaacaacaacaaaatttagttgggcctaaactgataattgggcctgtaacaaatatatgggtctttatgacgaaatttaaatactgtgtaaaagctggacatcaactcggacacgaataatccaaatgaactaactaaaccgaaattcatcgacaacttcatatcttcaatttaatcaaactgagctattcacattaggttaaaatagccaattagtcttttaaccaaatctccaatctaaaccaataacctgaataccttgagagattagagatagtatgtacatatattaagtaagtatttctcacatctatatcttaagattcaaaacatgttagaaagaaaaaagaacaaaagttggatgatttcccaaccaattggctctaactcaaatatgagagttataaaaagcaagcacaacagacaaaagaattgaaaaaccttaaaagggacaaaacaggttattacaaaactggtgggtgtgatcgttaacaaattaaaaaactgatgaaccaggttttgctcctcgtgtacgcgtgttttatagatacgtatgatttaactaaatgaagagcgttggaaatttaatctaactttgttgggtcaacaaacactctattcgagttcagggtccaaggttgttggatccacagttctttttgtttttaaccctagctaacaatgtttttggataattcatttttcctctatccatgatttaatagattaataataagtaccgtatttgctgggaagtttcatgtaatctttcttcctttttattcttcttcctccatattcatttatttgggttgacaaattttgggttgaaagaaacaggaaacaaacaataacacgttgtatttaatatagtcaaataaccaaaggagatataatcaaatttcaatgcataatcatctagtttccaatacttatataatcaaatagttagaccataacaaccctttttcaaaaaagaaattaaagagcattttgtattaatgttcttcttatatatatcacaactcgctaaacgtattattcgtgttgttgaaagaacaaaatctaactagttgataaatagcatacatttataaaatttcgatggtaattaaaaaggataagaaaatgtaaagagatagctagataagatacaaaagtccattcatgtaagtagttgcaaaagtgaacatggtcctccttagcattcaagcttcattaaaacaaaaaaaaaatgtatattcgaattacttggatattcaattaagcatatattttctttaaaaaacaaaaaaaagtgtttgaaaataaatagaactaaagaataggtcaaagcagttcgcgttaacatactggtcgtttcgtgaaactcacaaacctaagtccaatgctttgggttacatagtgagaccggttccgtaggtttcaacttgagtatgcttattatttaatcaaaagatggaaatgttataaacttataattattctgaaaaaggtatggtaagaatttgaaaaaagcttaaattaaaaaaaaaaaaaaagcaatcgaatgatgatgactttttaagtttatattattagatgatgaaatagcatgataaaatcgtaatttttgaacattgccagattggtaaaacatgcaaaacattctgtgagcaatcaaaagttatatcatagaaaaactaaatttatttttttgtcaagtttaggttacctagatattcattcacttaaactcatgcgtacttaaattatcaccacctattaattatttaagatgaaatttaatcatataatagattaatagtttaacctttatatatataccatcaagttttgaaaatcgtaatcttctatagatctgagttttaattaaattaaaagaattagggttgttccgataatagtacaactcggtcccctggaacacgtaatatcttgactagctagagaatagcgaagacgaagacccagttcgaattactatttataattgtttgacatagttggacatcaaattgctgttaaattaatatattagaaatttagaacagaggcttagctttattcatctaatattaagaaaaataaagattctacattgccgggagtatgtaatattgacttgctagttgctagaatagaaaagaccaaattcaaacatttttttttctttcgatatatgccaatgtccaatctcattaatatattacatcaccagaaaataataaaaatcaaatcaagataaaaaattttcgatatatccgagtagcatataatacttttacgtggtagattatcagaaagcagtatgaaaaatgttatgatattttcaccagaataaaataaaataaaaagatatgatataattggaagtcaaatgttagtttttaaaagttattgaaaaacgcgtgataattttactcgaacttaaaagtttttaattatttatctaaatgtccaaactttatcacctcaataattatatatagatttggatattgactatatacatttgtatataatctaatcttttaaaaagttaataaaatacttggatatgattgaaattcttcccacttataacctttaatcaccaattgtatacggcactaatcatcttactgcttataaaactttaaatttatttttcttcacacaatgtgttggcaaataagtttattgacagatcagcaaggtaaaaaagcattctgaccgtaggatcaataaccagacccacttatagtaacatccgagggatatgattattttattcctttttaataagatattcatttatttttgttaaaagctaataacactttttctccttaattaactgtcaataaacttaattaatttccagcagttttgggaatagatataaaccaaaaagcatcaaacggctataattggcgttacagttttcttaagaggagaaggattagatttaagcgagattttttcggatatatatattctctgtttttctttaattaaattgtttcgtgtttttgtttcgagttttcttcataaagttttgatttttgtcgggcttcgattttcggggtccgagatattcttcttcttcttcgcgataatttcccccgagaaaactcttctgggtaaaatcatgtccgatggatactatagttctaagaagacagacgatatctgcgatgatgtttgtggacaggttcgttctgtctctcgtttccacaaattttctctaatttcgtattgaatcggatttcgatttttgttcattgtttcgtttcgcattaatgaaatcgatattctgatacctttgaaattggatgagaattcgtagtaatgtggttttaaatttttccgatttctgattgtttggtaattttcatagggtttgtgttcttattcttatgttattgtcggaatttaaggattgagaggacgattggattctgtctcgattgtttttttttgtctgaatatttgaggcgaatgtctcccaaaatttcatgaacaattttaggttttgtttcatgataatctgggattttcgattgaatttggtgtaatttgttttagggttacactatacaaatacaatctctgtatagcgttacaaggattgtaatattcttttctcgatattggaatctaatttcagatttttggatttacaatggactatttttgattctctgatgttgtgtgaaatttttctgagtattttcctgggttggtttatgtttggcaggatggttctcgagcagccaaggccttctctagggttagatgtgtactacgaggatttgatttcaagacatatatcttcttcttcaccattgtccctattttcatctttggagtctatttgcatggtcagaagctcacatatttcttgagaccgctttgggaatctccaccaaagccgtttcaaacgctaccccattactaccatgagaacgcctccatggcaacactctgcagtcttcatggctggaaacaccgtgaatctccgagaagggtctttgatgctgtgttgttcagcaatgaagttgatatgcttactatccggtggaaagagctttatccttacataacacagtttgtgatccttgaatcaaactctactttcactggtttgcctaaacctttggttttcaatgggaatcgagcgaagttcgagtttgctgagccgaggctgagttatgggaacattgcaggacgattcaagaaaggagaaaacccgtttgtggaagaagcttaccagaggattgcattggatcagctgatcagactggctggtatagaagaagatgatctgttgataatgtctgatgttgatgagattcctagcgctcataccatcaatctgcttagatggtgcgatggatacccaccgattcttcatcttcagttgaaaaactacttatactcattcgagtacttcgttgacaacaaaagctggagagcttctattcatcagtacaagcctgggaagactcgatacgctcatttccgtcaaggcaacactcttttagcagattctggttggcattgcagtttctgtttcaggcacatcagtgagtttatattcaagatgaaagcgtacagtcacaatgaccgggtcagattctctcattatctaaacccaaaaagaatacaagatgtgatctgtaaaggaactgatctgttcgatatgcttcctgaagagtatacgttcagggaaatcatcgggaaactaggtccaatcccgcggtcttattccgcagttcatctaccagctcatctgatagaaaaagctgagagttacaaatacttgttacctgggaactgcataagggaaagtggctgataagggtttgttcttatcagtctttgtagtgttaggtaatttggtgggggaaacggcttattatcagtagagggagtgtggaacagagaatggtacagtttcttgggactcgaggaagagtgatctgataagtggagtctctggtttcagcattacctctcttgagggtatataacaaccttgtctgcttataatctcatactgacccatatgttccaatgtgttcccagagcttgttttgggaagttttgctggaatagtctctctctctctctctctctctctctctctctctctctctctctctctctctctctctgtctccatctatctctttctctattaactttcaaactattttcatcatactctcgcttttagactgtacaatttagtgatttctttacattattatcctctgagattctttgtaatctttatttattttattattccgctttctatattccgtttcatcaaaccatcactttcattgaagcttaatgcctaatacattcaccagatccttcattgcagcttcctatacataaattttagtaactaaaagaaaatcactcgagatctgaaaccactgaaactgtattgtctacgtaagcaacataaccgctatagtaaactgctactacaacgacaacaacaaaatacacgaaagttcggaattgccgaattggtatgaattgcgaagaactaaaagatcaaatatggttgtaaaaactagaaagggttccaaggaaaattgaagtgatattcataaacaaattacttggcctctctgatcgatgacagaaacagaagccaatgtggacagatcatactttactggctacttttatctatttacattcctgctgctgcgcctttgttcttattgtttttctcaaaatctttcttgtttcctttatcagggaaaacgcaagaacacgcaatttcttgtctttagcttcaaaaccatcccaaccaattcattaagctgtcctcagaagcaaactgcaaaagccgcaaaagatcttagttttaagtttctcaatgattttctaaatatataaagtaagtgtgtgtgtgttttatgttctcacggaaagtaaatcagggagagtccctaattctgcattctccaaatctgaaactgaaaagtttcctgatccgtagtcaacatttccatgattaggaatcgacgaagcttcaattttcttggacattaagttatcttcaataacactcacattccctcccactttagctattttgtctgatgtcgaaccagaagaagcttcttgaatgttctccagtccctgattttaccagaaacataaacatacacgcaacaagaagaacgtcattgatacttgcagagaaaggaactaacctcggcatatgaatcaagaaccatcttagaatcatcatcaaaagctatttcatcctcatcaacagaaatcacaggtctaacttgtgtaatagtactagttttcggtgtgctagggccacctcgaaccccagaactctcactctcatcgatggttttctcctgttgctttggttgctgatatgtgatcttagagacaacatattccccaatctcgccttcttcagttcccaaatggtactggtgcaaaacccagttagatttctcgggtttgaatccctttctcgcgctcttgtagagcaccatgatcttcttgcatcccttctggattccattgagcatcaccggtttggtttgaccagtcttgtgccagcgaaccgtatcatccttgagactagttggtgtgatccttctccgctttctctgcccattttgatatgcatgtgccgtcttgttaaagaagaagacactagttccatctttactcacacctacaaacatattaatgagtgattaattactcaatattagcatcaaattaacagacgatttgtcttattattacctggaaggttttgagggtgagtgtagttgataccaacatcttgagtgactgaacatataaagtcttggataagaagatgtggttttaagccatcaataccacacttagcttccaaatgctcaatcacttcctcatcggttggctcgaatttcacacctttaggaaggcctggccatggagtcagtacctgacaaagcaaaataagaaaaatactatctcagtattcacataaacagggccataagctctagttacatgtgttctatatttgttactttacattgctgttgtcgatgcggtaagagcagttaaagcagttgatataagctccgcagtctttaatctgcagagctgaagacagagacgcattctttacattccttgagatccatgggccatccactatccaagtcctgtgtagagttttcatcggtttagtgtcaatagcaaagctatatatacaaggtttaagaagacggagaaacatatttgtggtactagattcaagcgtttcttgtcaaaaacagacaaagatttcaagaatcactaaaaatttctctagatgcttaggctatgaatggcaatagttctcaaaatgagtttcaagttttcagtgtttggtttttgctataaattctagttcttaaaaaccttgaagttaagttgtttagattctggtttctaactaagtgactaaatcttttttggaacacttggcttctaagatatgttctggctatatgttttcatgaacttaaagatagaaaattgatttttgggggtaaatgtagatagataatatttttgtttacaaaaaaagaactatctgaggaaaaaaaaaaccgaggattttttttttttttattaggggtttttattggttaaactttaaaacactcaacaactaatttttctaacatttaatgaatataattgttctgaaggatgaaaaaatagttgaaatttcggattttaattcataatccagcattaaaaaagcaaatgtcttttcgagattttggaacaaagatgaggcttttctggtctttaacaatcacaaaagacaaaggaaaaaaaaaacgattgatatagattcatcggaataggcagagagtttaagtgaactcaaataaagcaaatctggactatgacaaagatcttgacattgggtttatgatattcaagcttacctttccatgacctaatgacctataaaccaagaccaaagaacgaccgagaaagaaagaaagagagagagaaaacgtttctccaacaggctaagtaagtaaaaaagaccgagagagcagagagaaaaaaaggtcgagactttggagagagaagtagtattatacgtgtgtgttgatgagcgggaaatagaggttcgtttgcttccgaacctaagcttcgagcaaagcttctcaagaacacaactggctaacgttaggctcggagtatgtatctttgtgttgacttagcttgactagactttggtctggatacgaacctgagatatgtaaggatatttttcaatgccgaagcagtggagagcttcggaattcgagcctaaatgggacttcgtaaataagtggttttagtagggccaggcataccttgatcaccaagccagaaaataaccttattttaatctttagtttttaccccttttgttgtttacctgattagacacagtacttatttcaggaaatgaccgtgactgttgtctgttgatataaatagtaagaataaaaatgacaattttgcgaaactttataaacagtaggagagctttcaccctgctcaggtaaatttatctaatcgcctccaatctccattatagatacaaataaatcacttggttgtcaagcaaaaaaaagatacatatgctttaggcagagtaaataaatactcgcttatatccttatcttgtaaagttgtaatagaaaaagatggattaaagtaagatttgatgacctttttcaattataaatatttctagaagccgattaattctttttttgcaatatctttataatttttttgttggaattattatatttaaaaggaaaaactaatttaaaagcatacgaatatgtaaacaatttataagacaaaatatatatacgtgttaatacagtcctctacaatatttagaagatataaattgattattgactaaagattacaggcttacaactatttgtcacttgcgtgtccaatattagttatatatttattgcatacgaaaacaaacaaaaatgtcgttgtagtatagtggtaagtattcccgcctgtcacgcgggtgacccgggttcgatccccggcaacggcgattatccttttaaccttatttcatattttacgtgggctttgtaagaagattaagaatccgcgagccttctttcttaggcccatatcgttttggggaatccctacaaggtgcctaatttatcgtttctgaagaatacaagtaatctatgttcatgaagattcaagagaacgattgagtgactaatggcgagtttgatcgcttgaaaatcaaatgcagaagaagagttgttgaccgtcacacacagaagtcagaagacagaatgatcatgaagaagacgattcaatataagactcatgtttccgggtgaaccataatacatattaataagtccctgaccgccacacagaaggcaacgttacaaaatactacatttgcctatctttctgtgtgcctgtcagaaactcacaaagggcaatagctccaaacaaaatcatatcatatcagatttgtttgggcatcaatcgctttatccatgaagacgatcaaaatataagactgatgatgtttccaagtttgatttcatatatattatcagtaatccccataaagaaccttacgtggatcgagctgaccgctgcagtagcttgaggagacgatagagagttcttgtcttcctttccactcttcatgtggcttcaacacaattgggctttctatagcaccagaatctacacacagcattgttgtgtaatcctcatctcccatatctgcaatactcttggccttcttgtcccaagggttccacacagctgctcataccaaagataccaccaacatataagaaacaaacttcacattttgtttacccattggatcaaggggaaaaacaaattcttacgcacctgcatttggcatgccttcctttcgcaactcgatagttcttttcctctcatgatctatgatggcaatctttgtcggcgtgttcaagtacactttatcaacctacagggtttactgacgatacattagattctgcttgtagagaagttttagcgaaaaacaaaaggcattcgtgtgcgtcacattacctcgccgtcaaaggtaattgcatctgcctgctccgtgaatctttctctacgcatcaagttgtccagataatcaagcgtctccagaccctcaacccgaacttcactgcaaattgtatgccatgcgatgtttacttagcaaaaggtgttttaaagaatttctttgattagagagaggttaagaagcaacccgagacaagaacaatagctttgaccatgatgatgatttaaatgacgatacagataaatggaggaaaggcgacataccttatatcggatacatataagtagttacgaagtgaaaacataaaggaaaatgcctttgtgtcagtgttcctcacacgcgggattattgtaagttttccaggactgatagatatgcgaacacgaagttcaaagctgcaacgaagtaggcagagaaagattatgtcgatgagattgaaatggactaagagagatatcaactgtacacacctatgaggccatatcttcaaatcatcttcagtagacttcaatactaaatcaacagttgattgctggttagccggaggcagaggtgaaggatcattatcaagtgaccagaatctgttacgggcaaatccatgtcgctcaagtgcaccaaaatttccaaacttcaaagacgacaaaacatggttgattgcggcagagggaaaaattagtcagtgtaacttaaaatgatcggaaagatatctaacctgtggaaagctgataggtaaccctcccctgatcgcctttggtggcttcaattgcgcctaagtgaaacatagtgaacagaaaacattatcaatggatttcaattccatactcaacaactcatttttttcaactctaaaagcacaatttacaaatgatctgacacatgctgcaaaacaaaaagcttgttaagaagaaaaaaggattgatcattcatctctatcaacatgtaagagtatacataccttggtgctcatataaagcaacttctctctcctttcgtttttccaagaaaccacttgccctccatacaaaagcacctgaaaccattatccagcccacaaaaaatgtaacttgacaaagttttcgagaaaattagcacatgtttttcaatgagactccatcaagctaaaccctctctaatccaaacaacaacattagtgaaagcatcaacatttaagctcaaagtactaaactactaaacatcaaatcttctcagattaccaccatgatgctatgagaaaaaaaaactcatttagggtaaaaattgaagaagagaagagagggaaagagtaaaaacctcagcagttgatccggcagggtcggtcaaaagaatgcgagaagagccatcacgatcattgactacatttaaaggcatcgatttgggcctaattaacctcgatcttattcccctcacgaatgggttcactttccctttcttccactccagcttcaccacccacaaacaaaaaaacccagatgcatgcattatcaataaattaatttatacacgaattagagaattaaaaaataaattaatggtcattcataacataggaatataaaattgggaacacgaattagagagaaacaaacaaaaatttcaacaaacacaccactgaactcgaacgcgactgggagacagagagatcgagagtgatacgaagaaagagagagagagactgttgatgtttgttgaaaatactgaccttgattgatcgaatattggctttgattctttctcagagatttgggttttgagtccggagcttgatgaagaagaagaaggccattgtgcgcatttgtagttgttctctgcatcagcattagcgtcgatactctgccacgtgtgcatttgtctaataaataattttgttttaaagagcagcaaatattttaatttcgcattgaagtaattttctctcaaactctgtatttatttatttcttaaataataaccttttttatatattttttgtgtgcaaaactcttttttatatatataagaacatgtttaagggatttttttttttttttgttttacatgcttttctataatcatgcatttattttttaaaatatttgtgatgccatgtttttataattattatttgaaaatttagaacaaaaacaaataatgttttactatcaaaggtagtcatgacaaacagaaatttaaaaaaatatgtaattttagctttcaatttccaaaccatatatatatagagatcaaattaccaataaagccaaatcctaaaggaggacgaattttataatttcgaatcttttttttgggtttgtggggttatatataaaaatattatatattcatacgcatcaatatcacaattctaaatttgaatagacatttaaaacaacatgcaatggatcaattttgttttcttcagtaccaattggtaaggatttggcttttgattaacgctagctacattacgctagaggagaacatcgaatcaacattattaaactaataagtattatttatgttgatctatactatatgattctaaattgaatgtgaataaccgatggattcacattaactagaatattagccattcaatatgcaaggaaatggtgggggctggaaaatgcattcttctttctttcttgtttcttaaataaaagaataatcttatcaaatatcacaaactgataaattaaaagcaagaaaaaagtaagtaaaccgaaagagtatatgccaagtccagaattacggatgtagctttttggaagaaaaatgttacgtggctcatttacagatatattaattaccactaggttttaagggattaagagtacgaagctgattagctgttttgcactcagaattacggtggtttaattagatttatgcgatgtttggtgcgcatggaccgacgttattgctttcactctttttgaatgaatctgctatggtagatgtgcatagggaatgagtgtgaagctatgagtgtttttgatgatgttactgattcctattagtacatcgtggtacatacactattggttgcaataagatggtggtaacaattattcctaagaagaagtctctctttctgtgaaacagtacatggttttatatatacaagatctggaatgcaaccagggggttatgtgctgagtttggaaatcatctcttctaccaacttcaacatggttccaggtattcgctctccttcttgatcaatctcccgcataatttgctcaacaatctcaatctttgactgtttgtttttgatgacatagccagagcagtcccttagtagtagcagtagctctctagccatttctttagccctccgtgtcccgtctacgctcacttgaagcaatccaggcatcactccttctctaagtatcattcctcggtttgtctctctgtcgttgttgcatataccaagtagtattcccacggcatgctctttacactgtgctgacccttcttcaatggcttccaccagaaccccaattgctccaccgatgctggaaacagattctggtgaatgagaaattatgttttcaagcaaagctactgccttatcagccaattcggaagatttatcgcaaaagttgatgacttgaagcaaagcatatggtgctcccgaagctataaccaggggaacaatctgatggagagtagatagattttgtagtgttgctatgccatcaaccttggcctggatggtaagtctatcgagcccaataagtccaactaaaagctgaaccaacctggttgatgccatcttaaccttgtttttgttgcaggaagagagaatcagaagaaatgccatggccaattcaagaactaccatcttcgtttctgactggagaatttctagcaacgttggtactgcgccagatttcacaattcggactttgttcctgtaagttcggtaataaacacaattattattattttgcctgttactaccgcacatgaatagttaaacacagatagaaacacaaacctttcactgccaaaggcaaggctgagtaatgcagatagagcaacctctgttgtgatacagtcttgagattgtaacatcgagagcaaaggagaaatgatctctctttctgccaatttttgtctttgcttcctgcttagattagtcagctctatagctgcttctatttgagactctctgttaccgctaagaagactctctaccacaatctcctccattgcagcactcttcttcctatctgtaattttggttaataacttcacttggaagaagagtgagggaagttgtggtggtgattggtgaagtaaatatattagaaaaaacaaacatagaaaatttggttgctttaacaagcaatgttaggctttttttttgggcatccattgtttcatgttgaagcaaactcacctaaagcttctttttttttaactgtatgtttatttattttttgttctttttgtttctgtagcttaaaaccccatttgggaaagtaagtatctgtttgaatattttgttcttgattgattgatctatccaatgttgattccagtagattgaacctttaactttcctcatgtagaagcaaggtaagcttatctgcattatccagagtcattgatcccaagagattatattattcaagcaatgtgacaggatagttttattttcctctgcaaatttctgttttccattctagttgaccttgtatatttatcttattatagtgtattttttccacgttattataatttgattaattagattttctttgaactgggtctttagctctcaacaatagctatactgtttgatatgaatatgtgtctctttcttgatttaaacgcttatgagatttctaataattatgtctaacttttctttaataatttctaacgaatgcaaatcagttgtcttcaatataataaactgacaaatgatacgcatgtatagaatttaaaaacatttcatctaacgtgaatcacctgatacaaaatgaaatgatttaaagatcttaagtttataaattgcaaaaataatgaccatcacgtgaaaaataatatttgggtgtgttttttatattttagtcgtctataaatgcaaaattttcaatagaaaataacatatttttttattttaatgttttacatccttctcttttggttaggacaggaatatgatcaagtttctatccccattggtccctagttcgaatatgtgtgtaagaaaaaagtgcttaaattttcttcggttacaagtatggaattcagaaatacgtacagtatatacatttttaaaattatatatttccaacgaaaactatacaatatacaacttgttatcaaataaacttgctgactaaaatacattgtaaacgataccgagtttgtaaattgtaagaacgtctccaactagaaaattcccattcaagtctattattgttaccattttttagtaattattaggtagataagattatttctttaggcgtactcatgcatcaagaaaaaaaagagatcaaatattataaaattgaaatgtacttttgatattctatgttgtacagcgccgttgtctttaagaaaatcattgtcttactcttacattattcatgtaacaaagttaagacgtacgcaatagattcataaaatttagtctaaaacttcagtatagttggacgtataaaaatcaaaatcaaaactttttaaaaaatttggaagtacatgtcgcgaaagactaatgatgatgatacataacttaagaaaaagccttctgaagaaacagaaatgtaaacaaaaatataaaaacaagttatcatgatgatggttgagtatcattcaaccttttcttgcgctgctcgattatttcaacacctgatctcttccttgactgcgaaatctgcagataccatttcacaatacaccaaattaacatcaacttacaaacactaagagaccctttcattgctatgctcttacagacctatagaaactatataaaaaaaaaaaaaatggtaaatgtaaatgggtacataccttcatggcatcgtagagcttcctcttcttacgggacatcaacactttgggcatatcagcgtcctcttgagctatttgcatagcatccggaactgattcttcaccctcaccttcagccaacacaggcgctacaacatccttacttccatttatttccatcttcagttcctcatggtattgcttctcctgcgccgccatctacataaaataacccacaaagttaacaacttaatcaacgcatacaaaagtttgacaggcttgaattgcttatatatcagcaaagtcaaaccttcttcttgttctttgcagcttcggcttcctccgcacgactcataacaccagcgtacaataaattttgaggatcttcaagatcctctttcccaacacctggcaatggaagcacttcgtttcttgctgctgcctgtagtcttttgatggtttcggcataatcaggaacgtatccttctgcttcattgtccacaaatggtgacaagtgtggcggtggaattctgcttgtagaaaagcacacaatacatatacaaacagctgagtaaaacaaaacatggtagtgaaaaaagaaataagcaaagtcttcgagtgtgttaccttccgaccaagtacttttcagttggcaagattatgcgagcattcacacagtcatagatccactgtggttgcacatataccctagaaaggtacaaatggccagcgcttggcttatcgatgatctacagaagtataatgtatgttcttgagactatctatctagacacaatcgtaatattaataatcaagctaaatagcttacatgatgtgtaatactctcatcatcctccttgaaaggtgcaccttctccttcccaagacaccatcccaccaaaagcagtaatcaccaattgcagggactctcttggaacctacacaagtatacaaaattattatacaatagacaggccccagtcatgaaacaatttaatgatcttctaggtcactgtgaggagacactcaagaacacagatcttccaaatatcaaaacatggaatgcaatttacaatcattgacacaactttggttaggactacacagtagttctaggttccctcaccactaagtacgtataagaatcattttttttttaaatgccgttacttacaaatggtttgtctttaagtaagagtctttgaacattatagacatgtcagagatttaggctatagaaaaattaccattttatttggtaaattactgaatcagtttagtagcaaatgagtatgttttgtccataacagttaaaatttgccaatgatttactattttagaacaaaattcagtgataagaagtggctcagaaagaatgaatcaaaaagatacctcacggctcaagaaaaacttcagatccttgaagagtgacttgcacactcttgtttcttcatcctcttcaacctctttattgttatctgcaaccagatgcatcaatgctccaggctcacttgaaggcagctggtgctgaagctgtgcaagtctaagttcagactcttcacggtcatttgactgtgagctaaatgaagcatcaactttgggttccaccgccatgcctctggagctggcatctatgtatctagacagtgcatagagatctgcaacattgaagacataaacaaatatatattaatcagagtaataggtgacacgttctaatggttacatatgaactcccatatgaaagatatctcttgaggaaaataattgcttcttggaggaggacaacgtacctgcagccaaagcctccaaccgagagtcaaggattggcgggtatttaacattcagagaatggtaaagcttgaagttaataaaggcaagaagagtctgcatcaaaaggtgaatgaaaatttgtcagcaaaagtccaaacattaaattattaaggaaaagggggaatgaatagatattagaagttctcacctcgtaaaattccaagaaggtaagcaggacaccaaagtcaacatcatttgtaaaaacttgttggattgcatgaggggtcaaccaagtgatcttttgaccttctatttcagcctatcaagataatattaccaaagtttcattaaagaggaagtaatctactaatcccattataagctctcaagataaagtaaaacaatacctgatagtaaatacccttgacagacacaaacactttacgtaacgcatgagaacgtgaaatgtaagcttgccattcatgggtcaatctgattcacaaaagaagcacagagtcagattaaaaatatgaaactaaaagaagccgtcaataagtcaagacacaagggtccaagagaaagtataagattctgaccttcgacagttgtggactcgcttaacttcaagattttccctgtctgatgcaggtaacaccgcaaaaagatgaaccatagtgagacagtcatccaagtctcgcagtgcatcaataaatgttggatacctaaacattaataacataaatagaaatgagagttaacagtctaaaactcatggatgttcaaacacaactgtataataaattcaagtgtgtcaagcaaacctctcacggatcaatctatcaagcttgtaagtaggttggcgggtgagcagaaggcgtgcaagctcctcgtttttcttggccttggcttttttgaccttcttttggtatgttttgatttccctaaacttctcaagaagaggctcgtgcatgaggaaagcaatgtccttgacatggtagtaagtgtgatggtttcccttaatcttcttctttggttctcggggaaatatacctttgacaatacatagtctcctgaaatacataatcggcaggtacaataataacaaattagtcacctactgataaccagagaatttctaagtaaaaacctagctaggaacataacacaatctcgatatcaattctaagataaattgacaaaacacgaagcatctgaaaaaaacctagtgcacacatatgcttgtccgaacaataactcgaagaaaaacagtgaaaagttgaaggataaagaagaaagagagtgaacctgaatagattcaagttaacttgaagatgtttaagagcttgcgacctggtcatatacctagccgcatttccttccttctttttcccctacaaatgacaaacataaccaaattcatctcagaaacaagaaagaaccagctccaaagtttttcgagcaaagggaaagacgaaaatagattacaacagttgttgaacaacgaatattggggagaatagagcttcaatcaaagagaaacactcaccgttggtctgtaatgcttcggcatggtgaaaacgccaccagagaaggaacgagagacgcggagaggaaaaagagagacagagaattagggttttagccaaaacgatttgttaaaagtcggggtacaagaggacgatataatgggcttcttatgacctatttgacttcttctcaggtttattataccatgggcttttaaggcccaatatgctcattgttgtttgttcttctgggttttttattaggatcatggttcgtgaaatcttttccagtttacgtgaacattgatgtatgtattcatccatatcttttttacgtaaaataagagtaaatagtcattaaagaaaacatattgtaaccatctagactcaaattcataaactctaaatttgattaacatactactgcttccaaatttttctaattgtcaacattaaaaaacgatacacaagtgcataatggaaacatatatgtcgtcactgttgttgatcggtaggaggatcggcgggggctggtgattcaccgtcgtttgggatccagaatgtgagaaccgtagaagcagcaacgaacatggctctacgtggtgcccatttcagacacgacactactcctatgttgttctcccacctcgccacctgctttttacacaaaatccccactaaaatttaaatactgtgaaagcataacgcaaaaatagtatctacaactttataaattattcatcacttttaagtgaatcagtgtcctagtggtgttgattattctgcactttacctcagatgggttctcgatgttccacgcatgtaaggttccatcacctgaacctgtatccgaaaaagaaaactaagctgattaaatttgaatattgtgtagatgagtcatgataaaagatcatctaggaacgcgtattacctgacagaacatacttgccatctggtgtgaaggtggcctctatgggtgtaccctgtgaaggctccaaactaaaaccacatttctgcaaaataacataccgtcttttaccaacttgaaacctaacgttctgtcttcttcaggtgaaagatagagaacgtgattaccttctctccacgatatgcatcaagaacgtagatattgttatttgtagtcgttaggagcatggatttcccatcgttgctgaattttatatcgttaacctcagcagtatccccacccaccagaaatgtgtcaaagggaccctacataagagatcaattgggtttagaagttagaactaacaagagcagtcatgcgtaaggctgtgtgaatcattgtaagaagctaaccttgtcataacacctggaatcaaataatttaacagcacctccttccattgcaattgcaaacacaaggccttgttggtcatacgcaactgcaggtctaccacgtagatgtagaattccctattgactaaaagggtaagcatagatcatgaaaccatataaattcacagagagagtattaaggtaaagagcctaaatattctcaatgtttcgtggttccagcatcttcatcaagtttaactttcaaggtgatatatcacgaggtttttgctaacaaaaagaaaaaggcacttttctcattaaaactctagcatattaagacttattccatctagccttctcagagtgtaaaactatagaaaccaacctggcaggcatttacacgaagatcccagagtctaacacttcggtcgagagaaccagacatgaagctatcatttataggagacatacaaagtgatacaaccctgaaacagaagaacattttccatcatcaatgtacatactagtaaaatccaaattcacaattccagaggttataagcagacctgtctttatgccctttaaagtagcgtaggatccgattatcatacattgagagatatctcaaggattctggtacacaaaaacaagtatacaagtaagtaataatccaccaccgctttgattatccaatctcaagcaagagaaaaggaggactcaccaccagtggactccaaattgtatcgagaagagcaaattagagagctaggatgatgggtaaagcatacacgatcggtgccatgtttcttatggtatgtaatcttcagctgtctaacaaacatccatacaaattgaatatttcagtcttctttttgctccacaagaatttcaactaatcggttaatcaaaaagcttcttcttgattccttaagtaacctagtttctctagaacttgaccagataagtataaaacctaaaaacaggaaggaagaactgacttagcgttggcgatatcgaagaggcgaagtgaatcatcttcgctggatgtgaccaatagatcatcagtcctatggaaacccaccgaatgtatcttccctccctgtgtaaaaccaacaccgagaaattgaacggattaatctcggaagctggattccaccaaagtttaatccgaaatcaaatgagattacaaaaagagaaaaattcgttcgtacaaaatcagagaagactgcgcccatggccatcctgcgaaccagtccgtcgtctagctccgtcaacgacatcgtcaagctggattatcagtgaagcacgagaaaaatccgaggacgagagagggagaggggcaagggaacgagagagagaactaaagagtttagtgggtttcgcgggttactaaacgcagccgttttagttttaagaattgggataacaaaagaaaaacatcttgtcgttcagttctagtcataaaaactacatgtcgttttggattaggaaagagagcctgtacactgcgactttgttacactcactggtctgtgattttctaagagtcaaataggcaaatgaatgaaacacagaaaaaaataaatgatcgaagcttcaagtttcaaacatacatggaaagctttgaaaaaatattgaagtcacaaatgaaacaccaaggtaatccaaaagatatgttcgaggaaatctgacatgagagataaaagactatacaatgtcagccaaaccggaattagagacaacacagctaacgaccaccaaaccaacctcttggcggttgctgctgctgctgctgcatcatagctcctctatctccattcatcagcttatctaaaacaacattgaggtcaacagcttgaccgttctctgtcaatgttctcactgttcctctcacttggtcccttgggaaccccatgctaaccactttgtcaatgacatcatcgactggggctctgtttcctgatcttggggaatctgagccaccaccacttccaccgctgctgatggctgatgccattggtaaaccttgtggtagtgggcgtgccattgggagctgtgggtaggcaccagatccacttccactctgatgtgtgggtttcacagatggggtgtttccatactgtgaaggtggcccggtatacgggtatgattcaggagaatatccggaaggaaaacctgaattggatctgccgcctggtccatcatacattgatggtggcgttggaggagcgttgtagtactgttgagatggggcagaacctggaggtggatgagaaggtggttgacgaggagggtttggcgggtaagattgctgagggtaaggtggttcctccgggttgtagcctgacgggtgttggagctgaggaggcggctgttgcgggtattgtggctgttgaggaggtggctggtaagggggttgatgcaatgactgggttggtggaggaggttgataaggaggctggattgttggaggtggctgggactgaccagacggagggaaataaggctcttgttggggagagaactggttaggaagctgaggcagttgtaatgaaggtggtgagagaccgtgctgtgaggcaggcggttggataaattgttgtggtgggaggccctgctgagtaagagacgggggagctgcagcagaagctggtggctgaggcagagatgcaggcggctgagcagtgggttcaacatgtgtagagtgtgtctccggctgctggtttacctttgataactggagctttgaaagttgaagctgcgcctcaactatttcttgtttgtccttcaacaactgtacaccgttttgcacctgaatgcaatcatacaaagaaggaactgaggaatctaggatcttgatagatgatatagcgaaaagtatgaaagctcagatgcattgaaacatgaaaaatatgaaaccagaaacttgtttgacgttaacagatcaagaattcccaggccagtcaagaaatggcatccaaaaccaaaaggcagagaagaacgtttgtctagtatctcagattcatgtgattatttctaatttcaaattaatctccattaggtatcccaaaagagtagagtacctctaacatgatgttttcaagctgtctcaatttaccatcagtttttccatgactgttcccaacagaaactttcacatcatcaaccaaattctcgagatctcgggttctggtctccagctgcgttagacgtgcactgacaccttccataacatgtaacaatttatcagcatgggccttcattgtccgatcgatcgcagatataatcgctgactcgggggaatttcgatccttctcagcaaacaactttgaaggttcgagagagtccatagagccataactctgaaagaacgaacaaatgcaacaagtaaggctaagtgtgataattgtcataatcctaaccatgcaagcatcaagcaaggtttaagcaaacattataatgtagaaaacagataagcaaatgatcgttgttacacaaagtctctgctttcaacttcacacgatgataaatgtaagcacagtgaagaataacacagagccgagcttgggaacaagaaccagaactagtacatatcttctaaacctaaagaaaccttaagaaccgattctaataagccaaataacgtaaaatcgtgattaactagtgaagccaacaaacgaagctagattgatcgcaaatcacaaagaccgggagatataggagaacttagaaatattactcttgcggaagaagctgaaaccggtttaggatcagacgcatcccaaaccctagcagccgtggaattaacagatccggcgagatctaaagcgtggtgagacaatccggcggaggcattagggcgcataggttggaaatcatagctagggaagatagcttccttcttcgattccaatccattatcgccgacacggtagttctgatgatcgccgtcttgtgaattgttgctgttgtcgttcatgagatccattatctgcttatccgagaacagggccgattttattagatcgaaagattgcattatataatttttttagtctcccttgatttcgattttatatgattttctaacttcctgatgaaataatgtcatcatttttcatcggtcttgttgctttttctaagtcagcatttcaactaattgctgaagccagttgggcctactaacttaaattggcccataactatttactttctgcaacgatgaaatctcaaacacaactcgatggagggacaaaagaagaaccagcaggattttactgcagttacgactttgagaacaacttaaaacatgactaactcaaaagtctttacactgtgattggtgggatacgccaatcccttgcaatagtgtgagcacaaatagcaagctattttgatggctcactccctcaataaattgagttaatatcgtgtgaaccgatggtccacatatcagatattaaactgataagaacagatactacacttgatcttagccaaaaggccgagaaaggtatgcttaggtaagtaaatcgtgatcctttttatagcaaaactttgcctttggtttgcaaatacacttccgatgtgggacttgtttaagctgaacacttgatggaaagttactcgtaagtcatttattgaggaatacgtttaaagattaaagattgaatgttgaggaaaattaatttattgagaaaattttcaagttattgattgatagagttaatctcagtaagagacaaccctccaaaaataggcgtatgccgcttggtacgacaagcacacggtattctttagtaaaaggcgaaagaatagttcgctatgtgcttattgcacggctccgtgaattttcttcgagagctctctccgttttatatatgccttgagtttgttattcttctctctgtgtttacgatgtgggactaaaaccaatatatgcaaaatttacgcgctctcttttgtcacaaagaatatgggcttttattacttttccccactctccatgcaagttattaaacaaaattgctaatatgggcttttgtaactttgccccacttttcgtaattgtgaggccactttgatctaaatttagaatatggggactagggaccatagagaaattttaatactaccatagaaagttcggaaattctgctagtacaaaactcgccgttgtactttcagaaaagtacaatgatgatgattttcttcttttaatcaagtttgcagtacacatgtccgaagttttttcttgtactatcccaaacataatgaatgccacataacttgctcgtgtactacacaattgttgtggtgttattgtgtactacccaatccattcattgtctgtgtatttatagtttccagcatgtttgagacaaaccaaaactcaaaatgtaataacaagaagatatcaatatatcatgaaggtagtggatctcgacagggttgatatgagaacacacgagtaatcaacggctgtaatgacgctacgtcattgttacagctctcgttttcatgtgttctcaggtcacccctgctgagctctttctctaccgtccatcttttatcaaggctggcttttactcatttaccaaatggtgtaagtttctatgtaaattcgtcatcgtaagtattacagatgaaatcacagtagtacaattgtacaaacatagtaactcttggttatcttacgtacctatgtgtaatatatgctttaaatggtgaaggatctacttattgtcatgctctttgccctctaacaagatagtctgccaaagaaatagaggaagtaaagaaacccacaatgagttcatcaaaatgtttgtgatgttagtttcttagtttaagctatgatagtgaaagaaaagtttacttcacggagtaggcggagagcggcgggacgagtgaacttcctggcgaagaggaagcacggtgatggtttccctttactgctacaccattctcgccggtattcagtctcgtagttgatattgtcgattccctgagaatcaatgtgtttagttagagattctatttatgttttaagtttgtaagagggctaaagccatggcaagaaaaaaagaaaaagagatacatacattgtaatggatagtttcatttctaccaaataaaatgttggtcttacggatgcttaccttaatggactgtataagatcaggagtagcatcagaaaacttgtaagtcataggatgccatccacgacgttcattacttttcgaggatgaaaggtcccaagctgagtgtgtcagtgatcttcgtgtgagttcgctatctacacccttttgctgaaatttgaagaagcattaccagatttgattagtaatactatttatttctaaacaacaattcacatggttggatcaaacattgatcttacagatagcaatgtctgaacatagtgctcatcaggtatacagttgtgttccttccaaccttcagctggctacacaataagattacattagtacaacacatcgtgtcctggtcatcaaactgtaaatgcctgccagattctacagagtaaaacatgtagaaatcgaatgggcatgagctaacgggcaaggaggaactgttaataacttaatacggtgcggtagttaaatatgtgaccagagaaaagcaacttactacaggacgatctcgccaaaactctggaagtgattttctctgcaagatcatatgcaaaaaaaaaaagtgagccaacagtgaagagtccactaacaaagcaactctcacaataagacactaaaatctaaaatcagtggttctaacttctaagtctctcttggcagctaaaccatctttcctttgaaaattaatgagttaaaacaaaaagcatatatccctctttacagtatcacactatagaggacagctcataagttcagttacagtattaccaaacttgctaatgaagtgaaggttttaacaacttaccctgcaatgctgctgaaacataggaaagacagaggtatcattcaccacaatttctgcgtgttttctattcagaacgacccacttagagaagacaatggggtaaagaaaacatagcagataatattgtcagcttaactgcacacattcagaatgacagaattcgtagtcattcagaaacacattttacacaacaagtgatttggaacttcacctgtgatccttttctccagttacgaacaggaataatgggattcattctaggattataacggctatcttttgtatctgcaaagctgcaatacagaaaaatatttagtaatttggtgtcaaagttgaaatatggagttatgtaaataagcagcacggacctatcaacgaaactagttggtgttgacatgatgtagttatacgtgtagctgaaactgtacagaggtatgcagctgagaagaaaccaaaaaaactaaaaaattcgttaagcaagtcatcaactacaatccaaacatgaaaaggtattaacagaatcaatctcacctatcagaaagaaaaacaaagcggtgattaaatgaatctctaagtgcatgtctaagcaatacacgttctgcttcaatcatggttgattcaccccaatctacctgtaattagcaaataaatcatacgacttataaaaaacaatgctgctaatatctaaattgatacattctcatagcagcaacctgtatactgtcattaagttgccgatccaaaaagtacttggatcgcgttgtagcctcgttgagaacaaatccaggtctagaatgaacatatattgagaactttccatcctcaccctgcagaagcacatgtcattatggaccaagctcaaatacgagagtcagtgtttctgatcccaattagaggaggaggaggaagagaagagtatataccttaaagaaagcatcccagacaaactcgagagggagtcgattccgggcaatgaagaggaaggcaatctgtggtctctgatctagacgaggctttttaagcgaatcgagagacgcagagattcgattgaaacgagcttgtatagatgcgaaacgagcttgtataaatacgaaagtcccaaagcagaaagcgaacatcaacgtggcgtataccttcctcttccatctgtacagtaacttctgctgagacaccttcttcttcattttggatccacacagaaaatcgcgctcaagtcaattttcccgccattcgtctccggtacacgcagcttcgagtctctttatttctatcggtcgcgcgtctctggtgaaactagagctgtttcgaggcaattcaactctcgatctctggagacgaaccagatcgaacatggaagaatcttcttcaaaatcagtggaagatttaccggttgattgaagagaactccaaggaagatggcgtcgaacgcaagggagagtaattaccggaaaggtttggtgatcgggaagacaaatcacgtggaagaagatgagctttcagctttcacagaggagacttggagagtgagaaagaaatagaggtgctggtgagtgtgtaaaatcaatgagtagagctggtgaagtgggcctctctctctgattttttcttaaagcgaacacttcccactgggatattttaagcccggtccaattcttacccagcaaattattattttattcttttcgttaactatttttttaacagaattcaaaatttacagaaaactggttcgtgaaataaatatcacagtagtgtgaaataataaacaaacacgtgagggcatctttggaacacttcctagtacctctttgacgttccaactagtacaaaactcgcctttgtactactgtcagagaagtacaatgttgatttttttgtaaatcagtttcgcagtacacaattctgtaggttttttttattgtactaaagaaaacgtatatgaatgcaacaaatcgttggcccgtttgttgtgttgtgttgtgtactacaatttgtgtggtaatattgtgtactacacaatcctttcatcatttgttgtgttgtgtatatatagtagctctcagcagatttgaaggatatcgaaactcaaactgtaacagtccttttattactggtttagaagatagataaatattgttaaggtagtggatctcgacagggttgatatgagaacacacgagcaatcaacggctataacgacgctacgtcattgttacagctctcgtttcatgtgttctcaggtcacccctgctgagctctttctctaccgtccatgttttatcaacgccgtggcccgtggcttctattcatttaccaaatggtgtaagtttctatgtaaactcgttatctttagtattacaaatgaaatcacaagtagtacaaacgtagaaactcttggtaatcttacgtacgctttgaatgatgaaggatctactttaattttcttgctatttgttcttttttaacaagaaaagaaacagaggaagaaagaaactcacaatgagctcatcaacacgattgtgatttgtcagagtcactttgcctatattgttacaagagatacaaaaaggatacaaactaattatgtcttgttttgcaatgttgtcagctctagtgttgtttatggaaggagaatttcaacacaaacaagaacatatatatatttaaaaaaattgatagactctttaacttgataacagcaaattcgtccttattagtagtatactaatgttttgctattgcttttgctttggccaaatgggccagcagttcaaatgcgacatcaacaaacgggacgtagactaccactaaccactttaccttcttcatcttcgtcttctacaaggagtccccgagaaatatcttcttcttcggaagatgacgaaggcccacaacacattccaccccattgtggaaagtaaattgatgtaacagaaagagcaaacacaaaagtcatcaaacccataagtgaaatgcttctctgttttcgaacatcatcaccggaaaacaacagaaactgcgtcaccaccgcaccaaccgtaccgccgcttcccgtaattcccgccaccactcctaacgatctgtcattataaacaaaaccaaattaaaaccaaaccgaaattattagcaaaaaccggattggtagactttaaactaaccgcgtggagacgaaagggaccacgccaaatacaaggccagaagcagcttgaacgaaaacagagaagacccacatgacgaggattgatccccagagcgagttgactcgtccgagtaacacgcacaacaacccagccaccgattgcacgatccatagcccccacagcctccctctcataccgaatctcttccccagcgcatccgatatcatccctcccgccggtcgcgacgcaatgttcgatatcccgaaactcgccgcgatcgtccccgccgcctccagattcactccaaatctctcgtagaaatatccggcgatcacgttgtccgtcgttagctcgacgccgtacgagtatccgtagagcagcgctaagatccacgctctgtaatttccaagtccgccgattaggatctcgacgaaactggaacgttcgtcttcttcaactactagtacttcttcttcttcaggaattgtgagtttgttctggttcgagttttttctgttaccgtggggagtatcttggccgtagaggagaacgaggacggccgttgtaacctgaaaaatggcgggaaatacgaaggacacgcgccaggcgacggcgcgtggaaggaattcggctatggtggagtatatgagaggcataaggagctgagagataccggcgccgacgttagcccaaccggctgagacaccgttagcgagaccaatgacgttaccggagaacatggaggacatccagtattgattggctacgaaattagcgagcgagaagccgacgaagaaacggacgaggatgaaggacgtcggagaggagacgagtgaggcggagaggattacaggagcggtgagaaaagagagaatcgctgaggaagtacgtggtccgatgagatcacagagtggtcccatagcgaggcgagagaagatggagccagcgaaggaagcgattccggcggcggatacggtggaggcagagaggttgaggtcggaggagatgacggggaccagaggagggatggagaaggtggagaagaagcatgagaagagtgagagccaagctaggtgaaaggctcgtgagtgtggcgaggagagagagaatggtcggaagacggtggctcgaccatcggaatcaaccgggatagtggaatctgaaaacgacggcggtttggtgttgcgttgagatggctccattactctcggagaagaaaactcgctgacgactcttacttacacgaccacccaatcaatgaacattatctttgaatttaaatctttcatgaacaataaaatgactcagaggcaaacttttggcaactttcgagtaatcttaattcaaacccaaatgctcaatcaaaatgtgaaattcaattttagttcctcgtctcttggcttaaattaatttttgacgtcaattgttgaaatgaatttgtaatttagaagaaaatatattcggacaaataatatctatcaagaatgccattgggatgcgtagtttctatctttagctgccgacttgggtttttggtgcttttgtatttttgtaaaaattggacaaaaatgatgaaacttgcgttacgcacctttcagacgtcagttactaagacactaaacaatacaatccactttcggttccacaaaacccccccaataaaagagaaacaaaatggcacatcacaaggccaaagtaaaagactagttacctaaccgagttcattagctttcctcaagttgtgacgccaatgaatctatccatctaccaagatttgctcaccaaaagcagctaacgagcatctcttgattcgatccgtatgataaaaacatttcaagcaaaactctcgtatgatccatatgatcgactccacatgatcccttgggttgaaaaaaccttgtagaaaggaaagagagtttaccactattcttctccctcttcgtcaaccaaagccatcacagggactcctttggtgttaaaacttgtacatttcactcgcaatgtgtctccttttttgaacttatctttatctccctgtactcattcatagtacacaatatcaatacaaagcaagaattaagtatatcgcctcaaaagttaactcaagaaaatgggagaacaagtcaaaggagaatttactgaaacatacctggaatatgtacataccgcggatttcaccacctaaatcaagaaccaatccaagggctcgaacatggtcgaccgtggctgtcatctccgttcctattttcagttttcgggtactaaccgatgcactctcttcagccttgttctctgatagattctccttcatagttgatttcttagcttttgaaaatgatactaggttagaagcagtgctattgtttttgggagaaacggattttagcttcccgtcctgcttcagtatctcaccacattcagctgaagtttcttctggagcaatggattcgagtgcctcctcttccttctgtgtcgcaatcagtttagaggctgtggatttgggtttccggtctggctttgatgtagcagcgcgtctgggtttgtcgttgtcgttcacaggggaagatttctctgcctcattacactccacagcagtacggatgacaactgcaggaactgataatctagatttctgaagtggcgttacgatactgggcatgcttgcaacaatctctccaacactagaattttctatgtagactgttgacgactctttcatcaccggatcttttccagcatcagatgcgggtttgcgtttgggtttgggcaacagtgctttgcgggataatttaatgttaccacggacatcggtttcaatgcacatcgtagtgatgcactggccaatatctaatacatctgaaaccttggagacctgcataaagacaaggtaagtataaaccaaatctcaactagagtaatggcaaagaaaataaagctctcggattgtcgttctaagatttggcagatgaaaacatttaggtttacatgagaaaacaatactcagggggaaacatacggacacagtttgtaactaagaaagcttactggttcatgggatagctcagacatatgtagtagaccttgctgaccaccagggaactcaacaaatgcaccatactcttttatagatgacactgtgcctttgtacacaccaccaacaactagttcacgaccaatgatgaagtcaacctgaggacatgcataaaatcagaattcatggaaaatcattgatcaattaaaagctgaattgactgaaagatacttgttcttgggccttttccatcacatcctgattcttggcaacaatagttaatgttccattatcaatagacaatcttgcacctaaacaaaaaaacttatttatcagatcttcaaagcaaactataagaaagcaagtggatattattcataagtttatgaatttcatcttgaaactactttcttaaaagcacttaaatttttcaattcaaacgagttattcaattccttagtctttaaaggtcacaagaactaagctgttaacaattaaagttgaagtcaagaaatcacctgtttccacttcaatctttcttttgagtacacccataggtccgatcaaggtacgaagtgagtcattggagtacttgagcgttgctgcaagacggacataattttggagtttgagcaggggaaattctattagctaaggttaacgaaaagacaagtgggaaaaaaacctagccgaggagagtaagccccatcctggcctcgtggggaatttatgtttctctccatgtggtcaagaatctgaagacgggcttcacgtgcattttctaaggattcacaaactatatccaacggtattccagctggctttatatccagctgaattgctgtcacaccatctcgtgtgccagcaatcttgaaatccatatctccaagatgatcttccaaaccctgagaagtcattgtatgcagttctataaaatccattttagcaacttaactctactcatggtttagacaacaacagttaaattaactactgcactgccacacatttcagtttcatgattattcacataactaaccatataaaaataaagacaacaaattagaataagagaactcacgagaatatcggttacaatacggtagtcctttatttcaccacttgatggatctacatcggtgataagaccaacagatacacccgcaacatgagctcgcagaggaattccagcatccatcaatgccatactacctgagaagcggaacacctttcattatgaaggtaaaatagaaacatatgatagtttgcactggcttgcaaaaacataatacaatctcgtctgtgagtgacaataaatacctccacaaacgcttgccatcgacgtggatccatctgaggacattacttctgaatttatacgaatggtataaggaaaagcctcttcagggggcaatacagcaagcaatgctttctcagcaagtgttcctacagaaaatgtaaatcacagtcaagcataaagcacaaaagcattcccttagataacaaaaaaacacttcaaagaaagttaagacaaaatagccatccttgttctattattagctagagagaaagatgatatgaacgaccagataaggaaaattgaggattaactttaccagcaatattttgtttgaaaaatgtgaataaggactttacatgcaaatagagaaaggaaaccaaagactttaccatgaccaacttcacgcctgttaaggcctcctcgttttccgacttcatttgtacaatatggaggaaagctgtagtgaagcatgaatctcttcttcggggggccaacaagagaatccaagctttgtgcttctgctggggctccaagtgttacagtacagagcaccttttaacacatacaaaacatcttaaagcaagattctcattaaatgcagtgaacagattaagcttgtctttaacacttcaggccaacaacttttgaagcgacaaaaaatgaaactaagctaggaaagcaaccctcagaagtgatacaaagtacagagtaatgtcatttcttacaatatagaaattcgggttttcttttaaccttctgctacctaataccctgagattattcttttttttgtttggttcaaaaggtttaatttgataggcgttactgggaaaaagtttcaggacgaacctgcgtatctccacgtgagaaaagtgctgatccatgcagcgcaggtaagtaatgcgattcgcagtagatgggcctaacttcatcaacatgtctcccgtcgactcgaaatccatctgatatcatccttgaacggactacctgataatttagttaaagggacaaagtagtaagacatggaagaataggacaaatacaaaagcctataacactttactagtgactgtctatgcaatctctgaaagctcttaagaaccatacatcttaatgtgtctcaacatgaaaaagagcatctcaactatctcagaaacaaagaacgaaccaactatttttacaaacatcgtagagtctgggcctctatatattagacaaaaaaaaagttgatattgctattcaattatgaatatttttaattatctgattcaagcactagtttttctgtcaagtttatcagaacaggatcgcccaaaacaaaagcaaagaggtacaaaatatatttcaaaatattgatttacaaagcttaccttctttctcactgtatcaacagcctttggaaggatgctcaagctttcttgatcaccctcttcttcaaatacctttcttacatcttttccaatgttatctagagcctctccacgttcaaactggagatgtaaaattatcaagctagcagctgagaaacaaattttgcgatggaaacaaagcgagcacgcacctttccatatgaagggtcggtaaagacggattcaatacgcgttgcagccaagtcagccactttttctaaagttttatcagaaagcatggacaatttgtactccttcttttgtttcccagctttttctgccaatctaatttggggatcaaggtacttgacagcctgtgtaaaaaaaaagattcaaaactatttaatattacattatactaggacatccaacaaaggttctcgaacctacctctggatgagctagcctcagagcagctgctaaatctttctctgagatttctcgggattgaacatcaatcatcatagtcttatcccttgtgcaagcgtatatcaaattgagatcacttgagctaagctatacagagttcgaccacaacaaagatacaaaaaatcaaaacagaggctacaatttgtaaatgtagagaatataccaatataccactttttacctcatccatagttggattgacaacaaattgcccacatatccttcctatccggatgactccaatgggccctccccatggaacatctgatagcatgagcgcagctgatgatgcattagctgccagtatatctggatcctgcttcccatctgacgatagaacacttgccattatctgcatgtgacaaaatttacagatgaagataccaaaaaacaaactttcacatagatctatatcccaaagattttttagaaattttcatacctgaacttcatggtaaaaccctgtaggaaacaatggtctgattggtctatcaatgagccggccacataacagctcccgctcctttggtgcaccctctcttcgcatatacgtatttggaatcaatccctgagcgtattgcttctcttgatagtcaacctgacagtagtttccaagaagaatcataaacatcagtttaaacaaatcaccatcaaccattacagataaagcaatttcaatagcagattcctgagagaattctacaaatgtatacagcataaaggtaccaaacatctctagaccatttcttaattcctcacagatcatagattccttaagacaattcattcaaaatcggtaactaaaagggaaatggtggggagattagtaacatacagtgagaggtaagaagtcccgaggcgagtcggtcttagcacaagtaacagtagagagaactttggtctcgtccatgccgagaacaactgaaccattagcaaagcgagcgatttttccagtctcaaacgagaccacgcgggatccgacttcgaattcctccttaaatgattccaaaattttggttcctgcggagaccggcgagtctggaacagacggagcgaaaccaaggcggccggagcagatggtgcgaaaccccagagcacgccatgcgaggaaattaggaagagaagctgaactagctcgattcacaatcgatgacatcacacatacacagagagagtgagagatgcggagaagagagggaatgagaacggaaaagggtttaacgcaccggtgaagtgaggactgagccgacaacgaaaactaaaagaagggttttagcagtcccggtctggttcggtacggttctgctataaataatcgaatttacaaacattaaaccgacgcctatgatctctgttttagattttgattcttggacaaaatttcttcaagtataccgttcattttcaacaattttaacacctacttaacccagcaaaactgatattgcaaatcgccattgatcactttttagtgtatgtataaattagtgttggatacgaaactgaaaacagatattgtcactcaaatttttaaaataaattggaaaaattaagcaaaaacgtttatttccaaccaaaatattcatataaacccgccaatattatttttgttttgtgttgggttatgaattattgcgagcattatttttgtattgttcccaattcccaggaatggtcagacaagaggaagctctttgaactgtgttttgagcttggaggctactgcatcaatgaactcttccgtgttcaaaaacaaatccctactcaccctgcattaaaaatgttttattaaaccatcaagaacgataatagaacagtaacagcattataacttaatccagtatgaatcggtttggcttctatatggttttctattaaaatacacaacttaattagagttttcagcacattcatcagcttggaacaggatcagtttggatttgatttcacattaaagttcaagacagattaagctctttcgtatttcatgcacatgaccagattgtaatagaaaagttgctgctagtgagaaaaggaaagactacttacttgggaccatggattaaaagggcaagatccttggtcattttccctgtctcaacagtgtttacacatgacgactcgagcttcttcacgaaatccattaatttctcgttcttatccagtttcgcccttgagaagcaaaaagggtaaaaaaaatccatcaaaatgaaaatcaagagaaactaggttacaagacacaagaacgttgtcagtgtaaatgcataaagaaatgcagaactcagttaactagtaatgtagaccgtgtgtgaaaggcaagagacctgtgttctaagccgcgtgtccatgcaaatattgaggctatgctgttagtactggtttcttgtcccttttggtgcagtcggaaatgccgagttactgttccatgagccgcttccgactcgagtgttttcccatcagcggacagctgaacaaaacatatcatatcaagactttcatttgcaaagaaaaattgaatattggctttcggttaacgatacaaaccaaaacggaggtcatgaggcctaatgagccaaaccctacatttagaaaagaataaagaaaggaagcattaagtatcttagttgctgtatcgatacaaaaataataattttaagaactatattttttaatttataccttgggcaagaagatcgctttgaacatcaccgtcgtagtttttgcaagcccagacatagccaccttcacttttgactgcgtaagccaccatgtcatcaatcaaccggtgctcgtacctaaaccaacagtattattcacatattacctttaatgaatatgtaaagaaaaaggacgcagaacacaattttttaagaaaaaggaccagattgagtgctcttcaaacttttgcttccaattcgcctcataaacttcttgaaatatgtccttaaatctgtattgttccaccacatattaaagcagctcgcttgctgaaaagtgaaacccagacttcaaatcaccaagaagataaaaacaaacctgccatcatatttcttgagaattgtgttcttggtgctcaagtataatggccatttcttagttaatgccatcgccatagatgactcagcaaaagctctaattgactggcatgtcacaaaaccagcatggttgtcagaaaccaaaaccatgccaaaactaaagccagttactaaaagagacagacctcatctacgttgtacatagcaagtgcgacacctgggcccttgaaatcatatacatctagctccacaggtgcgtttccatcttctgggactaattagacaagagatgtatccacttagaatctgaactatatgattgaagaatcctcattgtctaatgaatatagtttggtatgatcttaccaaaaaccattttcaactttcctggccctttaattactgtatcagtggcacgatactggtcaccaaaggcatgtctaccaatgcatataggcttttcccaacctataaagacaaaagatttgagttctcatttggtatctcaaaacagatcctaacacagattcataacaaggcaaataaatttaccaggaacaagccgggggatattgctgcacataataggttcacggaatacggttcctagaaaatatagaacactgtgtaagaaatgtgtagatactagattgtaaaagaacctgctaacaggataaaataaaaagtcgcaagcaatttaaccaagatattcctattcagcaaacatgcattgttttttgacaatacagagacaaaccatctagaatgtttctgatcgtcccattaggactcctccacattgatttcagtccaaactccttcactctaccctcatctgccaaaaataacatacagaagatgtaaaaatgcttcctctgatcggaacaagcagcatatgtgttgcgatttgcgaaggacatcacataccaggagttatagtggcacatttgatagcaacattgtacctgcaaacataaaagttttaagcgcgaaatcagcttatttcacatagaaattaaaatgttttctgttactaaaagaatctaaaccatagaaaatgcaaagaatcaatagcacttacttaagagctgcttctgcactttcaactgtaaccttgtcatcagtagcatcgcgattcagaatccccaagtcgaagtacttaatgtccaaatccagataaggaagaataagctgcaaagacaagaaatcagacatgtgagctctgtcaaaaaaaaatgaaccaactgttgcagacttggtgataaattacatccttactttctcctttatcatactccatatcaccctcgtcatttcatcgcctgaatttccacaaaatataaacaaattagaaacattctcaaagataccaaattcagtaagaacataaacaaatgacttataccaatccaaccaattatctggaaactacgatcaaatgtaagtaaggaacactgattgcgcaaagaatctcaccatccatttcaacgataggattctgaacctgaattctatcagaaccgcctgaagaagcaaaacatcgaacagctgatgcgcgatgaaactgaacgggaaaagtcacgcgattcctcgaagcgccactagagaatataccggaactaagaaatctcgaagaaacgaacgaagacgataaaccagcagaggttgaagaagataacatggcggtgaggctggcacggtacgtgaaaacgccgtgcgtgagcttattcagcatccgagactccgacctcaacccaaactctcaacttcgatcactgaatcagtgaatctgcagctttcggtcggcaagtttattgctaaagtgtgctctgagctctctaataatcgacgattccggcgaaaaggcaaggtaaacaagaaggaaaagagagccgtatagattatttcagtaggcccaacataaggcccagtaaatttttctgtctatataaacccaaaccggatttgccggttcgaaggtaccaaatctgtaatatggtccggttggtctcaatgtccgatttgatttgaaaaaaggaaagcgaaaaccctacttagaggttttatttctttgtctggtcagatttattgttcttccttctcacaaaacattattacccaaactccattatcagctcaagttcttagctttcttcgtgattattcctctgtgagtatttctgtcgtttttcgctattgttaaactgtttctttcagctttttatcttatagaagctggtaattgtgtttggttccagttttttacccgcttgtattaaaaaattgtgtctcttcgttgaagttaggacttttggatccgtgaatgggatttttctagcttttttcttaaattttaacttaatcaaactttaaattgtttttcttctgtgcatctaagctaattcattacaatgattttgaatctcaatgtgtttgattggctgtgcaatattgcgtagaatgcgtagctttggattgatagctagattgggaatatatatcgtgatttgtgagaattcattgttttctgagttaaaaagtgtgttgtttagtaattaacaatgagacttggaattgcagagcagaagctggaactcaatctacaagtgatttcataatctcaagatgttaccaactgagtcaaagaaagccttttcattcaaaaggtgtattgaagatggggacttagttattgtttacgaaagacatgatgtgatgaaaccagttaaagtaagtaaagacggtgtgcttcagaaccgttttggtgtgtataagcactcggattggattgggaaaccattagggacgaaagtattcagcaacaagggtaaatttgtgtacctgttggctcctactcctgaactatggacattggttttaagccacaggactcaaattctttacattgcggatattagctttgtggttatgtatctagaagtcgtgcctggctgtgttgttcttgagtcaggcacaggtagtggttcgctttcgacctcacttgctcgagctgtggctccaactggacacgtttattcatttgatttccatgagcagcgagctgtctctgcaaggtagaaactttcgttttctttagctatctcgttgtgcttttcttttgaagctatagtatttattcatcctttactttactttgcaacagggaagattttgagaagacgggcataagtagtttagtaaccgtagaggttagagacattcaaggagagggttttcctgagaaactgtcaggtttggctgattctgtgtttctagaccttccacagccttggcttgcggttccttctgcagcaaagatgttaaagcaggatggagttctatgctctttctcaccttgcatcgagcaagtacaacggacttgtgaagtcctcagatcagatttcattggtaagtttattctgatttacaacatctctttctactttcttctccaactcaaactaaaagagctctagatctacacattatccgaatgctcttgccttggaaggatcctaaaaatcaaagtactaaagtagtgaatttgggactgaacctctcctcgattttcaaatcctagtggctagtactaaaatcatgttgtatagactgaagttctgttctttagtctacaattttttccaatatgtatcatcgactttctatggtcacacatctttggattaataagtcgaaaggattgctttaagtagataagtatctttagagaaatagtttgacattctttggccttggaaagtcaggggaatcaaaaccaactgtcataggcatataagtccttatttccttgagagtttcattctttcttataccggtttttgctcatgatgagtttgttttttgcagagataagaacgtttgaggtgcttctcagaacatatgaagtgaaggaagtgaaaatggataccagtagcatggttggtgagagccacgaggaggacaatgaaggaatgaggccttgcaagagaaagcaccgttcaaacgaaaacgacactgtttcacaggacaactcttctaatgcttcttcagtcgtcatggctcggccttgtagtgaagcaagaggtcacaccggttacttaacgtttgcaagactccaatgtctagcttagtccaaattctccaactacattatgatattcatgtattagatattttcatgatttgtcttattacgctttctttttgttaaaaaaataattgctgtgaatttgtttctagaatacaaaattcgaaatttggtaatgacaaaaccaaaatccaaaattttgaaatatgataaatagtagtttctagagataaattgttctacaagtaatatataaatagaaacgcgtttccttttctcgatgggagaaggagacatgtaatgcactctataaatatcgaaaacgtctgtttaattttctttctcttacaattgtctattcacaaaccctagagatccattcttcgaaagcctgagatcaaaatccaaattcttttttcctcttcttataattttccctttatccatcaagaaattatgtgtcccttgagatttgtattagtgttcttctcggcggtactcgcaggatatatcgcgtggaggacggtgaattctacgccggaactattctcagacgagttattacaagccgaagccaaggaaaaacaaggactcgatttcaagagaaagatggataatgggttatggacgttcgttgatatggctagcggaagatacctttggagaaatctcaaggagatgcgtcagagaagtcaatgaccgatataaacaaagtttcgcctgtttggcttctgatatgtagaaagttgagaacaagaaaaattgtttcttcgttttcgtaaatcttgtccgaattcatctgaatttggtagtttcattcattctttaatttggtattcatgtacttgaatttcatcgttcgtataaataaagaaaccttattcttcccgccaactctaatatattaatctgaaggtaaacgaacgaactagatgatagagatcatatcaaacccacaaatttaaccataaccaaccttaatacataattacatactaaagagtaaagagttaacaaatcttgtaaaacaagttgataaagccttttacaaagcttaagtcttaagatgtgaatagcttagcttgtggcttaggccattcacatcggtaatgatatgagtagattggaatttctttatacataattttgtttttctaaagtaaaaacatatagaggaaattatggcctactttcagaaggttttggctaaaaaaaagaaaccaaacttatatagagagatagagatttaggacaacaaaaagcaccatataatataagttttcattgttcatatagtcctaaatcctaattagttatgcttttgtttctgcaattctgcttggatatgtttgtataactttcttgtaatttggatgaccaactattgtatctgatttcatatcaatgaatgaatcagatgttaaaaaaaaaaaacttgattcaatctgtatagagtgatttttaagggactacaataacatgggcccaaataaatgtttaagataagctaagagaagattaagcccaataaggaattgagagggccctcgatattatattaaaagaaaagaaatgtagctggaaacgaaccggcacggatttcactccttacttttctccactccagtctctctcttttctgcgtttcctcttctctctgtggcgtagagttatagagaggaatttaggtcttcttctttggtttttcctttgctcttcattctcatactctctcgacagtgaaatcaggttcttgttttttttcgtagacctacatttttcgaatttcgtttttttcttcgtgccgaaatgtcgatatctctctttgtctttgccgtaccattttctgtagttggggattttagctgcattttttattttccttaggttctgggttatatttctctgtttgttagtgtcttctcttgttgtctgaagagtaacgaggtcgaatctgttcttctgcatgttagggtttttgttggcgttgtgtctcaacctgtggtgtaatgagataatcagagacccttttgtgaaaaagtttcgcttttgtcttctttccgtctatatgtttggtgtgtgtttctcgacttaaaaaatccatgctttctggtaaagtgatggtctttgtcattgggttgctttgcttctgttgatagtttcttctggtgttgttttgtttttgttttctgatagtgatgtgaattgcaaagttctgttttttttccctgttgatcgtttaaattttagctattattggtttcgacatgttgttcttccaggaatttggtatggctgctactgcttctgcaattcgttacgctcctgaggatccgaatctccctaagccatggaaaggtcttgtggatagtagaactgggtacctctacttttggaatccagaaaccaatgttactcagtacgagagaccggcttcttccgctcctcccaagcttgctgctattcccgtaagctcttcggttcagactaatcagcaatcttcttctggatttaactctggcaaggaagatgataagtatggtaggggcagtgatgggcctaagtctgactctggatcaaggtttaatgaggtactaacttatggctgttaatggctgatttctatcctttgtgctctccaaacgtcataatttttcatttcaatttgtttgccacactggatttatccctcttggtcatactgcatcttcaatttcgatttcatttggaacaggctggaagaactggacctatatcttctaatgatgctgctagtggactagggaatgcttcatctggtggctcatctgccagagggcctccttcttcagccgcaggaaatgaattgtccccagaggcctattgccgcaaacatgaaattactgtcagtgtaagtatctatgagacataaatctctctctgggttgcatttcttcatttctcctccgtggtagcacacagaattagttgcatccatcttcttttcatgtactctgaaagtttcatttgcggctctacctatgtggtgacaggctaataatgttaacgtattatttaagtttgatttcctttgagtactaaccattaactatacaagtttatttatcctactgaactctgaaattcatttttcaatttcgtagggaggccaagtaccaccacctctaatgtcttttgaagccactggtcttcccaatgagcttctgcgggaggtatgaaatcatcaggctcctataccatcactctttttttttgttgggggagtaaacatgtcttttttcacattgctctgatatttagctagactattttaatttattttttatctgttggattcagtgatttatgagggagctattttgtctaatgtcacataattattatgtctgcaagctttagctgttattgttgggaggtagtgagactttatatattatatatatttgtatagtcctctgctagtgagctggactattttgagtattttttttttgttgaatttagtgatttatggagatttatcatatatgccagccatacttgtcttttgagtgttttattaattgagattttgcaaatactggagggtttgcgtttagtagtgtcccaattttatgccatatgcgctctcttttgtcccaggtgcgatatttgctcttggaggagctaatgtcgtacgctgtgccacttctttggggttcttgcaaattatttggagtgccctttttggtggaccaaattttttggtaagggattgcaaattcacccaaagcttgtggcagagcctgttgatgttttattttcccatttggtccagacagaagtagaggtgtcctcctgctgcaggtttcaacagctatcttgtgttgcctgcaaacgggaggatggtgcttcttctggctccataagcacagtagatttttggtgtttctctgctgaaaaggatatcctggtttgttgttttgccaggtatacagtgcaggattctcagctccatctccaattcaagctcagtcatggccaattgcgatgcaaaacagagacatagtagccattgctaaaacaggctcgggaaaaactttgggttacttgattcctggtttcatgcatctccaacggatccacaatgattcacgaatgggcccaacgatcttggtcttgtcccctactagggagttggccacacaaatccaagttgaagctctgaaatttggcaagtcatctaaaatttcgtgtgcggtaagtgaaaatacttgaatacataagtactgaacatgctacttgagaagtgtcttattgagtgtttttgtcaatgtatatttgtagtgtttgtatggtggagcacccaagggtcctcagctgaaggaaatagaaagaggtgtagatattgttgttgcaactcccgggcgactgaatgatatccttgaaatgaagagaatcagtctgcatcaagtatcttaccttgtgctggacgaggcagatagaatgctggacatggggttcgaacctcagatcagaaaaattgtgaatgaggttcccactaagcgtcaaaccctcatgtacactgcaacatggccaaaggaggtgaggaaaatcgcagctgatcttcttgttaaccctgcccaggtcaatattggtaatgttgatgagcttgtggcgaacaagtccattactcaggtctgggtttgatttcgttttgttactcattttagtttgattatcttgacataataacaggaatggatctgatagcttctttaattatttatatgatacagactattgaagtcttagcaccgatggagaaacatagtaggttagagcagatattgcgctctcaggaaccgggttccaagattataattttctgttcaaccaaaaggatgtgtgatcaactggcaaggaacctgacccgtacgtttggagctgctgctatacatggagacaagtcgcaggctgagagagacgacgtactgaatcaatttagaagtggtaggactcctgttcttgttgcaactgatgtagctgctcgtggacttgacgttaaggacataaggtatgaatatgattccagtttcaaattcaaccatcagaattatagaagcatatgatccgaatgtagaaatttgattcacagggtggtggtcaactatgattttccaaatggagtagaggattatgtccatagaattggaagaactggaagagctggagcaaccggtctagcttacaccttctttggagaccaagatgcaaaacatgcttcagatctgatcaagatcttggaaggagcaaaccagaaagttcctccacaggtccgcgaaatggctacacgtggtggtggtggaatgaacaaatttcgtcgctggggtacaccttccagtggtggtggtggcggccgtggtggctatggtgattctggttatggtggtcgtggtgagtctggctatggtagtcgtggtgattctggttatggtggtcgtggtgattctggtggtagaggaagctgggctccttcacgtgacaggtaaattaaagataaacgactcagctagatctcttgattctttttctcattattaactttaaatcggtttttggtggttgaagcagtggcagctcaggatggggaagagagagaagccgtagtcctgagagattcagaggaggtccaccgtccacttcatctccgcctcgcagctttcatgaggcgatgatgatgaaaaatagataagtcattggaatctaaaccagattggggcaatatacatatagaagagcctctttctcttggggtaaattattcattttgtggtgtgtggaccgaagctgctagtactttttaaaatcatacacacctgaaggatactctaatgttttggtctacgagaaacctttttctgtttatattatggaaaataaagactcgtttatgggttctttctgtgttggtgtttaagtagtggatgtttctcagctgataaatgttttagacctctaaataggaatgactttttgatattttgaagtaaacaagtttgtttcgttattaagaactgcaatatcagtatatcaaaaaaaaagtactgcagtttcagcttacaagtcactgactactcttaattgactccttaaccaaagtgtctatacaaataccccaaacatatttctccattaacccttcgcatgaaggaaggatcaaagattatatgatgacacatttgtctggttgaatacattactgaacatcagtgttaaggcagggaagagaaaagtgcaaatgcagttgcagatatattgtcgcaaaaagcaaaagagagttaggttgacttatattattcaaaaatgtaccttcatggccatattacataacagatatagaaaaataaagttcaactagatttcatggagtcatatctacttcaatctacttcaggtaatgtgaatgatcaagatcctctcatcctcgcacgtaccacctctagaatacggcaatactcaaagaacaacgaagattgatcaccttcaagaccaactcggcttaccctattaccgcctgccagattgttacaaggacttcctccaattacaagatcaaatccaccatatttctccatcaacccttcgattgtgtcattagtcaagtgttggatgtctgaaaactcgatcaattctccagtctggttagtttgctcccaaaagtccttcaaaatatttctgttgacttttgaaatctcaacagacacaacaagcttcattttgatttggagacgatgaagtgccacttccccaccaccaatacccgtgaaaagagagagaacattgattccatgtgggaaaatgggcttcaggacagacagatgatacgccacagtatcaacctaaaacaagttcaaccaaccattaaaccaaggtattcaagccacccaccaatgaatcaaatacgcaaaagactttaactacaaagagtattattacgcatatgatatgtaaaattacctgaaacgaatttcctaaggacttgaagcgctcagttctactcatgcctccaccacgagtatgattttttggaaatcccagaatactctccatctcatctggctcgagtggggcagctttgtttttacccacccaaaccaaattccattttttgcactggtcaatcacatatctttgtacatgcttaggcggttctggttcttcattgtaaggctcaagggctacacgaatcctgttagtcaactgagcactacctgtacaagtcaaaatgcaattaagcttggtccttttatcccattctggccaccatctcttactcaaaggaaatgcatcatggatggtgtattttggtggaggctgaatctgaaatctgttgttgatggggagattgtggatgtagcctctcttcctcgctgcaacacagaaatattttgagtccacaaactcaggtgggatctcgaacaagtgcctggaaatagtctcccaaacgcctttaggtgtgagggcgacattctcatagtagaaaaaaggtggccctcgggctaactctggaagcgatctatgtgtaatgagtccgggctcgtttggaaccccaaatcctatcattggatttggtagacgaatcggctcgtcatcaacagatgatcttggctctccttttgactcaaaccgccttttcttaatattatgtctaggctgcatacaccaaatttcccaaaataatcagttcccaaaggaattaacttacaaaagatagattataaaaaaggttttaacagtaccttttgttcttcatgttcagtgtaaaactcactaaattccctagccatttgagcagcacaaaggaagtctgtgagctctgcaatatccacattttctcctgaaattacaatcatatgagtctggataaggcagcaacatacttagagtaagtaagagatatatattaacatctgacaactgtatcatttagtgaaatacaatcacaatgctcagcaaacacatttcaagcctaaatcacagaaccagaggctaaagccacaatttgactatcacattacactaaaactaagcaatttggcttatgccacttcctctagaagaaacctgaataaaaaggaactagtgaacatacaattttatcaagtactgacaacttttatcattttgtgaaatacgatcacattctctacaaacatatctaaggcgtacatcacagaaccagaagctaagacagaactaatgacaactttcgattagtgaaatacaatcaaaatgctcagcaaacacatctaaggcctacaccactaaatcagaggctaaaccaagcaatttatacgacgttgtctagaagaaacctgaacaaaacggaactaaaatttaatgacaatggcaatcgtttaaaataaagttaccacatctctcgacagctaaagaagcttcaagctctgagaaacccatcttcaccaaagaccgtattttgctgccattttcatttgagtttggatctttctgtcatgatttaaaatagattaagaacgcataaaattagatacatatacaaaatagcagtgagatacatttacaattcaaacctgggatgcttaaatatgttatcaccaacatgaaagagttatacctcatcatctgagtttaacatatcggtgtaattggtatcatcatcacttgatgaccagtcaatgccatcttcttcctctactgctgctggcagtttcttagcctcctacaaaccatcaacgaactttaagtactatttttttaatgtcaagagacagtatattttcgtaacatcgcttactggacaagagagcaatgcatttgcaattgcttccatattgtcttctcctgcgatttataaagcaaatatcagcaaagtgataaagtgttacttcttacttaaggaggagagaaatctgtaagtaccatgttcttgaatggctttgacaactttttcttcatcaaatcccatagcaaggaaatgatcaatagccttggacttggaagaaccagcttcacagtcgctcttcacaaataaacaaaggagaggatatgaatactgtgatgacagaagcacatgtaaatgacaagcaacccaagagatcaaagtattagaaactcactgagtatttggagatagtatcaattataaccgaagtttctacatttggtcctgtataattattggtatcaagttacggatcatatatatccagaaaggaatacaaacaagagaaaaaagcctcaccagtttccttgatcgctctagaaatcatctcaacaggaaatcccatgtcaaacaatgtagcaaaaacctcgtctgagaagcccatctgaactaaatcagttgtctcagtaggagagctcaaagaactagttgtctgaaacaaaacaaaaattcacataagcaatgattctgcttaggcataaacttatgactgttggattggatcacttaccacggctacaccagctagattttcgaccctacactgcattgcatgtattggagatgaccgtggagaagattgaaagttatcaatctccaaaaaatcatcatcatcgttattccaaatcaccatgagtaatacccagagaatttttagtttgagctacagattaagcagaagcgctcccgccgccggcaaagatactgtcgccgttggtgagagagcttgtatcgtcgtcagtttactggaggaggaaaccgtgaaacaaaaagtcggatgattctaaaaaagaaaaaaacaaattcagagtattgcaatttagtccctattctttgtactacttcaataattaaactacaatgtttttaattaactaaatcaataaacatgaataaatgacacgttacgtgacacttgtggtgcttagaggcaatttgcgaaactaatttttatagtcaatgataattcatgtttagaggatattaccaattaccgtatttcgtttgaggaagtgaaattggttaaacttaaacaagaaactctcgtaaatgacacttttacacagaacataggcttttttaaaaataagtttggctaagctttgaagcatgagctttggatgcatgcaatgacacgtgacgagcgagaagtttattttataatttagtatccaacataactgtagcgaccggcgagtcaaagaccgtcacatacattacactaatcattgtatgtaataaagtacaaaggttgtgataagacaataaacaacaaagatacatgaaagatgaaagctaatgataatcctgagaagctatctccattacttagaaacgataagcatattatatgcatgtgtacatacacacacacacacatatatatagagagagaggaagagatttagagagcgaggaaggaacattgttttcgggcgtggtcaggtataagcttggacaacaactctaaacttgctccttttagctctacatatttaacaagaagcacacacttttagtctttgttaaaacggagcattgggaaacaaacaaaagcatatttggaggagacagaccttgaggtttaaagttgaagagaggaggcaaggcacgaccattaggaagacgtgtattgggatcacgtagctcatcgaagaacgggtgaactatcgcctccatctacaataacaagtaagtttgaatcaaccaaccagatatatcaaacataatgttattatggtaatcacttcattgacttacagcggttgatctgaggtttggagaatactggagaagtcttgagacaaggtctacagcttctggaggtgtacgcttatggaatatcttaagaaccaacaacagatttttcaatcgtaagaatatatggagatcaatgttaaggaaaaactgatgatgtgtttgcttactttgtgccaaggatgagcctttatttgcgggaatttgaattctgtgtagtttggattcatgcatttgatttcctcccgtgttggtgttccaagaacctgtaacacacacagtaaacaaaatgatggcaatcaatagcaggaaatggagcctcttcattccatataatcaatgatccactctatgttcaatatagcaatggctaggattatgtgtgtttgtttaaccaaattgaagtacctttattatctcaactagctggtcaactccactctcacctggaaatagaggctaaccaaaagttggacaagccaaagattggtaatatataactttagacatcattcggtaaatcaaatcatttgtaaaagataaatggaggaaagtttggacagtcatattacctgtcccagaagcaattcagcaagaacacagcctgcagaccatatgtcaattgttgttgtatattctgtagctccaaatataagttcaggtgctcgatagtaacgggagcagatgtatgagatgtttggctcgcctttaacctgttacagaggggcaaagctaaaatagttaggactagttaacattgcatagcaccataaaaagtgcaaacttttcaatatgaaaacaaatcaacatgtctctttacaaatgctataccagaacttttgcgctaccaaaatcgcatagtttgacctgatgcgtatgaggattaacctacgagaagcacaagattgatcaagcagaagcatgtagaccaataaaatgttatgaataaaatcaactaaggatacgaaccagaagattctgtggttttatgtctctgtggcagactcctactccaccatgaatataagccaaagctctgcaaatctgcacccacaacagaaggaagaaatcatggaaacaatgttgattaactcattgtatttcaaaagatgagaacagatgttctggtgggctgaataataactacctgataagtatagagtttaacatatataatgggcatcctctggtttgcccgactatagtgctttgagacgcgatagacagtctcaggaacgtattcaaggaccagattgagatagagctcatctttttcagtcgttgagaaaaaacaatgcttgagggatacaacattagggtgatcaagaagacgcattgtctgcagctcccgattcttgtatctcttgtcttgcaaaactttcttgattgcaacagtttcccccgtttctaaacacttggcctgcatatatacaagtaacaaaattatctacattgagtcaatgcaccggctacttagtaaaatcaattattcagggtagttaatcgaaacatcacctgaaaaacgattccaaaagaaccttgtccaacgatgcgctctgccatataacttatggtctgaaaggacaaaaagaaagagctataagagactttatcacacgttacacatcacagaaaccacaagttgtgcgagatatggtgtgccactcatgtatgcgaatgatctttctatcaacttcctattaacatagaaataatggaaattcctcaaaaacaaaaatgttaaacaagctaacctgtttaggctgaccatttttaccaccaatagttgtaacaataatgtgacctgtttcagttccattcccatcaaccacagctgcttccatttcctacaagaaaccaccaaacagcaagaagaaaaaacacattattaacaacataaagtccaaattaaataagagactaaatctcaatattgaatctgagttcttcaaccttatcatcttttatcttcatctcattaatcccttcaggtaatttttcagcgcatatagaagcattgctttgttttgtagccatagaagaagctggtaatgttcccacagaagccatatgtattcaagatctttaattcaatttgtcaatctgttaagtccaaacacacaaacaaaacataggtttttgttaaatcactttcacacaaccaaattggaacaaaaattactttagcacagagacagtgaataagatctaataagtaagagctcccaaaagcctagctctacatttaacaatagatttatccaaagttaaccacaacctcaaacctccctaatctgtaaaactagatgttttgttccataatctctcagcgtcaagctaaacaagttaaacaaacacaaaaagtaaatcgccgactacgtcgtggcgccgtcatacctgaaaagtcaccgccgcaatttcactccaccatcttgtctacgcagcaactagagaagccctagaataaaacacttccttgccgaaaatggcaaatctctctcttcttcgtgatgtgttttgtctcggtgtttggttttttcttctgatggcagagagagagagagagcggaccccaataggtagtttcaaagtttcagttgatagttagttttgacgtccgcgctctcaaggaagaagagtatccgcacacgtggcgtgttttggttggaattactaagactcacgtcatttgtgttgactgcttttaatggttttgaatatctttcctgcggttaagtgtattgtaagcttctctaattgacggttagatttaggtcatgaaaagccagaaactaatcggacggctactagttagaggagtatgaaacgttaagcgaagcgtggcgtacacagattctcgttcttcactttttcggtatttgttaaattgtgtaatgttgttttgtcagaaaaggaaatctcaattacgaaatcgccaagtcatcacataaagcgacaagatttagttcgctattcgatgtcgtgtctgattcgaccgttggtgtggtcttacacgaggatgggccttaaatgaatatgggcttgctatatactttctcttaaatgataaggcctgtaactagcactttttgaatttaaatttttttgtccgagtaataaataattgccaattgggattttagataggaatcaccaattgtaaataaatggttacgacaaaagagtgaatttcgtacacgattgacgttattcacataattgcgtgcaatacaagtatacaacacgatgcatgtaaaacattaatatagaagttgaccaaaaacaaatagtcactattaaaatgattcaatcatacacgcctattacaatgctctagattatagacgaacgtagtaaacgttacatcaaatcacgggttaagaatacacaatgatgaaattttcaaattttacgtcttatgcgagttgttggacttggacatacacgaattctacggagtactagaaatattgttcatgtgacttgcgagttatgaccacttcaccgatttgccatccaacatttttcccccctgtataatatataaaatgattaaaccatcaaaatattgcaaaattagtctcacgttgcaacgttaactatctcatttaaaccaaaaaaaagtaccattacctatcttgtacttattatattcaagatattgtgagaaagaggacaagaaatcagttacttgaaaacaaaatctatatatcaaactttcaactgccaaaagcaatagaaaaattaataaaatagtaacaagattagaagaacttctacaatgagtgattatgttattccaattttggtaagcaataggcttctcaagatcatgaaatcaaatagaataattcaacaaagtttgtcaacacgcatgggctgcatacacccatacacgtagcaacgtgcaaatcttattatagcagcctatatatccttttacctggggactcatgcacgtgtattcagatcacgagtttaatttcatacactggaccttactaatatgcttataattaaccagaaatcctcagatgttggtttaagctctctataacaataaacagaaaacaatatcgagcatcttattgtcttgcaattaatggatctttgcaaatatgagttgacaacaaaggattacttgattttaaaagattcagtgacaccatcgatttaacataaattacgttgcttgatttcaggaactaaacataaataagattatctgatgatgaggtttacgtgacatctgtatggcaacttttcttgactctttcgccatttctattgatgcctgatacatggattttggttttcattgaaccgaatagcttaccaagaccggctaagtatctgaccggacctatgctctgttctaaacgaaagtaatcagttatttctagcgcctaaaaaactgtacacaaaccttcaaaatcagtaatacatagccattgcatgaaaattagaactaatgctagagaacacactaagatattagtagcgaccaaaacaatttctaagtaacacgcctattcaacaacaaatcaaagccaaatcgtaagtaaagatgttgatgtcaatttaataaaatatagcaaatgagtagaaacatgcttgatttgaaaaggaagagagttccaaggctttttgtcctcatctaactgtttaactgtatcatagattcattctcatatgcgtaacagtgttttttctccacttataaatatgaccctcgctttaccattttatatcatctcataattaaacaaattctaccctagaaacaaatcgtttacaatattaaagatgtgtagactaacattgaaatgtctttccctgaactttctcctcttaatctccttattctcttcgagattcgggacttgtgacgctaggtacagtgtatactggaaaggaaaccgaaggtctatcgccgaagggggaagttccggaacaatcaatgtgcttgaccatggcgcaaaaggtgacgggacaagtgatgacacaaaggtaagtgagcatttctattgtttagctgcgtttctatccgtctcatcgatatataatggaaccgtttgtatcgcaggcttttgaagatgcttggcaggtagcttgtaaggtggcagcgtcaacattattagttccatctggttctacgttccttgttggacctgtttccttcctgggaaaagaatgtaaagagaaaatcgtctttcaggtaatttactcaagaacaaaaaaatgttaatcaagcatttctagttatataatcgtgactgatgtatttggatactgtgtagttagaaggaaagatcatagctccaacgagtgctagtgcatggggatcaggtctcttgcaatggatagaattcaaagcacttcaaggaatcactataaaaggaaaagggatcatcgatggacgaggatcagtatggtggaacgacatggtaaacagttaattcaattttcttggctaaacaaaattgtgaaagcttgcaatgacatctgctaacgttctttttcaactgtgacagatgggtacaaaaatgccaaggaccaaaccaacagtaagttttacctgagtaaattacatggatattgccaaattaaaaccaacatttattttggattcaccatggttggtatgtaggctttgaggttctacgggagtaacggtgttacggtcagtggaataaccatacagaacagccctcaaacccacctcaagtttgataactgcataagcatccaagtttctgatttcacaacttcatcccctggagattccccaaacacagatggaatccacctgcaaaactctcaagatgccgttatatatcgcagcacgctggcttgtggtaaccacagactctacttattgaagctatgatgaaacttaccacgatgaagaaataacaattcctttcattctacaggagatgactgtatatcaattcaaacgggatgctcgaatatcaacatacacgatgtagactgtggccctggccatggaattagcattggaggactgggaaaggacaatacaaaggcgtgtgtttcaaacatcactgtccgtgatgtcacgatgcatgaaactacgaatggtgttcgaataaagtcctggcaggtaaattctgttatttgcataacagaatagaggtaaagacagctgaaaaaaagcatgcgacaacaattcaaagatgctgacaactttctgttatgtttaatgatagggaggatcagggtctgtaaaacaagttatgttttcaaatattcaagtcagcaacgtagccaatccaataataatagatcaatattactgcgatggtggcggatgccacaatgaaacttcagcagtcgctgtatcaaacataaactacataaacataaaaggtacctacaccaaagaacctgtacgctttgcctgcagtgatagcttgccatgcacaggaatctcactgtcgaccatcgagcttaagccagccacaggaaaagcaagttcacttgatcctttctgctggaaagcacacggtgaactgaagacaaaaactcttccaccaatacaatgtttgaaaacagaaaagtcaccggaagctgcaagtcggtctaataatgatgcttgctgatattagagtaagaaattatgtagaaatgttaagataggccacacattatacgaataaagaagggtttgattcccttcctttgtcttatactagtttttataaatcatttgcaaacacaatgtaatatatggcatgcaatgtattgcattctgttatagacaattggaagttattgagttagtcccaacccatagcctaaggaaggatttcatctgtgaagcaacaatctaacaattatgactatttggaccagttatgatagaacacatcacaagtaatatacttcttcgaagaaaagtaatgtcatctgagggatgcaaagaaagtatataaaatgagagctaaacaatatatcaaaagtctaattaccaacacatgtaaacaactaacgcattttactttgtaacaacggataaaccacgacatggttcaacttagtcggcaagaacattcttaacgcagttccaaagctcaagctaacagcacaagacagacaaactgaagaaatatattactcagaccaaaataagattctgaaatatatgatctgtgtctcaaccgtacatcctatttgggagatttgcatcacataatgtgatgtgctcctctaaatttaaaaagcaaacgtgtctcttgtcattgtctgcttcctataccatagtaaattcctgcagtggaaattaagtagaatttttcaggaaaaaaacccaagagaacaaagaataaaacctcaactcagaaaaaacagttgtactcatatcctacacgtagatgaaaggaatttgagcgagaatgtctcatcaacgtttgccaaaaccaactcctgctttccttttttgtcgtgcttctactctttcagggcttggcaatccagttttttcttcgtacttcttttctagggcctacagtacaaaacttgtcaggaatattatagaattacgatgataacaaacattttaagacaatagactactgaatgaaaagatgttcaccaaagtcacgagtcactactaacatacaaatggtaattttatccacgaaatttaactagtggttattgtagctttagactctgccctgctacagttttactcacctctagctcttcacgaatgctatcaagaacttgatccgtcattctgtcaaagaagagaactccctgtaatttgaagaatgttccatcagaccgaaatgaaagcttgaaagtgatactcacatacagtaacacaaaatacctccatgaaaacaagtaaaagtgaacaaaagtactaaagaagataaggcccgtgagtaaatgatgacacttttcaatgtcgaaacatcaaaatataagtgactgcagccattcaactgtacatagatgtactttctgtgttgtcattgctatatttaatcaagcaaagttatcaaaataaaagtggagaacaaacctccagatggtcgtattcgtgctgaaagattcgtgcaggtaaacgtgatagactgattgaaaatctttcaccagtaatatcccttgcatcaatcttgacagattgtggtcgctgaaagcaaaaccaaccacataagaaccggtttccaagaaacaatgagcaataataaggtttaagtaattcagtcaagaaagggtggacatacaacaacttcagcatagatccccgggaaggagaggcatccttcatcaaacggtactaatttatcggaatatttcttgattttcggatttacaaggacaatttcttttccttctccaggctctccagctggattaaacaccatgagttgaacattgagacctacttgtggtgctgagagcccaatgccatccgttctgtccaatagccatatgtaatcacagtatcactctgttattaagtactaagttacttacattataaggaggacttacttgtacataacatcaaacatagcatcaaccaagttctttaaattctcgtcaaaaatatcaatcctcttgttcttagcccgtagtataggatccggatactcaacaatcttcaaaggcgtctcaaattgaacatcagtagcttcaacattatcacaaaattacaatcatacataaacagtacatgctcatagagtaatcaataatagataagcaagtctgttacctgaagctactttatcgtctttacgcgagacgcgctttacttctgcgcggaccgaagatgtcagaggactggtccggttcacagtagagcagaacgtgaccgtggatttgagccgaccataaccggcagagagagtagtagctcggcgagataaaaccggtaggagtatgcgagagagtggtggagcttggaggaagcagttacagacggccatggctagagaggaagagtaatttcagacgaagcggaaaaactgaattttgtgtggagagtaagtaaaagattgagtagaccattttgtaattctgcttttgtttaaggtgcaattccgaaatatttatattttataaggacgatttttaaaaccaatattctattattagagcttttgtgaggagagacattttctctttcgaaactcgcggcttgctctacaacaggtccttctttggagcttcttcgaaaggtaaacaaactctcacaccattcatcgattcaagttctgtatcatcgtttctcaaaatctctggtatattgattttctcggtctttgatctccatctttcttaagagtatcaagtgattgatcgattgatttatctggtttatacgttcttcttctttttgttcatggtctaaaggtgttattcgtcacttggctttgttcaaggatctcattatctatattttttttaatctatacgaactttgttgttaaggttttttggaatgttaacgtgatcgtgtttatcaataaagatttagtgtttcgtgtttcttttgttggtcttcagttatacagagaatttctttagagtattgtggtttgctttggatgtaggtgctagctaaaggaaaaaaatggggcttaatttcacaaagttgttcagccggctttttgccaagaaagaaatgaggattctgatggtaggtcttgatgctgctggtaagaccactatcttgtataagctgaagcttggcgaaatcgtcactaccatcccgaccatcggtaaggtttaaggattccttaaatcacagtgtctgtcgatgtgtacacttagattaatattttatgtgtttcttacctgtgtgtaatcctccgctacggattttatgtaatcctcttctgcatggaagttttgtttcttaaaatttaatgttaaggagggtttcgtttccaggattcaacgtggagactgttgaatacaagaacatcagcttcactgtttgggatgtggggggtcaggacaaggtacatatttaactcttgccatgtttatggtatactgtcctcgtgatgctttatgctctgctctggttttggtgtgactagtaatgatctttcataaaacctggttattcatatcgtgcaagctcaatttgaaattttaatctccacgtctagtatctatgagtgtttgtcgtcttctttttttgtctgatatttgacattaaaatgcacttccgtaaaaacataaacagattcgtcccttgtggaggcactatttccaaaacactcaaggtcttatattcgtggttgatagcaacgacagggaccgagttgtggaagcgagggatgagttacatcgcatgttgaatgaggtttgccttctttctagttttctcttgttacacagttagactgaaacaacttcctataatttgatttataccatgtttgtaggatgaactgagggatgctgtccttcttgtgtttgcaaacaaacaagatcttcccaacgcaatgaatgctgcagaaataactgataagcttggtcttcactctcttcgccaacgccattggtaaagttattttctttctacaaagtttttcattaattaatgtggttagattgaaaaataaaaaaaaatgtggttagattgatcacattgtgataacatgtatcttatgtttttttcttttaacaggtacattcaaagcacttgtgccacatctggagaaggtctctatgaaggccttgattggctctccaacaacatcgctaccaaggtaaataacttaaatatcccattttaaaactaagtagaaatttgaaaggaacactcttttgaaagtattgatgcacttaaataacatccttaggggttttagattatatctatatatacagttttggagacatttagaggaaaaaatcattattcatgaatactgatcaaaccttcattttgattgagtactgagtaggcatgatgaagctgaacactttttgtccttggagaccattagtgattgtggagaagaaagaagtattatgtctgattttacaacggtttatagcatccatccgttgatgcttgtgtcattgtgtgttaaaacgtcaaaaatggatttgtgatagtttttacttttacctttttgtttgtttcttctaaacttatggaaatgttcttcctagctaaagagtagatatgataccttttcctccttatatagaaggtttttacaaattctctcagtttatagaaccctaataaaaccaaatcaaatacactatgcatgagggctcaaatggtccaacagaagagtaagtagattcatgttccaacaaacttggacaaatatgagagccaatatggtaattttcaagaaactcaacttgatctcgaatttggaagaagctttaggtagcattagaaaatccgtggtgagtcgtagcttttccttgtggtcttttggggatgcgccaacgttaacgagctcaagacatgacaattcctccaagaaacgcttcatttgctccacctctttgatacttccttagtactcagttaatactaggaccatgatgataaacgagaacatcccaagaagcatttgcaatcagatacagcagaccagacattggatagccatatatgaaagacattgaagagtctaagattacacaacaaataaaggaactttttgtttttatgtttcgagaatggagactaaacacgaatatatatgatgctttgtgtgtgtagtatcatcgaataacatctagaattacagatgcacttactagatcaatcaaaagagttttttgtaacgtttttcttcttctgtactgcaacacacccatttattgtctctcaaaagcttgcgggattcagcagacatgaaatcaccgcatggttttgcgttgcttttgaaatttagtcatcagctggatcttgtggagattcttcagcagtgcgtttgattgtgatgactgggcattctgcatgcttcacacaaaattcactcactgttccaacaaataccctgtccagtggtaaacaaatgtgaacttgatcaatatctgtgatttcaagctcaagcaagtacaagagctaatgacgattctcggtgcagtataaagtctaaagcataagcagtgattgatttccatgaggtgtcatcaatcatcatatgcaagaaaaaggtctcaggatttctaataaactcttgatctgtatttttcccgaaaccaacaagtcatttgagactacataatgactaatcgatatggtataactgtaaagcaagaataagtcttcttgaggcgtgtgtgaggattgtacatacttttggaatgggccgagaccacgacttcccacaaccagaaaatctggccggactcgcctcacttcatggcatatcaattctgtgggatcacctttcctgatccaagcctcgcacccaacctacaagttcaacaactaccatgtatcagagccaccaaaagttactgtgatacaagtgagggacataaagacagatatggatctatcaatgagtttaaaggagtcgtttaccccaatatcatgacatttcttaacgaaaaactcaagaaggtgaagtcctttagccttgttacgctccctcatttgtcggaaatcatcaggggaagcatatatactgtccatgtcatcaaaacctggttcccaattcataatcagaacaagtaagatcacatttattaatgctacctaacaaaaataaaacttggtacattattgcattgctcccaatgaagaggaaaaacatcacataaacatgaagaaagtcttttccataatatttcttagaaatcaaaagcacaattcttctcagaagtggatctagattcttctaactaaccaaaaacagttcttgtcggttctttgacttccattgaaaactctacgaccctcacaaacagctaaaacactagagatcaagtcttgagaacatatacaaacacctaatttagcctgaattaatctacttataccctaaaaaatatccgttgagcatcatcattgaaactaatgatcaacaacattaagcagacagatacagactcaaatccaagtatcacgatattcaaaattcaacgatcgaatgagagagagaagtaaccgtcttcgtcttgaacttgaacgtggagcaagagaagcttgaagccagaggtattggaccgaacgatcttcttcagtgtccactcgaatgcttttttgctacttatcgacgcgtgtggatagcctttgagagtcgattcattcaccgccaccatcactcgagtaggctcgctctccattattgtttcactcgactactctctcgagctctattggttcctaaaagaggaaggcggggaagcaggaatgaactgaataacaactatgtcaggcacaagcagagaggaaagggtattgtgcgcggacggcgcacattagagcacgatatcgtaataaattttgctgccgactaaaatgcgcagggtcggtttaggagcagaactttgttagtgggtctcttatctagcccaactattcaatctgtttataaacgggcccattgctatattttgggtgttattggtaggctagcttcattttgttatatagtttgtactttattgatttaaataaaagattctaattgtatagggttttaagtatttagtgaatatgagaaaaatcatatgaacttataagtgttaagaaatcatcttccaatcatactgagtataatttactggcattatatagaattaattgtaactaaaaaaattgaatgacaaaagctttggaatgtgataaaaaatcatcaaactaccaataaccacttcctctctgttttttttttttttcaaaactagttttatgaatcaaattatttaaaggtataagtctctaacaatgtgaacacttctaggtccactgtcgagctaattcatgatattttgatggaatgaacaaatttctgcagttatatatcacaaatgtggtttctagcatagtggatcgatcgagatgtatatatgcgaatacgctcacgagcgagacctatcatagaatagaacacatagactaaaacattcacattttatatttattcgaatataactaaaaaatcctacaaattgatcaatcattgaattccagtgaaagagactctaccaaatccaagatgaccaatctgatacaactctaaccacactctctcggcttcaactcttgcacttattcgcgactcatcatgatcttctcctttacacgacgtcgttctctcctcctcctcctcctccttcgttaaactcccatctctctctaccacaaaccggtgatcatcataatctccgccgccataacatcctcctccgccaccgccgcagccgcatttctcaccctcctcggctgtctcaaaccggcggtgatggttattatgatgataaaactcatcttcaccgttgatattcccgcggcgtttcctcctgtgtattactctccgcttcttcttattccgaccgccgccgccgagacatcgccgtccgatcatccacgggactttgacgagagtaagagtaagaaggttgatgatcgcacatggacagcaacaaagcgctacacagtcagcaatcgccgcagccgcccacgatcggcatctcttactggagcatttgacttcgtcgccgtgagtgtggtggttatgccgtcgtcgacggttctcttcgtccacggcgtcgttttgacagtgggtcccgccatggtttctacgtgaaactcgatgcgggttttcctccatcaaaacaaaagcctactacaacaaaaaataatacagaaaaaaatgaagagcttggtcactgtaatatatatatacgagatacatcgatatgtatttaatttatggatcaaagtttgaaaaaggttttgcttacaagttgatacgtataggaaatagtaaaaactttattaaaacaaaaaaaacagagagatgtaggaaacaacaactcgagattttccatgcatttttcacttaatgaccaagacagttcaggtttagattcactattctctcacgctcttctttatcgcgtgtaaaccacgacatgtaacgacttcgtttttttccctcatgtaaatcaaacatactatatacataagggtaaaaaataaggtttggtctaatgaattttatttataaattgcaaggagcgcgtggaaacggatccatattattattttgggggattttgaccatcggaaatgctaaagtttttgaaagattttaaaaaggagttctcctagggatatgtaatgaattaatgattattgttttgggctctctgagattaattgtggtgtagtagcctgataggtatctcgttaatattttttttgctaatttaaaagttttacacaaggtttaagaagttgtattggatttagcattttgttttttacgttctactagtatatagtatggtcatttaccatttagaaaacacattccactaaaaaaagtttgttatccgaagatatgcgacaaacaaaagatggagattgttgtaccaacaaaaaatttatggtgatgtttatggtgattaatattataatgtttaattgatgagaaactatttaaaaattaatgtggcaacgtggatgctagtgggaaggattctctttcacgtggattgccgggtcttcttatggcccaattacgtggaacgtaataaaatacaatttagaatacactaatacagtatacgaaataaatagtctattgttcaattatactttagtgttcctacttaacttatgaaacaactgataatcaatagccctattaattaatagtcctagaaagtctattaggaatctccttgcaataatttccagtagacgataatatatttttagatatgtatgaactacatattaatgggctataaaccatgattcatagagatgttacttttgttttctgttaaaaatgaattaaagatattacttttggacaattggactccggcaaatgttgtagaattatatctctctgtttcatctttacgaaagcgaaaatgttaatcaactattcaaatgcattctgattataccatctattacaaaccatcatacagtatatgtttcgtgtttagagataaagaaaaatcgtatctttcctttttatatcgtagtgggacctagtactattgtcccttttcacttgtataaggtaaaagtgcaaaatggtgggtaaatttaaaaatgtaatttgcatgttcattatacaatactgatatagtggtatattcacacatatgagaccctatatactttgtgtatatggatatcattattagaaagctcaatttcaatatctatggaaattttcttaaggaaaaatacaattaaagttaattatgaaatgtatgtttgtatatccccaacgtggtagtcacaaatgacacacatgcaacctaaatatccctctaactaatcatattgttaaaataaataaagctcttcggatatgtaaaatctacgatgaactcgatagctaattcagattatacccgtagttaagaccataatcgtaactgggatttatagaaattgaacccaactaagaaaccctaatcgaaaatgatgagtcatgagagaaatgtaggattaccttggatgatttcctcaacttgcttgatttctggtaaatatatataactatggatgcataaagttcaacagaaatacaatttcatttggtatgttgtgtattgtagtaatcctaagatatgatttgtgggtttagctaggtttgggatgatggatatgataaaggaaagaaaaaggagaagaaggagaagtaggagaaggagaagaaggagaggacgattaagaaagatgatttggtgtagcaaatgctccatttttacatatatacatgtttccttttttgtttctctctctctctatatatatattcacgtgtacggagcttaattaattacgttagttataattgcattaattttttattttagcagctgagtaaagctctatttgaatgagctaaactcgagtattttttacgacgacatatgacaagagctatatgtacagttaggttttgtaataattttttgggtatgagccgtatgatttaggtttttaaccgaattagaggaatattttgcaatacttttacagttataactagattttaacccgggactatatctttttcaaaaaataaaaaattaatttgtttagtagattaaatatatataatttatttttatattttctaaatgtacaactcttatatatatatatattatttagtatataattactatgtttaatttttactgtttaaaaatataaaaagaataacaaacagtttattaagttaaaatttagattataactaaataattcaaattttaattatatttgttttattaatataatgatattttgatttataaatatatatataatttcacccgtggtatactgtctcgtattattatcgattcaaaattgtcatatcatctaatctcgttcagtgaaattaaacatatctaatagatttcacccgtactatactgtctcgtattacttatcgaccaaaactcgtcataccatctcgtatttttgttttaataatactttactttaaaagatatataattcaaatcaatttaaaagttttatttctaatgattatttaatagttttaaagttcatatattataaatattctaaactcgtcttatcatctaatctcaacagttaaaattaaacattattttttttattttttgttcgaataatatttttattaaaagatttataatcacattaatttaaaagttttattttaaatgattatttaatttttatagatttcatatattataaatattataaaacatttttccgttaaatattttaaatgtttaattaactataatatttatcttttaatcaagtatatatgaataatgtcctaagatttctcattttttaaataattaaaattgatggaaatataatagataaggaaatgctacaaattaggaatattaattaattgataataattgatagcaatgacatctcttgtaaataagtttcaacttaggatttatttgctaaaatgactgaaaaatgtatatatatatagattatacatccaaaacgttagctttacgtaattagatttgagttgttattttttgaatgaactagttaactgaaacttatgagtagattattcgttattagctttgatacaatcaaattgaaagccgggaaatgtgtgatatgttcagagattcagtgattcacgataatgataatcatatagatttaaatatcacacattttaaaaaaaaatatatatatatatataagtgcaaattagtaaattacaacgagtcaacgacaattagttaaatttggaacaagataatggatttctcatatatacaaataccatatgataatatgtgaggtggctaagtatttttcaatgatacgatgatgtaatcatgactatatatatataaactttcaactaaagtatatatatcatactgataagaatattcgtttacgcgaattaattaagattacaatacctataccataattcgactttacgtgtacaatatacttaatatataggaatacaaaattacagtctttaggtgttggtcttatgatatctataggagatttcttgaggaggcctttgatgaaaataaagagccaaccattttagttttttaatttattagttatcgattaacgtaatcatcaaatcaaaatcttcttgatgtgttacattaaacgacttgatactcttaacaaatacaacatgtaaactataacctgctaaggtaggctgctagtaaaggtcggaattagagtatcatacaagtataacttctttaaagttttaaactcgttacgttacgttccgtgtgaacaaacaattatgatcagcattacattttacaactgtagtgctgtaaacgatagttagggggtcgatactctattgatcaaacttattgtttgaaacatttttttttttgttagaaacgttgtttgacatttttgttaaaagacaccaattgtgaatgcagccccatcttttgtaaatttcttcactaatgttttggattttttattggtgaaatatttgattttcaaaaagatttttgatgaaagttgtagatcagtaatgatcttcttctttttcttctttttttttaccagaaaaaggaaaatgctttggttaaacaatttgtgaattcaaatgttttttttggattagtttaaccaatatttcctcacagtttcacatatgtgtaaaccggttcgagttattagtatttactcctatttagtaatacacaatcgataagaataagttcttgtacgaatttataggaaatatcggagcttggtgtttgatgagtcccgaagacagagagaatcaaatcatgggaactcggcccaatttgtgttgctttccatgcattttcacaatagttttctagtgtttttcaacactaaataaaaagaataaacacccaaaatagaaattagaaatatttattcatttgataaatttgagtgacttctaagcaaatctgaacatctcattaccaaaagtatcttagagtatgtacttaattatgttgcgttcaatgatggatgtatgtacaatggtaacagtgccatgaaaatggtatacattaaagtttctacatttcagtgctgcatttaggagctgagttatttgcagagttgatatgagtttttttttctttatagtttcaaatatttacataagtttttagtattttttaatcagcataactttataaaatcatttatttatgttttattttgtgtgattttccgtgagtttgaacttaaaaaaataggacagcgttcacgcctatttctctctggtgctgcctttggcgtgactttgtcttcaaaacactttgcacgtgcactcgactctccgatcgccacgttagctactgagattgctctctgttttaatttttgcgtattgaaagatagaaaaaaagaactgaagaagtgtatttcactcgcttcgccgcctggctgcagagacacatcagtctcttcttcatgttaatcatttgttctgatgtttctttccttaactatcatcacttatatgttgacatgtgtcactcattgtacgtccctggttcgaacagcttgcttgtttggcatgaaccggttgcgtgttggacgaactcattattcatatcattacaatgttgttgttttttttgctaaaggtatcattacaatgtttgatttatcagaaaaattattgtgtatacttttcatgatgattgacaaattaaaataaaaattatatttgtgataatccttttgcaccggccagtcgggccagaaacaaaattacgtgttgttgaaattggctttatttgctcgttattgacttattgttagttatccgaaataggaagaatttataaattttccacgaacaccaactctaccgccctttacaacaaccaccctccacgcaaaccacattcgtacaattacaaataacaatgattctcattttttttatttcataatgatttatcattacactaaacaaataaataaagcataatttaaaagaagaaaagaataagagcaaaacgttacgtcaatagcttagaactgctctgtttaatttttgtcgtcgtgcctagctaactctcatggtagcaacttcgtagagttcttgacataagatctaatagctttttatctgatatttgtaaagaagcttctgtttctgtgtttgcatctgaatcgttgctgttaccgcaaatcttttcgatttgaacatcgatatcttttgcaagcttttcagcaccatctctagagagaatggtgtcgaaacaaatgtatctaccaaacgcagttttattacccaaaccttcccacaaacatacgtgagctttagccaacctgttcacatccattgtcgctaataatccgttactatacatctcttttgctcctgcatttttgcaaaacaaaatatataaataaaagtcaacaacttatcagctgtcttttgtctctttatcgaaaggaccacccgtgaactacgtacacatatgctaataggagtatatctatataacaataaacattattcttggacggtttctcaattttggattcatattcattataaggtttgtttttaatttacctttgagataagccaaggttgaagtggagttacggttgaagaagtcaggaccagttataagagcaggacatatagttgcaagctttaatccttttgaatcagctattctccacgcagctttctcggcttttagttttccaagtgcataccaaagctgtggatttagtataaaggatgttaattattactatgttattaatttttgaatattctagctagagctaaatatgatgaaaattatggtttacttattctaattaccttattatcgatgcagagttgttcatcgctccagctttcttcattgataacagagtggtcaagactattacagggatttttttgccaagcgcaggctaagagagatgatgtgaagacacattttctcactgaggctgttcttgtacacgcttcgattacactctcgctcacttttgcttctaactccgccattgatttctgcaaaacattaacagtgaaaatgagttacatttcttaaaccgtaacatttctttttttttgttagcacgactaattaagacaggttgtaaaaagaaaaacaaaagtgaacttctgatagtactcttacacaaattggtaggtccatttatgttattgattttatgatgacatgtgtgatatgtttttttactgaaacaaaagttttggtacgtagacgtttcaataaatagtggccacaggttagaaaggtgtatcagtacgattcatatcgcgaccagacacttacacatacccttatgtagatagctgtccctgttagtaggtagacaagctttctaaggtagttcacagttactctcaaacacaaaataaatgaacctatcaatctagaagcgtagaaaattcgttatgctaattaattactatatgatgactcttatgaatcaggtggttgaggatgaattagtcaaataacaacaggaaaagaaaataaccaaatctttcaaatttaagtaaaatattttcattctattccaaaaagtgttgaaatgtcacaatgcaagagctatcaactctatttattattttggttatgaagagctatcaactctttcaatgtcatttagttgaggaagaattttttttttttgtcaacataaagagcgaacagaaacaaagcaaggagacaaaaaaggtgtacaaaatctaagtatttgaaagcaaaaaatattaaagattttaaaggcattgaaatttatggttgaaaatatgtacttatgccaacaaacattcagaaaactaaggtaagttactaagaaccaacctcaactcataaccactttattaacgaaaagcagagccactcaaaggtgttctagaaaccaaactaggggcagacaaaattctataaggaaattaaaatattatcttaatttgacatatcagtaagatacacattctcatattcacaccccgacacgtacgccactaaaatttgtgtgaccagaacgagaatttttttaatcatacgaattcactagttagaatgtaactaactagtcatgtacattaaatatgatgtatgcctttgtacgaatttatgatacgtatctctccattgttatacacatacacattgtacagaggaagatgaaaatgaaacataccgaatatccagagactccagcaggatcaacaaacgcagaagtgtggaaaacgccagcacaaccatcaaacgctttaattaagctatcgatctctgttaatcgagaaaccactgaagtaatcatgttgctaaacgacgccgtttcagcgtcagcttccatctcactcactttctctttgtcctctgcattttcaaagttggagaagaaaatatcaaacttaatataactccaagccgaatatgtaaaatttataatatctttgaatcacatatgtaagcagtaattcgttaaaatatgtattaatttgaggtttttctccgttaatctataattacctaggaaggaaacaagcataaactgaatcaagatcaagattaatttcccaaaaatcttgccaataatttaaaacgttagagatgaaaattacctggacaatcaacgacgattctaacggagtatccatgaacaagaagacgtttaacaatggcacgaccaaggtaagaaacaccaccagtaacacaaaccaatctgtttccggcgtcagaatcaagatccatggcatttctagatttaccaccgccacgagagcctctgaatccgtcgtcgtctttcctcctttgcacagcggcgcacatgaactctttaagctccgccgagaacgtctccgtcgcacgtacaatcctcataatagtcggagtaaagaatcaacaaaggaacgagttgagatcgaattatacaattctttgttcactgtcctctggtttcgttggctctataggttcagagaaggtagaaagagatacacagaggattgagaaatgaggaagaagatatttatagagagaaagaaacagaggccgttacacatcacacgagaatgctaaagagtctctcatttttttgaagaaaaaaataagacaagtgtaatacaattcagctttatcggctcagcttggcttcctttctttatacgaatacgatcccatctacggtgtatatttattattttacctataaaaaagactataaatagttaaatacgtttttatttgttccaaaaacctgatatctttcagatcacctatggtaatgtatatgaagtgactaagtaaatatcaaagtttatcaagaactaaattatgttattagtctcttaatttttattattgttggagtatgtaaatgtaatagaatttgtttaaaaaaatcaagtaattacaaagttatacagggttttttcttcttcttatattatgaagtcagataggttacaaattacaatttaaaataaactaatttagtgagagttgcgtaaataaaaatagagctgccgtgttacatgactggttattttgaatatacgtggatttggtccaaaccggtcattacggtcaaactagtttttttttttttggtttaattttaaataaggtcaaactagttgacccctaataatacgacggctaagtaacttgattaattaagaggacaacgacttaactaaatgttcgtaatctaaatacaataaaaattgttcaaaatattaccatttgggtaaactgttacttgtattatattaacgtctaaactttttatttagtattgattttttacttttattttgatagagtgttacgtgggtggactagacggaatatagagaataaatggtattgttctccgccattaattatttacacgtaaccagtattgtttttcctcccattccattttcatatttttgttctccgcctcagcttttaataactttatttttacgttttaatataaaaaaaaaataaatacttctcaacatattttattttcattttctatgttgagctacttacatataactatggaatgtgtaatatattttttgttatattataggtgtttgaccatccacacatttgaatattgtctgactacaaataacaaagatgcatattagcaattaccgaaagtgtctacgcatacaaatatacaatatattatttaatggatacataattgtacttatattgttaaaaaaatctactatacataaatttaactatcatactacgaattagacaaaaaaatcgaaaacactaattataaacttccaaaaatgtcaaatcgtaccaaattctcatgttttcaacagtgtaactcttgtttttaaacgaaagtgaattaatggtgcaacaaattgtcaccaactcttattgctttatgggttactatttctcttaattgaaaaagtctaatctattactcttgcttagaaggtctcgtaaggccaaaaggaaaaaggcaaaatctaatactcaggaaatcattaaagctattccacgattattataaggacattaattgttatttgatgacatcttaagtaaacctaccaccattgagaatagtaatgaatatatatgaccatttgagaaattctaaagattatccttaatatgatccgtacagggaattgaattaaacatcttaagatgctttatttttactagtatacactaatcacatagtataaatatttaatattcagggataaatattaattgagtatcgtaagcctcagcttcttaagcccatttttggtcaaataattaacgagtggaaaaaatgaagacgcagataagagtggtcaaatttgcaattctgcttttgggccaacttagcatatgctctcaccacgaagttacaattcagtacattttagatagaaatggtcaaacattattccattaattcgttcttgtttgacgaacaatgtcacatcaatttcaactcaatatgtacaaatatgacttaaccaaacatattttctctgcgcaacataactaaataaatatatgtttatagctagagaaatgtagatttaatgtacaattcgtataaggatagaatattaaagagattagggttttaaacgatgatagtataacactttggaatggtaaacggttagaatctttaaagctaaaaaatactacgattcgtttcatattaaaaatttcacttaactgaagatttgtaaaatgacattatccattatatttttatttttatttcacgaaaatagtgaaatcgtagaatgatgtggtattgtggtatgctgttattttttcacgagagcaacataatataattgatgtggctaaaaacggctcggctgagagggaaaacgcgaaaattaggagaagcacgtgttgaatgaccagtagacacgcacgggcctcaaccgtactctttgccctattttcagacatcgagatggttagttgatggtgcgtcactaaagtaacgggcttgtttcggaagtaaaaataattgagcttacgtgtaagcttctgattggtggatgggttttaattgccggactacctgattggttttcggcccggctgcgaaaatgtccggttttacaagaaaataccatatttttgataatatacatcaataattggtctgtgtccgtcttttttcagtcacatgtgaaacatgttcatttttgtttcttagcaaagtcaaaatattcggtttctaatatatttaatccttttttctgttggagtaaaaactccaaattcgttgacaaaaaataataatgaagaaaaaaggaatttatcaatgggcctttttatcaacagttagtggacttcttaggtaggcttaataatttctgagcttatctcacaacgatgccgtttgagtggagacgaaggcgtttccggttctcttctctcgtcggagttctgaggtaaaaaaagaataaggagaagaagaaaagcaaaagcataaaagagagtagcaaagactgagaatggaaagcttggacactaattttcctgtgcgccatagaaaggtctcgtttgaaagtaaggtaatttgagaatctctcgaattacttccatgggatttttctcaattggttttggtcggttcttaatagaaaatctcgttttgattggtccaaataatgtctactgtgctttgaaaattccatttgtgttaaacaattttatgttgtgaagataatcagatcgattaatttctagtgtttgtttaaaattttgtatgaaagggaaacaagacagagattgtgatctgcagctatgaagatcatatccttgtgagtgtctttctgtgttagatattacttgttttgatgcttgtagtcatagttttgtctctctgaacctctacataactttgtttcagatcatagcaacacagattggtgccatgggaactatattgcacgcaaggtctctgattacataaatatatgtcactgttcatcattctactgtttttctttttcttttggggagttatgcttaatgttgttattgtctatgcttcttctaaaggaatgatctcgagtgttcttgatttattctgtctgagtaaacctaaattgtgttgttctctgttgaacttttgtctgtgatataattaggtattgttcatgcttctaagatatccctgaggaatgaaaattgcttgttcttgcttctttaggtctatcactttagcggtaatctatattggttaagaagatcaagttatatttgtttgaaaaacgagtgttacttgttgacaggaaggaagaagggatgtctgttgaaccaacatttagtgtttcagtgatattcggaaagcgagacgaggtaaaaatcttatcatagtacacattcataatttcatatagctaattcatacaaagtcgtactgaaaatttatgtttcttgaagccaatgctgacagcaactgctcgaagactcattgaacacataaggtctctctttcaccttcaaattcttgaatctttgcttcttctcctccatttctttgtttttctattgtctgattaagatggaacactagaaagtgatcaaactgttataatttatgcaatctcttttgaattcttcagttctattgttccctcgaagcctctggttctctcacttggtctcaaagatcattcttcggtactctacattttcttataaaaaattatctgattctgaaaagtatgcaagaaatcaatgatacctctgtgtgtgtcctttttgtaggagacgttgaaggaaatagtagcgacagtgattgagaatcgcctttggtaatacatattgttgtccatgttaaaaggagaacgagaagatgttttatgttttagtcttggttgatataattagcatggagttgtggaatcttttcttgtttatactgaaaacattgtttttgagataaaagttaacaacaagtacacatttttttcacacagaaacataattaaacaatagtattttgtttacatagcatatcataaaacacaaataagtaaaaaagaaaagtggggaaaacttccccaaaaataagaaaatcactgtagtagttgtcacataatataaacctgtcaaacaaattacacccaatagaaatataaagcacacaaatcttctctatttcttctttttgccttgaaagggaattttgtgtttttttaactcaagatccccagttgtatctctcagccttgtctcgatggcttttgagactcaatcatttctgtgtgttaatgcgttcaactgattctccaactgcagattataagaaaaagatttccatttaggcatacgatgaaaatgtgaaggcttgtacctcaaaatctatttcattactgtgtacatgtttataagatctcaaaaatcgattgatagtaaatgaggttcacccattatctcatatgagaaaagacaaacctgcccatttttctgcttctgtttctttagttcttctgttaggctggaaaagcttcaagatcaaagatgaaaagaaaaaaagtaattcaatgttgatgttaagtaagaacaagatgcgttttagcttgagacattccgtatttaatttcatgattagtaatcaggatcttggtgaaagaaagagatggatatatgtatgtacctttgttgtagtagcatgacttgagactgaagttctctctctcgtgaggttgcaggaggcgtctacataaaaatatgatatcaaattcgggttagtgaatattccaagattacatatgattaccatttttgattcgatgaaaaatttgaaaacaattttctttcttttccttcttcttttacctgcaataggtcatcgacgttcgtctcaggcgatccaggttgcttggctatgatatgggacaaaacgtacaatatcagaacatttctgttgagttcttcaacaataaggaaaatataagatcctacagaaaatcaatctgtaggtgaagaggattatagtaccagaggtttgctccaagtatttgattagtctcaaaatctcttcctgccaagagaagagtatttaactaacgactttaaagtaatattccttatggtttaaaatatacccgttgcatagcattttgctgcaaaatcgactgaattgatgggaggattgaggcggttgtagcattgaggcaactagggctgcttgtaccaccactaaatggtgtgaatgtagagtttgtagatccctaattgtaccaaaagcagaaacacattttcagttttcaaaaacacaatttgaactattccgcacattgccctttcaagcatctatcatttctctggcaataccatatagcttcaatgaagattagtaagaaactgaaggttataaaatgcggtactttttataccttgggactcagatctgctgatgtgaccttaaaccgtcccttgtgctccacatgcgggacttctgacgtctcgtccactgcataaaaacatatttgaattgaagactgtatacaaattacatgtatacaaatgagtaggttactgtggagggttaccggaatctctcttggtgcggtataatgatccgctgtagctccgctctgtttgatatctacgctgttgaaactccctgcagaaatcagtcaggtggcttttaaaattaactcatcattcaagtgcatagagtacaagctt

SEQ ID NO: 1432 - DNA, 89370 bp, Arabidopsis thaliana
aagcttgaagccagaggtattggaccgaacgatcttcttcagtgtccactcgaatgcttttttgctacttatcgacgcgtgtggatagcctttgagagtcgattcattcaccgccaccatcactcgagtaggctcgctctccattattgtttcactcgactactctctcgagctctattggttcctaaaagaggaaggcggggaagcaggaatgaactgaataacaactatgtcaggcacaagcagagaggaaagggtattgtgcgcggacggcgcacattagagcacgatatcgtaataaattttgctgccgactaaaatgcgcagggtcggtttaggagcagaactttgttagtgggtctcttatctagcccaactattcaatctgtttataaacgggcccattgctatattttgggtgttattggtaggctagcttcattttgttatatagtttgtactttattgatttaaataaaagattctaattgtatagggttttaagtatttagtgaatatgagaaaaatcatatgaacttataagtgttaagaaatcatcttccaatcatactgagtataatttactggcattatatagaattaattgtaactaaaaaaattgaatgacaaaagctttggaatgtgataaaaaatcatcaaactaccaataaccacttcctctctgttttttttttttttcaaaactagttttatgaatcaaattatttaaaggtataagtctctaacaatgtgaacacttctaggtccactgtcgagctaattcatgatattttgatggaatgaacaaatttctgcagttatatatcacaaatgtggtttctagcatagtggatcgatcgagatgtatatatgcgaatacgctcacgagcgagacctatcatagaatagaacacatagactaaaacattcacattttatatttattcgaatataactaaaaaatcctacaaattgatcaatcattgaattccagtgaaagagactctaccaaatccaagatgaccaatctgatacaactctaaccacactctctcggcttcaactcttgcacttattcgcgactcatcatgatcttctcctttacacgacgtcgttctctcctcctcctcctcctccttcgttaaactcccatctctctctaccacaaaccggtgatcatcataatctccgccgccataacatcctcctccgccaccgccgcagccgcatttctcaccctcctcggctgtctcaaaccggcggtgatggttattatgatgataaaactcatcttcaccgttgatattcccgcggcgtttcctcctgtgtattactctccgcttcttcttattccgaccgccgccgccgagacatcgccgtccgatcatccacgggactttgacgagagtaagagtaagaaggttgatgatcgcacatggacagcaacaaagcgctacacagtcagcaatcgccgcagccgcccacgatcggcatctcttactggagcatttgacttcgtcgccgtgagtgtggtggttatgccgtcgtcgacggttctcttcgtccacggcgtcgttttgacagtgggtcccgccatggtttctacgtgaaactcgatgcgggttttcctccatcaaaacaaaagcctactacaacaaaaaataatacagaaaaaaatgaagagcttggtcactgtaatatatatatacgagatacatcgatatgtatttaatttatggatcaaagtttgaaaaaggttttgcttacaagttgatacgtataggaaatagtaaaaactttattaaaacaaaaaaaacagagagatgtaggaaacaacaactcgagattttccatgcatttttcacttaatgaccaagacagttcaggtttagattcactattctctcacgctcttctttatcgcgtgtaaaccacgacatgtaacgacttcgtttttttccctcatgtaaatcaaacatactatatacataagggtaaaaaataaggtttggtctaatgaattttatttataaattgcaaggagcgcgtggaaacggatccatattattattttgggggattttgaccatcggaaatgctaaagtttttgaaagattttaaaaaggagttctcctagggatatgtaatgaattaatgattattgttttgggctctctgagattaattgtggtgtagtagcctgataggtatctcgttaatattttttttgctaatttaaaagttttacacaaggtttaagaagttgtattggatttagcattttgttttttacgttctactagtatatagtatggtcatttaccatttagaaaacacattccactaaaaaaagtttgttatccgaagatatgcgacaaacaaaagatggagattgttgtaccaacaaaaaatttatggtgatgtttatggtgattaatattataatgtttaattgatgagaaactatttaaaaattaatgtggcaacgtggatgctagtgggaaggattctctttcacgtggattgccgggtcttcttatggcccaattacgtggaacgtaataaaatacaatttagaatacactaatacagtatacgaaataaatagtctattgttcaattatactttagtgttcctacttaacttatgaaacaactgataatcaatagccctattaattaatagtcctagaaagtctattaggaatctccttgcaataatttccagtagacgataatatatttttagatatgtatgaactacatattaatgggctataaaccatgattcatagagatgttacttttgttttctgttaaaaatgaattaaagatattacttttggacaattggactccggcaaatgttgtagaattatatctctctgtttcatctttacgaaagcgaaaatgttaatcaactattcaaatgcattctgattataccatctattacaaaccatcatacagtatatgtttcgtgtttagagataaagaaaaatcgtatctttcctttttatatcgtagtgggacctagtactattgtcccttttcacttgtataaggtaaaagtgcaaaatggtgggtaaatttaaaaatgtaatttgcatgttcattatacaatactgatatagtggtatattcacacatatgagaccctatatactttgtgtatatggatatcattattagaaagctcaatttcaatatctatggaaattttcttaaggaaaaatacaattaaagttaattatgaaatgtatgtttgtatatccccaacgtggtagtcacaaatgacacacatgcaacctaaatatccctctaactaatcatattgttaaaataaataaagctcttcggatatgtaaaatctacgatgaactcgatagctaattcagattatacccgtagttaagaccataatcgtaactgggatttatagaaattgaacccaactaagaaaccctaatcgaaaatgatgagtcatgagagaaatgtaggattaccttggatgatttcctcaacttgcttgatttctggtaaatatatataactatggatgcataaagttcaacagaaatacaatttcatttggtatgttgtgtattgtagtaatcctaagatatgatttgtgggtttagctaggtttgggatgatggatatgataaaggaaagaaaaaggagaagaaggagaagtaggagaaggagaagaaggagaggacgattaagaaagatgatttggtgtagcaaatgctccatttttacatatatacatgtttccttttttgtttctctctctctctatatatatattcacgtgtacggagcttaattaattacgttagttataattgcattaattttttattttagcagctgagtaaagctctatttgaatgagctaaactcgagtattttttacgacgacatatgacaagagctatatgtacagttaggttttgtaataattttttgggtatgagccgtatgatttaggtttttaaccgaattagaggaatattttgcaatacttttacagttataactagattttaacccgggactatatctttttcaaaaaataaaaaattaatttgtttagtagattaaatatatataatttatttttatattttctaaatgtacaactcttatatatatatatattatttagtatataattactatgtttaatttttactgtttaaaaatataaaaagaataacaaacagtttattaagttaaaatttagattataactaaataattcaaattttaattatatttgttttattaatataatgatattttgatttataaatatatatataatttcacccgtggtatactgtctcgtattattatcgattcaaaattgtcatatcatctaatctcgttcagtgaaattaaacatatctaatagatttcacccgtactatactgtctcgtattacttatcgaccaaaactcgtcataccatctcgtatttttgttttaataatactttactttaaaagatatataattcaaatcaatttaaaagttttatttctaatgattatttaatagttttaaagttcatatattataaatattctaaactcgtcttatcatctaatctcaacagttaaaattaaacattattttttttattttttgttcgaataatatttttattaaaagatttataatcacattaatttaaaagttttattttaaatgattatttaatttttatagatttcatatattataaatattataaaacatttttccgttaaatattttaaatgtttaattaactataatatttatcttttaatcaagtatatatgaataatgtcctaagatttctcattttttaaataattaaaattgatggaaatataatagataaggaaatgctacaaattaggaatattaattaattgataataattgatagcaatgacatctcttgtaaataagtttcaacttaggatttatttgctaaaatgactgaaaaatgtatatatatatagattatacatccaaaacgttagctttacgtaattagatttgagttgttattttttgaatgaactagttaactgaaacttatgagtagattattcgttattagctttgatacaatcaaattgaaagccgggaaatgtgtgatatgttcagagattcagtgattcacgataatgataatcatatagatttaaatatcacacattttaaaaaaaaatatatatatatatataagtgcaaattagtaaattacaacgagtcaacgacaattagttaaatttggaacaagataatggatttctcatatatacaaataccatatgataatatgtgaggtggctaagtatttttcaatgatacgatgatgtaatcatgactatatatatataaactttcaactaaagtatatatatcatactgataagaatattcgtttacgcgaattaattaagattacaatacctataccataattcgactttacgtgtacaatatacttaatatataggaatacaaaattacagtctttaggtgttggtcttatgatatctataggagatttcttgaggaggcctttgatgaaaataaagagccaaccattttagttttttaatttattagttatcgattaacgtaatcatcaaatcaaaatcttcttgatgtgttacattaaacgacttgatactcttaacaaatacaacatgtaaactataacctgctaaggtaggctgctagtaaaggtcggaattagagtatcatacaagtataacttctttaaagttttaaactcgttacgttacgttccgtgtgaacaaacaattatgatcagcattacattttacaactgtagtgctgtaaacgatagttagggggtcgatactctattgatcaaacttattgtttgaaacatttttttttttgttagaaacgttgtttgacatttttgttaaaagacaccaattgtgaatgcagccccatcttttgtaaatttcttcactaatgttttggattttttattggtgaaatatttgattttcaaaaagatttttgatgaaagttgtagatcagtaatgatcttcttctttttcttctttttttttaccagaaaaaggaaaatgctttggttaaacaatttgtgaattcaaatgttttttttggattagtttaaccaatatttcctcacagtttcacatatgtgtaaaccggttcgagttattagtatttactcctatttagtaatacacaatcgataagaataagttcttgtacgaatttataggaaatatcggagcttggtgtttgatgagtcccgaagacagagagaatcaaatcatgggaactcggcccaatttgtgttgctttccatgcattttcacaatagttttctagtgtttttcaacactaaataaaaagaataaacacccaaaatagaaattagaaatatttattcatttgataaatttgagtgacttctaagcaaatctgaacatctcattaccaaaagtatcttagagtatgtacttaattatgttgcgttcaatgatggatgtatgtacaatggtaacagtgccatgaaaatggtatacattaaagtttctacatttcagtgctgcatttaggagctgagttatttgcagagttgatatgagtttttttttctttatagtttcaaatatttacataagtttttagtattttttaatcagcataactttataaaatcatttatttatgttttattttgtgtgattttccgtgagtttgaacttaaaaaaataggacagcgttcacgcctatttctctctggtgctgcctttggcgtgactttgtcttcaaaacactttgcacgtgcactcgactctccgatcgccacgttagctactgagattgctctctgttttaatttttgcgtattgaaagatagaaaaaaagaactgaagaagtgtatttcactcgcttcgccgcctggctgcagagacacatcagtctcttcttcatgttaatcatttgttctgatgtttctttccttaactatcatcacttatatgttgacatgtgtcactcattgtacgtccctggttcgaacagcttgcttgtttggcatgaaccggttgcgtgttggacgaactcattattcatatcattacaatgttgttgttttttttgctaaaggtatcattacaatgtttgatttatcagaaaaattattgtgtatacttttcatgatgattgacaaattaaaataaaaattatatttgtgataatccttttgcaccggccagtcgggccagaaacaaaattacgtgttgttgaaattggctttatttgctcgttattgacttattgttagttatccgaaataggaagaatttataaattttccacgaacaccaactctaccgccctttacaacaaccaccctccacgcaaaccacattcgtacaattacaaataacaatgattctcattttttttatttcataatgatttatcattacactaaacaaataaataaagcataatttaaaagaagaaaagaataagagcaaaacgttacgtcaatagcttagaactgctctgtttaatttttgtcgtcgtgcctagctaactctcatggtagcaacttcgtagagttcttgacataagatctaatagctttttatctgatatttgtaaagaagcttctgtttctgtgtttgcatctgaatcgttgctgttaccgcaaatcttttcgatttgaacatcgatatcttttgcaagcttttcagcaccatctctagagagaatggtgtcgaaacaaatgtatctaccaaacgcagttttattacccaaaccttcccacaaacatacgtgagctttagccaacctgttcacatccattgtcgctaataatccgttactatacatctcttttgctcctgcatttttgcaaaacaaaatatataaataaaagtcaacaacttatcagctgtcttttgtctctttatcgaaaggaccacccgtgaactacgtacacatatgctaataggagtatatctatataacaataaacattattcttggacggtttctcaattttggattcatattcattataaggtttgtttttaatttacctttgagataagccaaggttgaagtggagttacggttgaagaagtcaggaccagttataagagcaggacatatagttgcaagctttaatccttttgaatcagctattctccacgcagctttctcggcttttagttttccaagtgcataccaaagctgtggatttagtataaaggatgttaattattactatgttattaatttttgaatattctagctagagctaaatatgatgaaaattatggtttacttattctaattaccttattatcgatgcagagttgttcatcgctccagctttcttcattgataacagagtggtcaagactattacagggatttttttgccaagcgcaggctaagagagatgatgtgaagacacattttctcactgaggctgttcttgtacacgcttcgattacactctcgctcacttttgcttctaactccgccattgatttctgcaaaacattaacagtgaaaatgagttacatttcttaaaccgtaacatttctttttttttgttagcacgactaattaagacaggttgtaaaaagaaaaacaaaagtgaacttctgatagtactcttacacaaattggtaggtccatttatgttattgattttatgatgacatgtgtgatatgtttttttactgaaacaaaagttttggtacgtagacgtttcaataaatagtggccacaggttagaaaggtgtatcagtacgattcatatcgcgaccagacacttacacatacccttatgtagatagctgtccctgttagtaggtagacaagctttctaaggtagttcacagttactctcaaacacaaaataaatgaacctatcaatctagaagcgtagaaaattcgttatgctaattaattactatatgatgactcttatgaatcaggtggttgaggatgaattagtcaaataacaacaggaaaagaaaataaccaaatctttcaaatttaagtaaaatattttcattctattccaaaaagtgttgaaatgtcacaatgcaagagctatcaactctatttattattttggttatgaagagctatcaactctttcaatgtcatttagttgaggaagaattttttttttttgtcaacataaagagcgaacagaaacaaagcaaggagacaaaaaaggtgtacaaaatctaagtatttgaaagcaaaaaatattaaagattttaaaggcattgaaatttatggttgaaaatatgtacttatgccaacaaacattcagaaaactaaggtaagttactaagaaccaacctcaactcataaccactttattaacgaaaagcagagccactcaaaggtgttctagaaaccaaactaggggcagacaaaattctataaggaaattaaaatattatcttaatttgacatatcagtaagatacacattctcatattcacaccccgacacgtacgccactaaaatttgtgtgaccagaacgagaatttttttaatcatacgaattcactagttagaatgtaactaactagtcatgtacattaaatatgatgtatgcctttgtacgaatttatgatacgtatctctccattgttatacacatacacattgtacagaggaagatgaaaatgaaacataccgaatatccagagactccagcaggatcaacaaacgcagaagtgtggaaaacgccagcacaaccatcaaacgctttaattaagctatcgatctctgttaatcgagaaaccactgaagtaatcatgttgctaaacgacgccgtttcagcgtcagcttccatctcactcactttctctttgtcctctgcattttcaaagttggagaagaaaatatcaaacttaatataactccaagccgaatatgtaaaatttataatatctttgaatcacatatgtaagcagtaattcgttaaaatatgtattaatttgaggtttttctccgttaatctataattacctaggaaggaaacaagcataaactgaatcaagatcaagattaatttcccaaaaatcttgccaataatttaaaacgttagagatgaaaattacctggacaatcaacgacgattctaacggagtatccatgaacaagaagacgtttaacaatggcacgaccaaggtaagaaacaccaccagtaacacaaaccaatctgtttccggcgtcagaatcaagatccatggcatttctagatttaccaccgccacgagagcctctgaatccgtcgtcgtctttcctcctttgcacagcggcgcacatgaactctttaagctccgccgagaacgtctccgtcgcacgtacaatcctcataatagtcggagtaaagaatcaacaaaggaacgagttgagatcgaattatacaattctttgttcactgtcctctggtttcgttggctctataggttcagagaaggtagaaagagatacacagaggattgagaaatgaggaagaagatatttatagagagaaagaaacagaggccgttacacatcacacgagaatgctaaagagtctctcatttttttgaagaaaaaaataagacaagtgtaatacaattcagctttatcggctcagcttggcttcctttctttatacgaatacgatcccatctacggtgtatatttattattttacctataaaaaagactataaatagttaaatacgtttttatttgttccaaaaacctgatatctttcagatcacctatggtaatgtatatgaagtgactaagtaaatatcaaagtttatcaagaactaaattatgttattagtctcttaatttttattattgttggagtatgtaaatgtaatagaatttgtttaaaaaaatcaagtaattacaaagttatacagggttttttcttcttcttatattatgaagtcagataggttacaaattacaatttaaaataaactaatttagtgagagttgcgtaaataaaaatagagctgccgtgttacatgactggttattttgaatatacgtggatttggtccaaaccggtcattacggtcaaactagtttttttttttttggtttaattttaaataaggtcaaactagttgacccctaataatacgacggctaagtaacttgattaattaagaggacaacgacttaactaaatgttcgtaatctaaatacaataaaaattgttcaaaatattaccatttgggtaaactgttacttgtattatattaacgtctaaactttttatttagtattgattttttacttttattttgatagagtgttacgtgggtggactagacggaatatagagaataaatggtattgttctccgccattaattatttacacgtaaccagtattgtttttcctcccattccattttcatatttttgttctccgcctcagcttttaataactttatttttacgttttaatataaaaaaaaaataaatacttctcaacatattttattttcattttctatgttgagctacttacatataactatggaatgtgtaatatattttttgttatattataggtgtttgaccatccacacatttgaatattgtctgactacaaataacaaagatgcatattagcaattaccgaaagtgtctacgcatacaaatatacaatatattatttaatggatacataattgtacttatattgttaaaaaaatctactatacataaatttaactatcatactacgaattagacaaaaaaatcgaaaacactaattataaacttccaaaaatgtcaaatcgtaccaaattctcatgttttcaacagtgtaactcttgtttttaaacgaaagtgaattaatggtgcaacaaattgtcaccaactcttattgctttatgggttactatttctcttaattgaaaaagtctaatctattactcttgcttagaaggtctcgtaaggccaaaaggaaaaaggcaaaatctaatactcaggaaatcattaaagctattccacgattattataaggacattaattgttatttgatgacatcttaagtaaacctaccaccattgagaatagtaatgaatatatatgaccatttgagaaattctaaagattatccttaatatgatccgtacagggaattgaattaaacatcttaagatgctttatttttactagtatacactaatcacatagtataaatatttaatattcagggataaatattaattgagtatcgtaagcctcagcttcttaagcccatttttggtcaaataattaacgagtggaaaaaatgaagacgcagataagagtggtcaaatttgcaattctgcttttgggccaacttagcatatgctctcaccacgaagttacaattcagtacattttagatagaaatggtcaaacattattccattaattcgttcttgtttgacgaacaatgtcacatcaatttcaactcaatatgtacaaatatgacttaaccaaacatattttctctgcgcaacataactaaataaatatatgtttatagctagagaaatgtagatttaatgtacaattcgtataaggatagaatattaaagagattagggttttaaacgatgatagtataacactttggaatggtaaacggttagaatctttaaagctaaaaaatactacgattcgtttcatattaaaaatttcacttaactgaagatttgtaaaatgacattatccattatatttttatttttatttcacgaaaatagtgaaatcgtagaatgatgtggtattgtggtatgctgttattttttcacgagagcaacataatataattgatgtggctaaaaacggctcggctgagagggaaaacgcgaaaattaggagaagcacgtgttgaatgaccagtagacacgcacgggcctcaaccgtactctttgccctattttcagacatcgagatggttagttgatggtgcgtcactaaagtaacgggcttgtttcggaagtaaaaataattgagcttacgtgtaagcttctgattggtggatgggttttaattgccggactacctgattggttttcggcccggctgcgaaaatgtccggttttacaagaaaataccatatttttgataatatacatcaataattggtctgtgtccgtcttttttcagtcacatgtgaaacatgttcatttttgtttcttagcaaagtcaaaatattcggtttctaatatatttaatccttttttctgttggagtaaaaactccaaattcgttgacaaaaaataataatgaagaaaaaaggaatttatcaatgggcctttttatcaacagttagtggacttcttaggtaggcttaataatttctgagcttatctcacaacgatgccgtttgagtggagacgaaggcgtttccggttctcttctctcgtcggagttctgaggtaaaaaaagaataaggagaagaagaaaagcaaaagcataaaagagagtagcaaagactgagaatggaaagcttggacactaattttcctgtgcgccatagaaaggtctcgtttgaaagtaaggtaatttgagaatctctcgaattacttccatgggatttttctcaattggttttggtcggttcttaatagaaaatctcgttttgattggtccaaataatgtctactgtgctttgaaaattccatttgtgttaaacaattttatgttgtgaagataatcagatcgattaatttctagtgtttgtttaaaattttgtatgaaagggaaacaagacagagattgtgatctgcagctatgaagatcatatccttgtgagtgtctttctgtgttagatattacttgttttgatgcttgtagtcatagttttgtctctctgaacctctacataactttgtttcagatcatagcaacacagattggtgccatgggaactatattgcacgcaaggtctctgattacataaatatatgtcactgttcatcattctactgtttttctttttcttttggggagttatgcttaatgttgttattgtctatgcttcttctaaaggaatgatctcgagtgttcttgatttattctgtctgagtaaacctaaattgtgttgttctctgttgaacttttgtctgtgatataattaggtattgttcatgcttctaagatatccctgaggaatgaaaattgcttgttcttgcttctttaggtctatcactttagcggtaatctatattggttaagaagatcaagttatatttgtttgaaaaacgagtgttacttgttgacaggaaggaagaagggatgtctgttgaaccaacatttagtgtttcagtgatattcggaaagcgagacgaggtaaaaatcttatcatagtacacattcataatttcatatagctaattcatacaaagtcgtactgaaaatttatgtttcttgaagccaatgctgacagcaactgctcgaagactcattgaacacataaggtctctctttcaccttcaaattcttgaatctttgcttcttctcctccatttctttgtttttctattgtctgattaagatggaacactagaaagtgatcaaactgttataatttatgcaatctcttttgaattcttcagttctattgttccctcgaagcctctggttctctcacttggtctcaaagatcattcttcggtactctacattttcttataaaaaattatctgattctgaaaagtatgcaagaaatcaatgatacctctgtgtgtgtcctttttgtaggagacgttgaaggaaatagtagcgacagtgattgagaatcgcctttggtaatacatattgttgtccatgttaaaaggagaacgagaagatgttttatgttttagtcttggttgatataattagcatggagttgtggaatcttttcttgtttatactgaaaacattgtttttgagataaaagttaacaacaagtacacatttttttcacacagaaacataattaaacaatagtattttgtttacatagcatatcataaaacacaaataagtaaaaaagaaaagtggggaaaacttccccaaaaataagaaaatcactgtagtagttgtcacataatataaacctgtcaaacaaattacacccaatagaaatataaagcacacaaatcttctctatttcttctttttgccttgaaagggaattttgtgtttttttaactcaagatccccagttgtatctctcagccttgtctcgatggcttttgagactcaatcatttctgtgtgttaatgcgttcaactgattctccaactgcagattataagaaaaagatttccatttaggcatacgatgaaaatgtgaaggcttgtacctcaaaatctatttcattactgtgtacatgtttataagatctcaaaaatcgattgatagtaaatgaggttcacccattatctcatatgagaaaagacaaacctgcccatttttctgcttctgtttctttagttcttctgttaggctggaaaagcttcaagatcaaagatgaaaagaaaaaaagtaattcaatgttgatgttaagtaagaacaagatgcgttttagcttgagacattccgtatttaatttcatgattagtaatcaggatcttggtgaaagaaagagatggatatatgtatgtacctttgttgtagtagcatgacttgagactgaagttctctctctcgtgaggttgcaggaggcgtctacataaaaatatgatatcaaattcgggttagtgaatattccaagattacatatgattaccatttttgattcgatgaaaaatttgaaaacaattttctttcttttccttcttcttttacctgcaataggtcatcgacgttcgtctcaggcgatccaggttgcttggctatgatatgggacaaaacgtacaatatcagaacatttctgttgagttcttcaacaataaggaaaatataagatcctacagaaaatcaatctgtaggtgaagaggattatagtaccagaggtttgctccaagtatttgattagtctcaaaatctcttcctgccaagagaagagtatttaactaacgactttaaagtaatattccttatggtttaaaatatacccgttgcatagcattttgctgcaaaatcgactgaattgatgggaggattgaggcggttgtagcattgaggcaactagggctgcttgtaccaccactaaatggtgtgaatgtagagtttgtagatccctaattgtaccaaaagcagaaacacattttcagttttcaaaaacacaatttgaactattccgcacattgccctttcaagcatctatcatttctctggcaataccatatagcttcaatgaagattagtaagaaactgaaggttataaaatgcggtactttttataccttgggactcagatctgctgatgtgaccttaaaccgtcccttgtgctccacatgcgggacttctgacgtctcgtccactgcataaaaacatatttgaattgaagactgtatacaaattacatgtatacaaatgagtaggttactgtggagggttaccggaatctctcttggtgcggtataatgatccgctgtagctccgctctgtttgatatctacgctgttgaaactccctgcagaaatcagtcaggtggcttttaaaattaactcatcattcaagtgcatagagtacaagcttatatgtgaacgaagcatgttgagataggtagaaacgctaacataaagcactgagaatgctaacctatcagcatcagatgtgattctttttggagagaaagtactctctggtataattgaaccgctcaaatattttttctgttcagaaatgacatgacgtggtaaagaagtgttttgtgctgcagtgtcctcttctttcgtggtttcggccaaagatccaatggaagcctttgttaaaagctgttgtccagaatttacattagcatctttccaatcaggagtagttgcattatcctcgtcctcactgatatcaaagcagcctctgcatcatagcacatgtaagttcaatccttaaaattcagaaacatttacacagtttcaatttgatattatccatatatatgagttagatagtggaggtttaaataatgtgatgtactttagtgcttgaagaggtttgattggaaatgaggcgaaagaactctctaaatcatgaatatcattcagttcgtcctgaaaagaaaaaggaaacaaaaaaaagataagttgagttgacaagaccacacttaaaactttataaagattcccaaaagcaggtagataagagtatagagaatcgttttaaataatacatcttgactaggagctgttgctgagctgctagccctttcaggggaaagagcagattcatcctgtctttcacattgcttttggttgaaatcgggctcttcagcatgtgaagtatcatcatctgaaatctataaggctaacaatattagttacctaccctttataattaactaaattagaaaactattaacttacaagggcagcttgagtttttaggtcctcgagattgaaattccaagcgcttattccccttatatactcttgctgcagagaaacaggaagtctcagttagatgtaaaaaataattcaaacacacaatcaaactacaataccagaagatatttcttgcaattctcaggctaaaaaatttgcagcttaaagacatattgcagggtactatcaagcagaaggttgaaatccttgcctgtgataagtgcgcttcatattcagatttgttttgcattaggagatcagcttccttcgactgaaacaaagaattcacatatcaatcaagatttttcagtaattttcttcccagcaagacacagaataagttcagaggatgggcttaagacctttatttgtctatagcgatcacctaatggaggaagaccatttagaattgttttaaccaggtaatcagctggacgtgcatgtttgaagaaagggtgtttcaaaagcttttctgaagttggacgcttctttgggtccttcaccaggcatgtacccaccatttccttgaaggcctgttaaggcaaggcaacaattaaggtagaaagaaaacacaataagctatatgatacaaccaaattgtgaccactcacgcactttcgagaatcttttgtctctctcgtagtcaagtccaggaggtgcattttgtaaggtcatcagcaaaacctatcaatgattaccagtaaaggaaaatacacaaattgagtagcatagagcagtaaagatcaatacagatcaaatgacatcatcataactttaccttcattggcggatatttggaaaatggggcatgaccatgtgccaattcaagtgctgttattccaaatgaccatacatctgctctgtgacagagaaatatattagacaaaacacctgcgtaacatggtggggaagtgatctttaagtgtaaatgcagaatttagaattttattagtatcagcttacttgaaatcatatccatgtagttgctgcatgacttcaggagccatcctgtggagaaacaagtattaatcagaaattttgtctaagacgtatctgcatatgcccagagaacatcgcataactaatgctgaaagaagtaccagcatggagtcccaacaaatgtatttctggaacgttgtctatctcccgtatcaaacatgcaagctgatactccaaagtctgctaacttaacggcaccattggaatccaataaaatgtttccagcctgccaaggaagccatgtgtattgataaaaatgataacacattcccaacactcaatagggaagggcaataaaccaaaacggccttcatccagatataattgaggaaagtactatactaaaagggagataatgcacgtagataccttcacatccctgtggatatgcccatgagcatgaagatatacaagagctttcagagtctcacgaagtaaagtagcgataacaggttcctcaaatccatctggataggaagacttaattatatggagacaagatcctccagccatgtaaggcatcacaacccaaagctggtgtccggtggtaaatgagcaatgagcttgcaacacatttggatggttgatcagactcattgtttgcacctctctccggatcccatcctacaagcaattcagttcctattcattcagattaacagagacaagaattccatggtgttcaaaactgcatctgaatctttacatctagcttaagctcgtaaaactttaacatgaaaataaaaataaaaagagaagataagatagaaacatgcaactacaatttgacagactgatctggagttctctactttcaaaggcaattaaactacaattggactcgctattagtaaagcatgaagcaggaaaacaaaagtaagagaaaactaaacttctatctttgatgtaactccaggaaatagctagagactaggaataaggaagttgttctttcataattcagaataaaagttcctaccagatcgttgttgcacttttccagatcaagaaccttgatagcaactaccacattaagcggtatacacaaagctctatgcacagtcgcactgacaccatctccaatttcttcatataacttgtagtcttttgcattgagagggaactttttctctgaacccgattccataatttttactttataatcttcttatagcatatatgctacacaccttcgaccccgtaagtttcaacaaatttacaaaagaggtcgactgaagagagcatcaatctgtatgtggtttcttccaattcgccagcattttacttttcgtcaacgtcgagcaaatgcggaaacatcatcaatgccatatcaccaaaatacttatctgcgcaacagagcaattccagtaaaaattgacgaccaagtcttcctcatatgattaaaaattgacaacacagcggaatcccaaaatccgaaagcctataaactcagaaacatcttctttagaaacacaagcatcaaagtttcctaaatcctgcaaatgtacaattgaattgatactaatttcaaaattcatggtttccgaattcgttctcaatgataaacaacttaaggattcgatctattctacacgcattgaggttttctgtcaaaagtttttctacaccacacaaattgatcatcaccatatttctcaatcagatttgagaaaatgacaaaaagaaaaaacaccgaatatggaaaaatcaacaacgcagaaattaggaagaggaaagaagaaatctgataatcttaccattagggaaacaaatttcgaaagggaaacaaaacagaaaacaaatctgggagggagaagaaacaacgctgacctcaagtcaaatcaaagacggcgttacttaagctgacttattttgctgctgctcctcctgttacgcacgaaacgaaagcgacgtagacaccgccgtcgattgcggcggaggcgacggcggagctttataatctacgatcgatccgctaaggagacaaaattatttgaattggaagcacgagattagattttagaatctcgctttctctttctcttgtttgttatcgagtttctctcctcctcttgtggttagcttttctgtcgtctggttttcgcttagcagaaagaatctcgagaggagctaagagaaacggtttaaccgtgtcaatgtcaaaaaccgatttttactggttcaattgtgtaccgtttttttttggttcaggttggcttttaccaaatcagaaagtttgttgaatttgactaatttcacatgagatgtgtaaaccatatgtaattgacggctgggaagtgatccacctggtggacacaatcacacaatttgtgtatattaaaaaaaagtagcaagaatattgtttctacttacattataaaattagttgacaaaaaaaaacgattcaataattttaagagagccactattatattttgatgtaacgtatgcatggtttgtgtaaataaagtaaaattatttatcatatttgtaatgaaaagaaaacggtctatgaatttttgtgactgataaaatcattatttaagtgatagatcacaaataaaaaaagaaaaatggcaatcactagtttatacagctaacaatagatgtcacttctaaatgagatggaataatacctataaatgtgtaatctaaccaaaacttttaagtttggctgtaaaatttgaatactactatttaggaccttgctatgtttaccatgtactgaaccgaacttccggttctgttaatcgttgtatcactaaatatcgtaccgggattctaaattaagaacaaaaaaaacgggaaggtatcgggctggctaaagagatgattcatgattgcttcacaaggaggaggtgttactggggtcaaccccttgtcttcattgggtggaaattgctttcacgataattattttcatttatataacaaaaaaaaaaacaagaattaggtaaaataaatgaattttactctagtcaaatgaaaaatttgcataaaattttattacaactcacagatgatgttgacaaagtgaaaaactgcattacctttaaacaaaagaaaagttgattacaattttcgtattaccttctccgaatgtgcctggaaaatataacatggacaacaagctctggatattgttcaaataattatacacttttatgatggaaatataaaactaaaaatctattattaaatcggactatgcactgcagatgactttgttacgagtgtttaaaacacgttatgatgattcataattacaactcggacatatccttattaattgcttttttccttcatttctaataacatgctatattatagtgaaaaataatattcacaaaatctactatgttcaataaacaatgtaatatgcaatttacaataataaagcagacgattcaatctaccatatgtcatatgtgatagaaacatttcatgtactatctgctgaaattttcaccttattaaaaaatttataatagtttgtattaaactattttttagtgtaccatataattttctctttctatttaataaacttaagaatgatgtacatatttcattaatagtaagatttagattacaaaatcagacctcgaaataacgattagaaacaagaaataaaacatttacaaagttaagagatatacatccattttgtaccactgcagattatcactatggtcacaaatttttagaatatatttttgatttgtattatgcttcaacgttactgttaggaaacgacgacaatacttcattataaaaaataaaaaatttataagaaacacacagattgttcagtgagcgatatgatggttggccaaacaaacaatctaagagatttcatttcataactcaataacgaacgagatattgttataagcgaattttttccaacaaaatatctttatacataattaagatatatatgtttgtattcgagaacatgccaatctaatcttcaaaaatgatccaatgttcttgttcgaagaaaatggatattcacaagtggactaattatttatgcttgttttcttatgcccaacttgtcaatcaagaatgcataacataatactagtaaggagggtccataaaaacacttcattctctttcttttccttttatttattttgtcaaacaaactcattctctttcaaaatactgtttgaaacaaacaaaattagaataacaatttaaaacggaaatactttggtagattttgcaaagtagttgtgatttggaattacgttcaacagaacaaaatttgataaaacctttggatgttaatcataaaatgttgagcatctggcgtaacaaaagttttaagtgtttcatccatctaaaatttgataactatactaagatatttcatatccctgagaattgttttttggatcaaaactaataatttagtttatagtatgtctttttctaattcatatttcccctaagtctttttttttttatatcccctaagtcgtcagccttgacgcggcatttccgtaaaactcgatgattaaaaattttaaatacgataattaaaccttaaacaaagacagaaatagatcacgtttccttgtcaaagccgcctcctcttgctgcacaagtaaagcaactactacattcacatctctctatatacgtacacacttacgcaagcacatttgattcccatattatatatatatacaacacacagagagagagtccaagtttatgaacagagagagtcaagaatacagaattttatcacccaaactgcgacgagcacatcatgagtacaatgcaagatttatcttctactgtgtcgtttagccctagcttcagtttctacgcctccggtgacctagtcgaaaccgccgttagagttatacgtgagtccgagagttattattccgttaaagttgacggcgaaaacgacaaagaattcgagttcgaaacattaccgttaggtgacgagagcctctttcatttctcaacgatgacgacgacttttaagcgctcttccgacgacgatgacgtggcagacgatcgagtcacctcgaagaatcttttctacggtggatggagtgttgatcctccatctctaacttcgccgtcggaatcactttcatcgtcggattctgacgattcggaaaacatttctccgagcaaattctactgtttctggagtccgatcagatccccggctagagacgatagcttgaagagtaaaggatcttcgagacggtgtcgtataaaggaatttctgaggagaagccacagcgacggagccgtttcgaccgtgagcgcaactaaacggtgcagtttcaaggatcttctaaggagaagccacagcgatggcggcggcgagggatcttcgatttcgacgagtggaaacggctctctggtagtgaaagggaggaataaaacggcggcgtataagcctgatgtggataagagaagaaagtcttacttaccttacaggcaagatttgatcggcgttttcgccgggatgggtagattccgtaattaacgaatgtttgattatttcctaattttattatttaagtgtgcatattcacaaagaggtcctcgtttgatttttaattttctcttttgaccatgtaatactttttggtgatattaaattcacttgtgttttttgtcttttttacttttccactgaaatgttgtgcaaagtgtaagactttcgaagaaatagagaatattttaacgaaggggatcgttttgtccagttgcattcttgaagaaatcaatgatctcggtgatacaacaagagtaagaactctctggtgattcattgtcacaagctcttcagttctcggtctaggtcagtttccaatgtgctaattaggtctttagttagggtttagtagtttaaacaggggattctaacatagactatagctttgatgcatgtatatcttgttaaccaagaatgatggtggctatttaacaggaaaagattcggtgttaactcagtttggtaatagttttctgatgtttcttggttcattccccactttccttgcaattcaagtaacatggcttggctgccatcagacatataaggtctattcgtcatgtctagattgcgcttgcctattttaagcacgtattgtgaaatttccctcttgacttccaagatggaaaactttttgactagagaaatcagttctgttcagtttgagccacaacaatcaacattctctcttaattagtccacttgttgtgcctagtctgctattaagtaagtgcctggaaacaaggaattgggagtataagaatttcttaatattcgtttttcatgcaacaaagcaagtaaagacaagactgttgacatataatgatatgagaatgtcgacatagtttcttcatcctcccacataatacatatgatataagtagcgaatcaaaccctatgcacatactccatttctcctctctcccttccctagaggaaatagagaagctcttcaagtatccgatgtttttgtttaatcaacaagaggcggagatacgggagaaattgcatgtgtaatcataaaatgtagatgttagcttcgtcgtttttactatagtttagttctcttcttcttcttttttcgtcattacaatctctttcttaatttacttcttcttgatagtataattaagttgtttgtaataatctgtacaaagatgttgtgttctcataaaaaattcaattttgtaaagaagctctacatgttccttgctctgtaaacatggtccccttttggactacagtttctcgaaatggctcatcagactcagagacgactctccaatctgcttcaaaagccacaaaacaggtaaaacagatatagagacacaaagtgatggtctttatttagataaggttagcaagaaaatcaaagatataagtatagccttcgcttggtgataggatcttatccactatataatccacacccatcaatcccttctacatctccaccacttgtttttttttttggttttttttttgccttttttggtttaatccgagaaaatttcaactttcgatcaatattttccctacgtttggaccaattttgataatagctttagcggctatacagaacattagtgtgatacactcaaacgaaaaaatgataagaccgaaatagtttccttttaacttgttgatatgataccatttgagtcataataattataatctagaggtactttcttgtacaaatatgtgaaatgttttgcatatattaatgtttgaaatattagacttagtaaatccgttttgttaatatcagaagttagtatgaggattaactggatgttactaagcaaccccgacaatttgattccttgttctgactcaaaaaccttatacacctttaaaattttattttaccaaattgccaagtttactgttttacgtaaatattaatgatcgagataaaagttttaagagaagttctttattccaccacaagaaaagaaagacacttttctatatatgcacctcacctttcgttttcattatcttctttcaaagggtatttaattttacaatattactagctattactcttgtttgtagtataaatatccttctcttcgtccctctcatcgcctgtctctcctcttcctcttcccgttccatttatccgcaaacggagcttgttttcggtgcacctgcttcagccacttcaaacttggtatagtatataaattatacaattccctttctctttctttcttttatcaacaagaatctaatatgtatacgtcgtaaaagggttttgagtatttgtaattctttactaaatatgtgaatgaagttaatttgtagggatgtatatagctaaggatatctgaatggagcttatcatttggattcgtatttgatttctactataacacgctttaacttttatcacaatcgaaaacaataaataataatttatagtgtttcatatacatggttgatgcttgttaacttgttggtgaatcacgtaagagagaggttagtgtgagtgtgagtgtacgtgtatattttgcctaacttccaacaatcttggaacattctcatgtttctatttcttaatttttctaataattaaacaattagtgctttttttatatatttaacgtgatgaacgagggttttaaaaaatatatataagaaactcagaatctttatagtgagggaaaaaaaagaactaaagcaaaacacattcattaaaaatttaaaatcattactatgaaaaaataaaaaaaaatcattactatgaaaaagccacattcccactatctgtccatcacatccctacctctgaaagtctcaattaagctcttaaccattcaaagttagccacgtgtaattattgtcattactaatacgtagatgtatacaaaaaaaaaacgactatatgttattgaatgggtgtgtttataaaagtaaagctgtgttgtagttcgtcattaatattagttaattcacaaccaaattcggtctctctgttttcaacataaattggcggttaattatttactaggtaatggccatactattgtgtgagcaatctttaccttttacaattttagaagtaaagtttagatatggagttaaatccaaagttatacattaaaaatataatctaatatatatatatatacatacatatatataaaactaaaattcaaaatgataaaacaaaatctttataaatttgactataaatactaaaatttaatatatttcaaattttaatataaattttatctttatttatggaattaaatctggcatattactagaaatcagatagtcaaaaattgtttattattctgtttatttatttactataagatagatacaactactattttaagcattactattatactttttcactcattttcatcctagttaattatttttttagctaaggtaaggaaaacttgatttttctggaaagtgaatcattttatcataaataatttgtttgtgtcaatgacttgcacagaactgagaaggatgggaaacgaatcatatgaagacgccatcgaagctctcaagaagcttctcatgtaagtaaaatattgaagatattggaaacttatagaagacttttgtaaactgagagactgattacatatactagtaattgaaaattaataggatttttaaaaattgaattttatatcacaaaaatatacgagcagtgagaaggatgatctgaaggatgtagctgcggccaaggtgaagaagatcacggcggagcttcaggcagcctcgtcatcggacagcaaatcttttgatcccgtcgaacgaattaaggaaggcttcgtcaccttcaagaaggagaaatacgagtaatataaatattgtgcttttaatttttgttatagttaacatacatccactataataacataaaatcaagtcatcatttgaaacttaatgatatatattataatttctttgcaggaccaatcctgctttgtatggtgagctcgccaaaggtcaaagcccaaaggtaaaacaaaaataagaagaaaaatatataaagcagttgatgaaaaatatagttatctctatatgaatatgttagatttttcttttggactcatattatatggtcatatactatgaattgtgcagtacatggtgtttgcttgttcggactcacgagtgtgcccatcacacgtactagacttccatcctggagatgccttcgtggttcgtaatatcgccaatatggttcctccttttgacaaggtaaacactttatacactacattaatttacatcgctaatttattcttgaacattctgactcaaacagagtgtttgactttgattttgacttatgaagtcataacatggcttttctgttttttttttcctttataaaaataattacaggtcaaatatgcaggagttggagccgccattgaatacgctgtcttgcaccttaaggtcaaaatctctccctcaataatcaatatatacattcttctctctttagattgttttgtgttttttcctaaaacttgcttgactcataggatgcatgttagtttatatgtatcaatgttacttattactccggttaaggcgatgagtatatgggccttattgggccgttctgtatttagtgtgttgtgatttatgtgatgtgagtatattatccatcaatacatatgttgatgtttattgaaaatttatgaatgtaggtggaaaacattgtggtgatagggcacagtgcatgtggtggcatcaaggggcttatgtcatttcctcttgacggaaacaactctacgtaataaattttctatgtttgacatttataaactagtaaattataacaaagttgtttcacaagatttactttttaggagaaatggtaacaaagtgtttttgtgggtagttataatgatatgtttactttaattgcagtgacttcatagaggattgggtcaaaatctgtttaccagcaaagtcaaaagttttggcagaaagtgaaagttcagcatttgaagaccaatgtggccgatgcgaaagggtacgtaatactccatttattttttcagttaacactttatttattcattagaatcatagatagtcatcaaccttaacaaaaatataaatattggataattaaattatctttatcggaaatgttttctaatatgaatgtatgaatattgcaggaggcagtgaatgtgtcactagcaaacctattgacatatccatttgtgagagaaggagttgtgaaaggaacacttgctttgaagggaggctactatgactttgttaatggctcctttgagctttgggagctccagtttggaatttcccccgttcattctatatgaactaacacatcaccatcaccatcgctaccaccaccatcacaaacatcatcatcgtcgtcatcatcatgatcagcatcttcatatataaatgttttactcttatttaattgctacttgtaatggtatacatttacttgcgatgagcttcttttccttcattatccagttataaaataaataaataaatcatgtttactttcacagatatcgttttgctgaagttgctttgatttacaacacgagagaataacaaaatcgtataaattttatttatttgtcaaacgaaaatttgagaaatggaaatgttattttgctattttcattgaatgttgcgttgtactatctatattaaaaatgttaaaaccgtttgtcttgattagagatatggctactatagtatacattaagattgatactaacctcttcatttccattatacttatacatgaccaacatgtccccatgtcgataatcgaaaaccttcctttagaattagaatatatatactactatagtttcatgcattgtatataactgtctgagcaattataatcaaggaaggagtgggggacaagctttcaaagaacatattaaaaaccaaagacacagaacataaattaaactattaagaagggggacagctttgtcatagcaatttatagaattttttagggaagtgtgacaatttgacccattatattgtctgactagtattaattttgttcgtttcaagtaaactcgccagggcaatcaaggtttctgtctaatttctcgtttacatacacattagcatcgttttaactacaatcgaaatttagttgacaaaaaggtacgtagtagtatccacttaattggaaatttcttcttttcaaatttgaagattaattaagggacgtacgtctcaaagtaaaataaaaataaaaataaactatactccttctaacctaccgttatcgttcgactcttttaattttagcttatatcttgaaccaacatttaataagattatatgaacaattcacaaaagaaaatccaaaattttgcttaggaagaaattgaagaaacatttaaaacattaatcgatgcatatagagtttttaagcatatacattagagttaacccaagaaagttcacctaattaatagacttagccaatcatacactaccacatcaacaacttttaatctaagactgttgatgtattagtgtttgatcagctttgaaaataacaaaacataaacgaatactaaaataacaaaagcagaaaacacatcaaaaacagtgtccatctataaagtccatcatgttggtgagtgtgctaagctcaaactcatcctcatgaacccaaagtgaactcaagtagttacttccttgatgatcttcttgaatttcatctccgaggatattattgttatcgacaatattcgagattttcgtttcttctgatgtttcggtaggattcgggagattgatttgataaacaatatcaccattgctctgtttggttttctgatctttgattccgagtttcttactaagatgcgtgttccaatagttcttcacttgattatccgttcgacccggcactcttttagcaattaaagaccacctaattaaacacacagataaacaatataattatcatgtgaaatataatgtattgaaattttgagaataaaaacatgtgttaccaagcaagtttgtgaagacaatcacgaatatttatgattatttaacttgatacaaaatggatagaaatagctgtttttatgattaattgagtagagaaactaattttgagcaaatgaagttatacctattaccaagcaacttgtggagcctaatgataagatcctcttcttgctcggtgaaattgcctcttttcacattagggctgagataattcatccacctcaatctacaactctttccacatctctttaaacctaacacacatatacaattatttaactgaggaccttaattcataaaaataaaaacaacaaaaaggtgaccctagataaatatcctgattcaagttgcttttgcgatatatggactctattaacatagattaaaagttaaatctaaaataacatatataatatatagaaccttaactttaaaccattcgtaaaagaaaatcatgtgacaaagaattcataaattatgtcaatacgattagagagagagatagagaggaaagagaccagtctttttggcaatacgattccagtgacctttgccatgagctttgacataatccatgaggattttgtcttcttctactgtccacaaacctttcttgtactcattgtttccttcgtcaccactactacttactttctttctcattctttttgtttctttgaatgatagacgagagagatcataaaacgagagagataaagaggttcttttgagtagttatttgacggagttattaatagtagtactacaagttcagaacctagtggaatatttatgtataaagtatgaataatatttaataaacgatatactattggtataaatacaagtattaatgattatagacttattttagatattgacataaggtattgattgtgtctagcatgtgatgatgatatgtaaataataatggacttctgagatgcaagctggtaattactgatacggattagtttaatgacttaatctagatttctaactaaaacatgaaaacatggaccggttaagatggtcttgggagacacaaaaatcacgtgtatgttttaaaaagattcggctttgatcttagagcttttcggcatcgaagtttcatgtgtcagggctagtgtttatatatcttcttgaaccttgattaattgaaatgaatcataagtatttttcttttttaagagatattagaccgaaaatatcagggacaccattatagttaaacttatgaaacccaaagtgttttgagaccattgcaaaagactagatacacatcgcaaatataaaggaggttgtgaaggttcttgccgcaacccattggaaggtgagaaggatagtaactggctggctctcatagttccatcaaattttttatgtattgtttctcaactaaccattaattataatagtgttgttattttcatcaagtaatagtagttgttcgttttgaagtttagatactttatttatgagataccaagtttatatgacatcctttatcagaaaatacattgattagaaaatgaaatgcctcgtcattttttataattattttgtagagtgatacccttggaccaacgtccgggaatcttggattaaacgatttcctagagttaattttgtaaatttggttactaattaaaaaaagaaaaatgtacaataagtaattgattagtggcatgagagttaggaattgtagttaggggagatattcaattagaagatggtttgacactttgactctcttgggattaggattcttcacggggaaaaaaaaacagtgttattgttagaaagaaagagagaatagaagctccttctcttatcattaaaatttcttgatctctgtgcccccaccaaatatctttaatttacgtatagatactattactattgattattgaatttataatcacgtatattgttcatattttttttctgtcacatagcatgtgcgatggatatttgaaatttccaatctgtgttgtaagcaaatattaactttgtttgaaaaaaaagaatttattttgttgatatttttgctattgtacatcttgttttgctgacttatttattcaagattaacaaaatgattttcttttcagtaattgactatatcagtaatcttatcagcaatatgacaaacaataataataagatccataattaatattttgcatccataactaagaattagagttttctgcatacaaaattcgaatgatctatttgggcatatcacatatccaatgatacttgtacatggtttttttaaaaaaaatatttcttcctaatgaaagaaaaacagaggcaatgatattttgatatagctggcacatttaaaattctagacatattaaactcttaacgctggaagttgaggcaatatataagaggggtagtaattttatatacaacattttattgtcataactatataagaggagtgtgtatttttacatataaatgttataattaattatgtcgtagaatgtatgattgaggaatttgatggacctaagtacctaacactcatttattcacaatcttatcatttaattttgtttgattctaatatcaggtttgatattctatacatggccaaggaatttgtgattcacaagtttaccatcttttcaaaatcatgtaatgatttatgctacgaactaaatgatatatttaaatagactttatttatgttaattatataatatgataaatatagctaattcttattgatactaattatattgttgaggttctatcattaatttacgtggtgaaactgcaatttgatttgcggaaatgatcttatatcattagaaggaacaactaggacactgctcttttacatatgtgcgagttttaccaataagatattgactaactacgagacgaacattagtatttgctaatgtgtttcgctgattttctaggttttagtcgtgacgtgaaattcagtaagaagcacaacgaaatgccatcggctcatgtgtgtgaaaaaattaaaaatttatgggctgaacaattctaattgcatgatgattcgggtttaatttaggcctctggaaaatccagggcttatttccatgcaaaatcttaggtcagtattgggcccgcctttcaaaagcccaattttaattattcgtttttgttgtccgataaaaaatccagaagaagtcatctctccccttaaaaacggtagtcaaaactaaaagactcaaagtgatttccagtaagttttgtagaaaataaaataattgtggccattggagatttagcaaggctcatggaaaagtgattgttcttttttccccatgattctagttataaggccatccttgatgcatacatcaacaccatgactggtccaaaatagcataggtctaaagatgatgaagcaaatgataatcagtttattccgatagaagcaaatgaggatgtcatcaattgtggatgttatacctgattagttaagcaaaccattagcactatgtttagttagaaaagaaggaaattatgatagccataaaaatgccaacattttcccttttaaattgcattcgtggtttttgaaattttattatttaattaatttgttttctttcagttgtcatttgaatggttatcataattcggtcttatattattgatttttattattcgttaggtttttttcagttgtctgatggaaaattcagaagccaccacttacaaatcaaaagtataaaaaaagactcaaaagaagactccaaaatccaaatagtttttctccattttttttttctttttccagaaattatagttatagaaataaatagttgtggccgttggagatttgcattggccacgagtcatggaaaagtgaatgttctttttccatgattcttctagtcggtcatgcttggtgcatgtatgaacacatatttaaagttctatacaagttgttagaattcttttaaatttaatttgctttatttatttttttagttttagttttggaaaatcatggtcacacatcttgagctaccgttgttatttatatataaatgttcttaatattaaaaaattatgaaccacagggctaataaacttgaatatttgtagggtcaatggctttattaatgtgtatatttgtagaagaaagctgggaaatattctataagtaaattatcatcttatacactaattttttaaaaatccacgcctagtaataaattccaattttttttaactcagtaataaattccattttttattaaaagtttatttcatagaagtacttttttttttatgtgataaaagaaaaactgaagaaggccaatgaaaaatgaagatcccaaagacataaaaagtgacaaaagagaagaataaagaaagaccaacaacaccacttgggggaggctcccatacacaaaacgaaggcgcgaatttcaaggactcttctcgacgaccaaaccacataaaacactcttaccagaatttgtgttgtcttcgttcatttccttctcctcttcttcttcttcttcgtcgtaattttgattgtttctttgcgaaaagtcgtttttttaatcaagtctgaatcacgttttattgatctacactcgcgtgggttctccgtttcgtgcttagatcagagagctccctcccgtgattccgtaagatttctgcgtttctcattacttggtttcatttcaacgtagattctgaattttgtgtgatctagtctacacatttttttttaattctttcctctgctcctaaattccagaattcagacaacggttgcgatatttcttatgtctttttttctatcgttgttcatttcagaagtttcgatataaaaaaggttattgttggattttgagtaacacattgtcctcaattctcatcgttcttcaatcaaattttggattttgagcatcatggatgatggatctatgcattttgattttatattgtacagaaagaatgtttcttgttttgttttgatgatgttttcttatgacaacaatcttcatgtttttgtaggagctttaaggtcggaaatggcggctcatgtttctactggaaacattcataatttctatcttgcggggcaggtttacaggggacaagctttttcatggagttctgcttctactttcatggcaaatccattcaaagagccctcttggtatcacttcttttaatctttaatcccaaattttgtcccttttgtgtagcaattggcattttgaggttcatgtttctcatttatgattttgctctttgttctcatgtagaactttaactagttagacctatagtttctcatgctggactcaaacttttataatctctgtgtgcatataggtcaagtggggtatttaaggctctaaaagctgagagatgtggttgttactctcgtggtatttcccccatcagtgagacctcaaaacctatcagggctgtttcggtatcttcttcaacaaagtattatgatttcactgtgattggtagtggagtagcgggtctgcgttatgctttagaagttgcaaagcaaggaacagtcgcagtgattaccaaagatgagcctcatgagagtaacacaaactatgctcaaggtggtgttagtgctgtgttatgccctttggattctgttgaaagtcatatgcgggacactatggtcgctggtgctcatctttgtgatgaagaaaccgtaagagtaagttccctttgttgctgatcattacctcaaaactgtttgataagtgcttgtgttagtctcgtgcataagcattttgtaatggtctaaacctgtctcacttttctgtatctgaatgttctttttcaggttgtgtgtactgaagggcctgaaaggattcgtgaactgattgcaatgggagcatcatttgatcacggcgaggatggaaatttgcatttggccagagagggtggtcactcgcattgtaggatcgttcacgctgctgatatgacaggaagagagattgagagagctttacttgaagctgtacttaatgatcccaacatatctgtcttcaaacaccattttgcaatcgatctgctcacttctcaggttccacttcacacccttgaaaaacacatgtgcatatatgatcaattggcttatcagatcatatctttttgtatcttaacaggatggcttgaacacagtttgtcatggtgtggacactttgaatatcaaaactaatgaggtacacaaagatcttgtttctggtggtttgatcattcaccttatatcttagattgtaatgtaaaaaaaactcatgtttcttcaggtagtacgctttatatcgaaggtgacattgcttgcttcaggtggagctgggcatatctatccatcaaccacaaatcctctggtaacattttctatagactctctttttaacaaagctctatggaagtttcattttaccaattttatcagaagaaagaatgtgcaggatcaacacaacagttttgtgtgtttatgggaaatatccaaaaatgaaactttgattaagtaatgtgatttatcccttgaatacaaaagaaaatgtcgaaattatcacgggtatacacaaacatactgcattagagttttagatttaatagttcaaacagttgcagaaacaaagagattttagtcatagagtacatttttttgctaaattcggttgtgctagtcgcaatgatatttctctaaaagtgatatattatgctccattttaattatcgacatggtttttgtataggtggctactggagatgggatggcgatggctcatcgagctcaagctgtgatctcaaatatggagtaagtgaacaccgaaaaaccgactgaagaaacttgttgacaataaacttatgttttgtatttgtttttggttagatttgtgcagtttcatcctactgccctagccgacgaaggtcttcccatcaaactacaaactgctagggaaaacgcgttcctcatcaccgaggcggtgagaggtgatggtggcatcctctataatctaggaatggagcgattcatgcctgtttacgatgaacgagctgagcttgctccaagagacgtggttgcaagaagtattgatgaccagcttaagaaacgaaacgaaaagtatgtgttacttgacataagccataagccaagagaaaagattcttgcccatttcccgaacatagcttctgaatgtcttaaacacggtctggatatcacccgtcagcctattccggttgtccctgcagcccattacatgtgtggaggagttcgtgctggtttacaaggcgaaaccaatgtccttggattgtttgtagcaggtgaagtagcatgtacaggcctccacggggcaaatcgtcttgctagtaactcgcttttagaagctctggttttcgcgagacgggctgttcagccttcgactgagctcatgaaacgcacaagacttgatgtatgcgcatcagagaaatggacaaggcctgttgttgcgacagctagattgctaggagatgaagtaatagcaaagattatagctttgactaaagaagtgagaagagagcttcaggaggtaatgtggaagtatgttggtattgtcagatcgacaattcggctcaccactgctgagaggaaaatcgcagagctagaagcaaaatgggaaacatttttgtttgaacatggatgggaacaaacagtggtagctcttgaagcttgtgagatgagaaacttgttctgttgcgctaagcttgtggtgagcagcgcgttagctagacatgaaagcagaggtcttcattacatgacagactttccttttgtggaagaaagcaagcggattccgacgattattctaccgtcttctcctacaacagctagttggagctcaaggcggttacagaatataagtagcagctcacttattgattgctaaaactgcaggagtttttgttcttatttgaatccaaacctctctgattattgtatcaatttgaaaaaatttggatctcaaaaggaatctctgattctgacactctgtaatacaaaaggaaataaattattcatttgagatatcaatcatattggtaattcatatttcaattcctttgttatggtttattgatgactttctgaatgaaagaaacaactgtgagtgtggatttcccaagcaagaagcaggattgagaacagtcttgtgttcactgactccatatcctcggttccttttttttctgagtaaatcattccaaaagcttctatccttctcctgaggaaatcacgagctccaagctcgggtatggcttccatgaccagaccaaacatgaattcattcttcctgtcttcttcaactagaccagggtgtgatctgagaaggctgcacaaaggcacatccattaataatcagagatctcttctgcaatgtcgctttagaacagcctagttactagttacatccagaaaccagctagatcataagtcttgcctgctctgcagctgccatcgccgttctgctacaatgaaattcaaagggtattttcaggagatagttttggctcgtgcaatttgatttaacaaagaataaagatatcctgaattacaatgtgaagaagtactatggtgcaccataatcttaccagcactaacccaattgcggaatcacagattcacaattgcttaggtgtcctgtttggagccaaatctgctactgtagtatatatctgagaaaatgaaacatttgagtaaagttgcaactgaaaataggaggagactagtattggaaggatgaaacagaattaccacgttcacgaatttgaggaacgagcattctttttcttgtaacactcctttaagaatctttcagcatcaaccttcattccaggtttagaaaaggcagcacttatccagtaaatagtttgattacacggaatatatcccttttcttcaaccatctcttttagcaacccttttgcctctgctaagtacattgcttttttattccactcaacgtctggatgagtgcaaagtttgcacaaaccagatatcatggtacaataagtcgaagtattggggctcactcctctcttacccatctctttcaatagctctctcgcctgaagcatcttcccaacgttagcaaattcactaataagcacattataagtgctggttttcggtaccaacccatccgcaatcatctcacaatatatcgtcatacttcctttcatattccctatcttagcttgaccagagattaaagcattgtatgtaaaatcgtcagggcgcatacctctactcttcatctcactcagccatttgtccacttcctttattagcccagcatcagaaagacctcttattatagtattataggttgcaacatttggggatattcctgcttccatcatcacagaatatgtcgaaagagcttttcttacatgactgcctacaaagtacccgtgcataagggaattgaacgtcacagtatcaggaataaagcctctcgcttccatatcccccataaccatagctgcctttttcgtcatacctagtttgcacagagttgcaataagagtgttataaacttgccgactgagtttaatcccataactcaatagcgtctcatgcgttttgaatatagcatcagctcttttatgcttcgaagacgtgtcaagaaaaatccggtatgtcgttaagttaggatggatctccataagcatcatttgattcaatatgtgaattgcttcctccattttaccgttttcgcatagcattccaaccacaatattgcaactcatcagactcggttttattccacaactcttcatcttatcccaaagcttaaggataccttccgaatccccttgctttctttgtgaattcatcattatgttaaatgtagcaatatctggttctatacccttctctctcattcctttgtaggcccagtctgctccgactttgccaaactttaacatcccactgattaagacattataagaaacaacatcccacggcatccctctctcttgcatttcttcagcccaagcaagagcagcttcttcgtctcctcctttgaagaatacatcaattaaagatgtgtagttaatctgatccagcgtcactcctttagataccatgtctttgactaatcccttaacttccttaatcctaccaattctcttcaagtggttcaccagagcatcaagtatgtagttgttttcctccaccccaatcagcctcatttccttactcagttcaattgccatttcttctttccctgccttaaacaagccatcaattactgtaccataagtaaaaccattcggcacaacattttggtcctccatttttctcaaaagactaacagcttcttcgagcatccctttcttcacatagccgtttatcatactagagtatgttacaacattcggaataacacttttctctaacatctgcgttatgataaattctgcactgcttaaatcccccgctttgcacaacccatcaaccaaagccgtatatgtaaccacatttggaacttggttatcttccaaaagcatcttaaatgttttctcagcctccctaaggtccccagccttaaacagaccatccatcaaaacagtatatacaactaaatctacaggtatcccacgcacaaccatctgactgtaaagagccaaagcatggcggtaaatatttgctttaaataacgaatcaacaagagtagtataagttacatggttcggatatacactcatctcctccatttcccgcagtaacaatcccccttccagcacttttccacctttgcacaatcggttaataatcgaactaaaagtaacaacatccggatcaaacccactcataaccatatccctgtatgcttcttcaatagcatggagattgtagtaggagcttaagagtatagtatgagtgataaggtttagttccgagatttcgtcaactaaagccttagctctaacaaagtttccaactttacaaaacccatcaatcagagtattgtagctaaccgtatcaggcaatatacccatcttcaccatctcagatagaaactgataagcctcatcagctaaaccatgttcacataaacccgaaatcacagtgttataagtaacagtatcgatgctgattactctatttctaagtaaactaattgcaaaactcaaacgacccactttgcaaaaagaatgaatcaatacattgagagcaaaaacatcgggagacactccacaagctatcatcttgctgtaaatcagcgatacctgatcgtgtaccaaaccattgacattgaattgatgaatcagactgttccatagacgcgaatccggaacaaccccgaaagtgcacatcgcagagagcgtccttgctgctccgtagagtctctcacagcttaaatagagccgaaagagagtatggaagagagagacgtaaactctagtcttgataggagctaaatctgggtcgaatcttcgttgtgtgatcgagaggctagtctcttcgctttctgggatttggggtcgtttgattgacgagaaagagcggcaatttgagaggaagaatctgtatttacccttatagttattccaaatccttatcattatcatcagcagatagattggagttcatctaaatctccaaatttctccagagactcctgcaagctctcatggcgtctgcttgtgacgacgcatcgttttccaggtgaactgagaaaaagagtttcgaagctcgacgacgaggtttaagttcggtaataccacgtcgttttaaaagactcaataataacggccctaaatacatgggctgtttttgggctatatctaaaataagcccaacatattaacgtttaaacatatttcatacatttcggagataagatttcggaaaaatctatttcacgacgctatttcggagatagattaataatgggttaagttgcaaattactcacttttctaaatttaatttgaaaagtagtcactttactattcataatttgcaaaatagtcacttttcactgtttgattcgtacacttagattgtacaccatttttagtgtacagatgtatataaaaaatacacagcgtacactttacatttgtacactaaaagtgatgtaatccaagtgtacgaatcaaacagtgaaaagtgactactttgcaaattatgaatagtaaagtgactactttcctaattaagtttgaaaaagtgactattttgccaatacacccattaataataatgcgatgctatttcacgacgtacttatccaaaacatataacgttaacaaacaactaaagggaccactatcattattgcattttagatgttagtataaattgaattattattatatttgttggaaatttatgtaaatacatatgtatttaatatttatcacctgttagaaaatatgttaaaaaaggatttgatttattttttgttgaagaagaaacatgatttctaaaatatttggaaatctttgattctggtttatacactttgtatcaatggaaatttggtaaaattggatttgtcagtgtgaaaatatcatggagaggaatcaattaaaaaggaaaagaaccttaccaaaaagaaagaaagtaaaagaatataactaaatagacattacagtcagcttttctaaacaaggaaaggatagacttatacatgaattagtaactatttccttagaattcaaggattttttttgtctaacagtacttgtcaagtaacataagtacgataattaaagtctaacgatgatgtctatggagccgtcttacacgtggcacagctattctggtccgaagaaaaggatgatttggtgcaggtgcgtgaacatttcgtcctatataaatcctctcatctccaattactgatttcacacaaaacaaaaatcgaccaaagagtaaccaaattgatatttatctcttctcaaccatggcgatgagacaagccgctaaggcaacgatcagggcctgttcttcctcttcttcttcgggttacttcgctcgacgtcagtttaatgtaataattctttcgatctctctcctttttcacgattaaggttctaagttggtgatatttatagtttctcagagttttgtgtggtgatttcgcttgattttactgtttgcggttggtaacgtttccgattgtgtgtgggatagatgtttttggatctttggccttatgattttgaggatatgcaaattttggttttgtagaacctattttgattttgttgtgatatgatcagactgactgtgcatgactgaaacgtgtgactaaaattaggaaagcacaactgtcgtttctgattaggccagctaaagtttccataatggaacccaactactacatggtgtctctttttgtaataactaaacggcacgatgtttgatatgggcttctaaacgggcctgtaaacgtttgggcgttgtatatagtttcaaaacagaacagattagtgtcttactgtaagatgttgtctctttcagtgtaatgggaagacgcactttttgatgatttttcagagttttaggtagttcttacatgcgtcggatcttttcttgttcttatatatgtattcatgtttctttgaatcgggtatatgttaaaatttaaatagccttttgaacttgcttatgaaacaggcatcttctggtgatagcaaaaagattgtaggagttttctacaaggccaacgaatacgctaccaagaaccctaacttccttggctgcgtcgagaatgccttaggaatccgtgactggcttgaatcccaaggacatcagtacatcgtcactgatgacaaggaaggccctgattgcggtaagtattttccaatctaacaagtacttgaagagattcaaaatctttaattctgtttttctatagcacaaactataaatatgaatgcaagcctccttttgattcaactcttatttattaatggcagaacttgagaaacatatcccggatcttcacgtcctaatctccactcccttccacccggcgtatgtaactgctgaaagaatcaagaaagccaaaaacttgaagcttctcctcacagctggtattggctcggatcatattgatctccaggcagctgcagctgctggcctgacggttgctgaagtcacgggaagcaacgtggtctcagtggcagaagatgagctcatgagaatcttaatcctcatgcgcaacttcgtaccagggtacaaccaggtcgtcaaaggcgagtggaacgtcgcgggcattgcgtacagagcttatgatcttgaagggaagacgataggaaccgtgggagctggaagaatcggaaagcttttgctgcagcggttgaaaccattcgggtgtaacttgttgtaccatgacaggcttcagatggcaccagagctggagaaagagactggagctaagttcgttgaggatctgaatgaaatgctccctaaatgtgacgttatagtcatcaacatgcctctcacggagaagacaaggtaccacagctactatcagaaacaaaaagagacgaacactaactagattttgtttctgagatttgaccaatgggttcttgtttattcagaggaatgttcaacaaagagttgatagggaaattgaagaaaggcgttttgatagtgaacaacgcaagaggagccatcatggagaggcaagcagtggtggatgcggtggagagtggacacattggagggtacagcggagacgtttgggacccacagccagctcctaaggaccatccatggcgttacatgcctaaccaggctatgacccctcatacctccggcaccaccattgacgctcaggttatattgttttccttgaaccgttacacatatcatatgcataaatttctctggaaacttttgctaacgaatgaaaaggtgttgttttatccaaaaagtaatgttggaaatttggaactaaaacattttgtgtgatcaaaatttgtagctacggtatgcggcggggacgaaagacatgttggagagatacttcaagggagaagacttccctactgagaattacatcgtcaaggacggtgaacttgctcctcagtaccggtaagcttttgaggaggtgacattgggaagatgatgagaaacgaccccaacgttcaagaaaacaaataaagaagtatttggactttgctaagtcgaatgacttgagtcatcttttggtttagtttttgttattatataagcacaataataataggagggcacttcccctgttctgagagtttgtgaacatattactcagtggtttaaatcacacatatgtatttgtttccccaatcgtaggaactcaatggtttcaaatctcattatataaacataaaaatgaataaaggcatattaaatttgtctaaagaaaagtgttcttgttattaggacctagctctatcagattttgatgcacacaccgacaatggtgtaactacaacattacgacaatatttgaatcattgtatggaacgtgggtccatatttgtatcaatatttaagttcttaacaactatatcaattatgaatcccatattattatatgcgtatttaaaactataggtctataatataaagaaaactgttttcatattttctcaagatgggagaagcgggtgtggggatgctaatcattcgatttgtaatttgatcaaacagtggttagagattcagatatgttgacagccaacttcttgcctttttccaaatctgccccttcccccacactgcattatctcacgtgtatggtttttcctcatcatgttttataagtttttgattcacaacacaagcggaatgatgaaattttgataaaagatatgcatagcatagttatgaaagaaaactaactaaaaatgttaagaataaccattatatatgtagagtcccattatattagagtcttgaacatagcttgtgatttccccattcattatatagtatggctgattacaacatacgaaagattaacatatgttatgttatgtaaagattaacatagtaaagatacgcataatcgcaacgttatttcgttttgaatatatcaccttatgcaacctgctactaccaaatattattattactagattttaacctgcggtataccgcgggacaatttttttttttataagtaatatatattaaaacttgcaaattttatttttataaaatattgatattttacagtttataattgttattaagtaacgttataccacgaatccatgagacaattgttaaaaaactgaagttttaacccctattaaaacatcatattaataatattttaatattttataaatattgattcaaatacatccaccatataacccaattccaaaataaaacccgttctttaatttctttatccgtctcgttatttttttttcaaagtagtaatttttaaattttaagaattattttttatatataaaagttttgcaaattgtatcattctctaatatatttaaattttatagtttaattttatatatagtaacattatacataccacataacatttttggttttatataatcttttctaaattagaatgatttgatatgtttaatattagtgatcttaaaagataacaaattaaagatttaactcgtattgaaatggtggattaattatattttacttttttattaatgttgattcaaaaacccgtcccttcaaatccgtcttgccaaaaagcaatttattttattaatattaattttattaatgatatgactctgaattataatctaaatattttagctaataacatagaagtgcaccatatttatttaataggagaatgtaccatatgacccgaatgcacttttaccccaatccaccaaaaaaacaaatatattagttagcttaaattagttaaagaatacaaattgaaaaagtatattacactttattcgaatatagtatcaaaacttatataacacagagatttgataattttttaattgttgaatactttttttttgctaatttttatgtgattaagatttaattaatttcgtatataaaatcttaaattgttttacgaacttatttgtttataatttggtaaaagatagatattagaatattcagtatattttgcttcagtttaggaaatgtttgatgacccgtctttagatccaataagccctataatctagatattaacctgcagtataccgcaggtaggcttatattttagttaaactaaaaacctttattgtaaagatgatttaaaaatatatgatattattttatttgattttaaatgtatagtaaactgtgagttgtatatgttttgttgatattatctatattgtttagtatttaagattatacacttgtagtttgattgttaatttaagagtttcacctgtagtataccatcttgtattaatatcgatctaaacccgtcaattttatgattttccagcttgttaaaaattgaatcacatcatacacataaaaaatctaatatgttattgtagtatataagattataaattttcaatataatatgtatgaaattgaatataaatatttcaaattgtgacctgttactcagtagaaagttttcttaaatctattttcacccgttataatattttttcatgtattgaacagtttatattcgtttttaaaaattcaaattatggcatatgcgaaaaaactctaattttttttataatgatgatattattttttcgcaaaaatagaatcatataaagatgagaagtgaactataataattaataaaaaattaatataataatttagatatcaaatctaatttgttaattttaattgtttacttttttggaaattaataatgtatttcgtttttctaattaaataaattaattaaaatttagatatcaaatcttatatgttgattggttattgtttttggaaattaaaaatgtatttcgttttttaattaaatttaattaattaaattagtatttgactttttaatccttaaacagataaattaatttactctttaaaattttatttctaatggcatacttatgtaattatttacaaaaagtaaggttacatttaaattgtatttcccaaataatatagtaggattatttttctttttaatacattgttataaaccttaaagttaatcttaaaattaatcattaattgtcacaaatcaaaactcgatcttacaaatgattcaagttaattactattatacggatctgaccaaatttgaattcaaccattcttttatgctgaagtacgatatggatttaaagctcttagacctaccatgcatttctgtgtatccataaattgtagacatttaaagtcaatcttatcaacatttccaaaaaatatttgtaaaagatctcaagaaacaaatgtagatctctgaagaaaattcatttccaaaaaacatgatactaaattacaacaacagttgatgaggatgtttttggcgctggggggtcataatcaaaaatcaaatcataggactttatgtcaaataaacataataatcgctaaaaatgaaatatatagtaacaaaaagttatagttttggaaataatatatttagtcaagaggatatttttgggaataatgtgaacaagagagaaagaaatattttttttaaaaaacattaatttcaaccgcgaggcacagtatcgcatatggtaactagaaaccgacaaataaaatcctgtgcgtatgggtcccacatatattatacgacgccgtttcaaaatcacaccatacgaaatacgacgtcgtttggaaaccacaccatatgaatacgactcgtgaaagtgcatcaaatcgcatcgcctgtttttataatttctcgtcttgtacaaaataaaagactctctctctcttaaaatttctctttcgattctctcgcatttcaaaatttcatttccttatatagactcttaaggccggcgatttctgtgagtccatagattttcgctactccgccgtcagtttttctcaactccggaggctgtgtttttgccaccgctttgattcgccggtaaatttctctagctccatttttgaatacgcatttgcaagtttgaactggtttcgataatcatttgatctctataatttgagaattagtcagccggtggaaagtatatgaatcggaaatggaatcgcgaggattttgttttggaaattaattgagatcttctcagagttcttgagtgagatcgtgtttttgttgttattgttaaatcgcttgaaattcgaattggaaatgtagatctatgctatgtctcgttttgtgctgttgaattggtcccgttttgatcttattcaacagtctgtgaagttgacaagtagagttttacttccctattgatggcattttactattgttcttgtttttgagattcttgtgtgtttatcccgaaattgagaaaatatttgagtgtacgaagagactaaagagctgatcttaaggctaaagtgtcttattatttgagttttggtttgtaattgtatacacatgaatctacaaagcttgaatcagccttctttatatttctgtttgtgggtggagtttcttagctgattcaagctttgtggaacttaaagatctgtttgcaatttctaaagatctattgctatgtgatgaccgatgagcttgaaacggatttaagtttctcattttagtcttactgtaacagtttcacgaaaactcagtatcctttgagcttttatggaagtaaattcgagaacgtgttagatatgtagagttggttatgattctggtctacattgttataagttagatttcttcctgcagtgtgcttgaccttgcactggttaattattatatccatggtattctctaccacggtctgtatttagttttgatgatgatttttttttctcctgtttttatgcaggtaagttcacgtatggccagtaatactttgaaagagatgaatagtcttcatgtaactgagaagataagtgactgtaaagctagcttgaccaagccatgtgttggtaaaatgaatggaaaatctgaagatagaccattaccaaactctgcctccttggattccagtgattctaaagttgtagaagcagagaaacccgagccagagatagctattgtggaagttgaatatattgaatctgaaaacttggataatgtagacgatgctgatgcagttctgaaggtatgtgcttctgtcttgtgattacatcaattcccattagtatcataactgtgatgaatttgttgtatctgtctattttagagatttggaactacattgtttacgccattaagaatctgtttggtcttattgtttcagtctgttttagctggactagagtccaaggactggatttcactctgtgatgctcttaataacgttcgccgactttcgatattccacaaggaagaaatgatgcatatgctgtaagctttgttctctatgctgatgtttctaaataattgtctcttaaagtagattggaaaatgcaagtctcaccatatcccattaacagtgaaaaagtgataccacttgtcgtgaaatcactgaaaaatccaagaagtgcggtgtgtaaaacggcatgcatgacatctgcagatatcttcagtgcatataataatcatataacagatctgttggagcctctggtaacttttctatctttgctatattctttcactgtttactgcgaactttacttgttcttacagcttttcatacactttatgctttcagcttactcaactactcctcaagtcttcccaagacaaacggtttgtttgcgaggcagcagagaaagctttaacagcaatgaccaaatatgtttccccaaccttgctgttaccaaagctgcaaccttgtctcaaaaacaggaatcctcggatccgtgccaaagcatcattatgcttttctcgaagtgttcctcgactggtaatacaagttcaacttcatatatatctctcacaaaggcatcgcatgtcatgtaaaaatttcaacaataccttgcgttataatacatattccagggcgttgaagggattaaagaatatggaatcgacaaattagttcaagcagccgcatctcagcttagcgatcagctccctgaatcccgtgaggctgcacggactgtcctactagaacttcagagcgtatatgaaaaagctcatcctctcatcaaccctgagacatcatcaccagaagaacagcaaatcccggaggtagagccaattacttgggaaactttctgcaagtcaaaactgtcggctcttagcgcacaagccgtgcttcgtgtcaccaatgttgtcactgttactgctcgggagggtttggttactacaggttcatcatcttcatcccagttataaacattttctactacaaattttttaaaaaccgtttgctacgagtcatacggtttacatggtattctccggcatggcggcatgatctaccaaattggcaaattatggaccgataaaaagagtgaacgttcgtgtatgaaaaatcttggcttctttctgggttattttctttttgtggattctcatctgtcttcactaccagtacttgtttctttttcttatgtgtatatattctataccaagatttggtaagatagtcatgagtcttttggttatatgcaaaattggtcggattctttgaagattcagtgatcattaaatagatagccagtctatgcttcttcctcgttgaagtttctctagattaagctttgactcatagtaaaagattctttaatttagtcgattttttttagaatcagaatcacgtccgaggcttggcttattggtcagatattgaacccaaaactgaaagtgatttttattagattaagaattatagaaaagtatctgagttctgtctgaactaatacatcatagtctagataaataatcttcacctctaccatcgaagacaagtgggataaaactctcgcctaaaaacaagcaatgccataaggcccataacccttattttgattaatctgtgaggtgaaacaatagcagcaactacatatgtatcatttagctctgtgagagctcgcggcttcgtttagctgcagcaacaactgcattcataagtgttgcccggaaagagcctttctctagttcatgaactccggctattgtagtgccgccaggtgaggtaacatcatctttcaacacacctggatgcttcccagttttgctaaccatcgttgcagctccaagaacctgtaataggaaacaaaaaacctcaaagcttagggttctctttctagtttcggtattcaataccataataaagcagattaaagaagcgatgtagatgttcactgacggtctgtgaagctaaactcaatgcaagctctcggggtaaaccagcagctactcctccatcggctaaagcttcaattgctaaaaatatgtatgctggtccacttccactgtaaaaagtttgaaattttcttgattagtgacttgaacaactcaagcatttcagcagctacagtgttttcctgtacctgagaccagtgacagcatcaaacattttctcatcagctttcaatatcttccccaccgcgccaaacaacatagcaacaattgctccatcctcttccgttgctcctgtgccaaggctcataactatatacacacaacataattggcaaatgtaagcatttgacagcttcagagagaaacagaaatcacaaacaaaattcagaaatatcacaaatgcgaacactctgataaactatacctgaagctgcctcaccaacagcggcaggtgtattaggcatcacccttatgaatcgatcttgaccagaccattcctaaaaacaaaaaggagagacctttatgttttttaaccaaattgagctctagaaactcacaatgcaacaccatggatagtgacaacttaaatggcaaatgtataggagtataaatgatgcaaaacctgtaaatcattcaacttgattccagctgcaacagaaaccagaatcttattctttgaaagcttcgactttaattctgtgacagccttcttaactacatcatatgaaaggtacaactttaagtcaacacaaaattacattgatgaatcaatcatataatcaatggataggtaagaaatatatataccaacttgaggtttcacagagaatatgacaacatcgctttctttaacaacctgtcatttttttgaagatcgtcaatctcaatttagttcatcaccacaacaacaacaacaagacattgaaaaagaacttacttcttcgctagtggagaagacattgacgccaaaggattcgaagacatcacggcgattgagatttgagtgaacggcggtgcatatacgattaggaggaagcacaccggaagcaaccacacctctagctatactctccgccattttaccagctccgatgaatcctaccttgaaactctccgccggaatcggaagaatctccatcgggaaaatttaacgggccggctggcgagatacttcggacgggtgagctgacgagctgcttgagacgggcgagctgatgagctacttgagacggaccggctgacgagatgcttcagacgggtgatctgacgagctgcttgagacgggccggctggcgagatacttcagacgggtgagctgacgagctgctctttgtctctaagtgtcctcgcggcctccccctttgacaagacatgctattccgtatttatagccttctgcgcgtgtagggcattcatcgagggatttgacgaaactacccttcgccttaatactccttggtttggaacttattttgggcttttgacttgggtttgggcattgggccaagtaggcccaatccgacccctaacagttgccccccaatcctgatgcatcgttgatgacgtggatcaggatttcaggtgcacgaaactcaatcgaaggaagtgaaaagtcgcgcatggggaagacgcaatgtttggtttgtctttcatgattctcaaggttcgaggatcgaaacgtcgcgtggctatcaaagtataggctgctattacggcaatgtgctgtctcggtgatagtcaagcgagacgacaaggaaggttaaaagggtcgcctcggctgttgcgtgaccgtcgcatttctgaagagcctcctggatcaaagtggtcgtctggtgttcgagttgggatgttcgagtcattcgaaagtggttctttgagggggagagggaagagacgagggtcgttaatcgtgatgaacaacgagctagcgttccgaactcgtccgatgcgttttgcgtgccaatgatcattattggagttatcgtttcgtttgaaggaggcgttccttttgctttgaactctggtgatgttaagcaaagcacgtgttgtgagctggcgagctggcaatgtgaagtcagggatgttaagcaaagcacgtgttgtgagctggcgagctggcaatgtgaagtcagggatgttaagcaaagcacgtgtgttgtgagctggcgagctggcaatgcaaatggacgttaacggcgatcgttattaacgtggttaacgtttactttctttacctttttgtataagagcaacatgttatgctcatgctttcattatcgaataatctggttgtaatctctctctagagacttctagatttccctcatcgttttaccggagctctcgtcgagtctcttgtaggtgagaagttgatatcgcgtctctttacgaacgttgtatcaagtgtgttaatcggagtactttgttttcatctctctgttctattgatttcaaactctgtctattcatttctggtttacgttaacactggtatcagagccaagcgtttcctcggaatcaatggcagaaactcgttcgcagatgttttatcgggaggtttcagctattcacgaaactatgtatccgtcattgaaagtggtttgtggtcacaaatctgatgtgcgttccggcaaagcggcgacgacgaatcagcaatttggtgttcaatcctcaccgtgcatcggagaatcaatgttggatacgagagcttacaacattggaagatcctcacagctgatatctacagctccgatcgtcactcctgacaccagcaaagagagagtcggtatgtcgaacaaatattttccattggaagagagatctgattttgcgagacttgagcatctcagatttaatggtgatagaattacagaatggttgttccagattgaacaatttttcttaattgatcgtactccggaggaattgaaagttggtttcgcttcactccatttcgatgacactgctgcgactttgcaccaatcaattgtacaatcgatgtggtggaagcatgttaggcatgattggtggagttacaaactgttgttgcaagtgagatatgatgagcatgttaatgactcgattgcaaaactgacacagttgcaggagactgaaggaatagaggagtatcatgctcgatttgagttgattagcactagattgaacttcgctgaagattacttggttagtgtttacttggcaggtttgagaactgatactcaactgaatgttaggatgtttggacctcagacaattcaacaatgtttaatgttgggaagattatatgagatggctcacccaaagagtgtgcttatcagaaaagagagtgatgattatcagaaagaagctcaacatgtttcaagtaatgctgcaggaacttctatgattaatgatggtaattgcatgataggtaatgatggagatcgattccttagtggttcagacttggtagagaatgcggttgcgacggtgaagaaatatttggttgaaattgatgatgctgtgtctagtgatgatgatcaaaattcggatgctggggacgtatttggattcaacatagaagagtgtgaaacagattcatggattgaacataagccgttgattcaagatcaagccgcgtttcactccatagacatagaaggtgtctcacaacttcagaaggttcgttcaaaccttaaggattttgataaagttgatgcaacaatgaatcaaatgctgtcatcaattggatttgttgttgatgaattacactctagttgtggaagtgctaccgtccatgtccagaagaagcctagtaagtctctcaaatcctggaagttcaaatttaaaaccagctcacaagaccaaggggatcatgaatcacttccaatagggttacatatcagattcaagtcctggaaatttaagttcgtgaatagaaatttacaaatgatgagagaacatggatatacaacacactttcagctaatgtctgataagagagaacatcaagagatgttcattgtggccaggattgttgatgtgagatgtttgcttagcatgatacttgggataacagagagtgatgcaggtcatggagaacaatttgtgtatgatcggattacaatggtaaagaggctgctgttgcaaaccagtttagtcattcaagaagtgatgagaaacaaaaagatcaagtttaccaaacggtggtggttcaagtataaatttggggaagagggtttcacgagactgaattctttcaatttgcgtatgacttatcattttgcggtttggcattgttggaagagcaagaccatggtgcatgttgaaatgagtggtgatcactggtcttggatggtcttagtcatgaaatctacaacatctagctttttgtcacttctctatgatcgaagaatgggagatccaagcagacatgaaacgggtcgggagattgtgtcacttcagggtcaaattcacactggttctcctatgattcagtgcataaagatgagcttcagcattctccttcttcagggtctgtttcagagtttgacaatgaagatgctcacatatatgcacttgtttggtagcaaaagttgtgtttcaactttgggagtgaggaaattaggcaaagattggtggtttaaatacaagacagatgcaagggctacagatttactgacaaatccgtagaaagagtaactacgaattagacaacagaggatgatgaagttgtcacaagcttggcgattcaaggtttaggacttggtaaaaggaaagctatgattcatgttgatttatgtggaagaggctacatggagttactctataaactggcaaagatgtttccatgaaccttgaggtcaaggttctctgaagaggggagatttgttataggaaaactgaagtcaagctatagcgttcaggggtcaagctggcgagctggaaatatgaagtcagggatgttaagcaaagcacgtgttgtgagatcaaaggtatagcttgactttgtagcggaacctccaactccacctctttcccctttccgtcaccctcctgcgaccttgtagtcaccatgttttccgaggaactacagagctctgatacctttgatacagagaactttcaggcgacctcgatcccattatcgctaaaggttgtgattcttcattgagtatcttggaatttaagaattcaaaaaaatatgaccctctcatataaaatggtgtgtgtgggtctgttgtgtaatgaaaacatctacgtttcatcttccttttgttaaactttgttttgtattcaaatgatttgcagacggtttaagctctgttttaagctattatctcggcctacttgcatttcttcactttctcagtgaaagaatgattaatttttttcattagagtgcacaattgttaattaatattttcttgttatagaagcaaattacaaaaaagctatctgacagattccaatgtgatcagttcagtccaagctgtgctagtgaagtcatattcttgattcaagtaagagttgtggctcgaaaaccaaccatttgcagataagctttctccgagtgagtgagttgaatgatccagttacccgcccccaagttatcaatcttccatgaatctctgtttgcatctccttctagtcatctgagcccatctcgcaaagatctctgctgcagcaaacttacctgagaacttagctctctgtgccaattcctcaaatatctccggttgtccccctctgtggaaatcagctgcaaacttgttataatcaatcaaaggggttttcattcctttgtcaagcatctcctccaagtatctgcatgcctctctcgacttcccttcacttataagccctctgatcaaaaccgtgtaggagttatcgtcaggacaaatccctttcttgatcatctcgtcccaaactgctctccccatctcatagtttctcgccacgaagtaagatttcattatcatgttgaacgtgtgtatcgatggctcaatttcgttctggatcatcttgttgtagatccttgtgccatgttccggcattttctggttcgccatcagtttgatcaacgcattatacgttttgccatccggagggtgtcccttttcttgcatctccttgagcagttcgtaaacagtatccagcttcttctgagtcccaaaccccgtgatcagacacgtgtaaaccgcagcatcaggttgcaacccggaatcaaccatgtcatcaaagtactcaatggcagtttccatgctcgactgtttgcagaagtcccggatcatgatggtatagctacggacattagggcaaggtcccttggatttcataacatggaacaatttgatcgcatctgattttttcatactcctcaacaacccttcaagcattacgttgtgagctacaatgtcaggtttcaatccgtgatcaatcatatcattccagattctagctgcttctatcaagttcctcaccctgcaccaaccattgagtagaacagtgtaagtcatcatattaggtgtaaacctctccttcagcttatcaaacagaacctgagcttcttttccaagcttagccctgccaagactatcaagcaagcaattaatggtttcaacaccaatcttaaacttgtacttcttcatcaactcaaagataccaacagctttcttcctctctttcgcagcagcgaaagctttcatcgcgatagtgaatgtctccatcgtcaatagacctttcgtacccatctcttcgagtaccgaaaccatcgtctcgaactgtctagtctttgctaaaatactcatcatggagttatatgttcttgagtcatgagcaaatccttgtctctctgcagcccaacagaagaacctaaatgcaggcttcctagcatgtcgaaaacgttctaaaacctcaacgatgagatcatgtgataaatctagtttcatttcatcaagaacagcttccatatttctatctaacgcaaacaattcatcaatcactttgcagactctctctacttcttccggattagtacttgattcaacacaactgaccccagtttcttcatcattatcgcattcagattcaacttcttcatcacatccatcactaacattagaactaccactagagaaacctctacacccaagactcgcatcaagcagttgtacagagtgtggcaatggaatttgacggtaaggatgataagtagaagaatgaatcatacgagagaagagagcaccggaaaatcgtacttcctcttctcctctcccgccgattacgcggctttgactggaaatgaattcatcggcatcgaatgaagaagagcaaatgaggaatcttcttaatgaagtctgagtggagcttcttctcctagagagatagagccatggagcagcagccatggaagctcgacggcgattagcaatggcgaagtcggtgaaaagccactgatttacggcggagagctcttcacgtatttgggcctttgtttgattagaagctttgagtgataataattttgacccattaaaggcccattgatctggtcacatataaccattgggtccaccaggagcattaaagctcaaacgcatataaacgagctggcgagctggcaatatgaagtcggatgttaggcaaagtacttgtgagctggcgagctggggagctggcaatgcaaatggacgttaacggcgatcgttattaacgtggttaacgtttactttctttacctttttgtataagagcaacatgttatgctcatgctttcatcatcgaataatctgtaatcttcagaattctctagaacctttgtaagtgctagatttctctcacatcgagagctagctgaatcatttggtgttttatgaacatcgattgattgtttggtttcgaatgataattggagatttggattgttcttgtgaatcgcaggtttccctgtaacacactcgtctggatgaggtcgaacaaacgattagggcattggacattcgttcggaggattgggagaaagctggtctgcaactagtgtggcccattacttccattcttcatgagattaccctcttttaaatggaagttttcccttcacacgacctcaggttccgcttatggcgatctcgattgtcgacctaaatcttctggcgagctcatgacttagttcaatcgaattctcgattttattcacgttatcctcgggaaatcattttccgccgcttgcaagaagaatcaaaggtagctctcgctctctcctctgcgaattattttgtactctcgattctttatcgatttttccggcaatgggtaaggttgttcttgtctctccgtcctcttcttcctccgagagcgaagcgtcattagttcgccgaaactctcggttaaccgggaatccaagtgacgaagctcagtctagtcgatctaaccggatcgagatcccgacgttgcttgatgagcccgatcgggaaggttccggtggacatctcgctgctcctgaagatccggcggatttcttggctcagttcgacccgctcatcgacctggaggatgcttataacacgcagccacagtatacagaggccgaagttaatgcgaattacttcatgaggatcatgtcgaatttgacgtcgactcagtggttagctggaacaccgagatcgccgcgaaaaagaccctttcaacaactgagtcagtcgcggaagtatttgccttgtgtggctccggagatcgcccgctcacttacatgattcccggagaaaatgagcgtccgtggaatccccctcgagggtacgtctgcatgtatgaagcctacttcagacaatgtcacctctggtttcccattccgtctctgatcatctcctttctgaatcgtcgtcgtatggcgttctcccagcttactccggcggcgatctgtagttttgttgccgctctgaccttcggtgctgaagaaggttacctggtaaacgtccgttgtttcgaagaaatgacgacgttgaaagctataaggtcgcccggctattggctggtgaacaaccgcccaaagcataactttcttcccggggaggaaaaggatgtggacggagtttcctggtagatttcttttaaatagatagggtaaagatatgtcgatcccaactagattctcatagctttttcttttgttgcagatcgatacaggcctagtccggattttcattgctgatggggacttcattcccaggacgccttctctattctaccttgggccggctgctactgatgctgataccacggagtgtcagaacttcgtcaaccaaggattgctttggtttgtgttttcgatatcgggatgttttttaagtatttcgttgcttggatttctcaggtcggatttctgcatcaggatcaatgccgcgagctgcagtactttcgaaccaagaaacgaagagtggacttttgtctcgaggagctcgaaactctgattgctaagctgaagaagaaaagaagaagggtcgtcactcgtctggatgaggtcgaacaaacgattagggcattggacattcgttcggaggattgggagaaagctggtctgcaactagtgtggcccatgcaagatcgccttcttctggataatcgcagtttctgacagggcgatctaacgttcgaataaacgcccttgtgatagctggcgaccttgtttaactctaatttattctggaataaatgtctttgtaatagctcccgatctcgtttggtcgttgattaatacaatgcgattttattaaattggcttatttcctccgcgaccactgaggtcggcttttgagttcttttcgaacgcaattttttctaattggattagatgttaggtgcgagactgagcccggcttttgagagaatattcagcgtgtgctggacgcgagacgtctctcggcttatgtccagcaggcttatgtatgatttaaagagggagttctgggctctgtttccaaaataagtgaggcgggctcagcatattatttggggggcgagatgctgggctcggcttactccccgtagagcatctgttcggcagatcgcgaaacggttcggcttatgtttctgtccgaaccagagcttatgtttctggacgcaaaggcgagctcgagtgtgggaagaaaaggcgaactcgagtgtgggaagcaaaggcgaactcgagtgtgggaagcataggcgagctcgagtgtgggaagcaaaggcgatctcgagtgtgggaagcaaaggcgatctcgagtgtgggaagcaaggaacaagtatgaaagtggctaagagtaagaagtgaagaagtgttgtgaaacctctaattgttctagagggtttcactttccttttattgttgcgttgtcgttttgattaaactcgagtgtatttaatggagcccaacctttagggttttccttatcttatgaaaaatcacattaatcatcttaacctaagtttcttctgcctctcatctcttctcttctcacctaactctatttctgttcgttgttaggcttcgtgcttaacatttggtgctttcattgagaggaaaaagaaacgatggctcctcaaaccagcggcgccgtcgcagaccaaacctcaacctcagaactcgagtcacaaaccccagatctgtacctccaaacgaccgctcttgagattcgaatggagaagatagacaaggacatggaatggtttaaggcagctatgggaaacctcttgcgtggccaggttttcggtgaagaccgtgaacggactccggcttgctttgcaagtccgatttcagtttcaggtggcatacaacaaactcctggtacacctgatactgttgcagacaagaaccctcgtccagggtctcttccgttggccaatccggagcctaaccaaagacctgctgaagggttactacccacgccaccagcgcagcaacgcttggagttcgtgggtctgactactgagacacagttcaaacccatagatctcccggaatatgaaggtacgaatcctgatgaaacatagagtcccagaaacacagaaacttgagcaagctatcactgctttgactggtactgccattaactggtggcaaatagctcagtatcctgaaaagatctcaacttggaaggattttcgtgacaagttcaaggtccgtttcaaaccagcccgaggagcggccaccattgatcaactgttcacaattttccagagaggaagtgttgaagagtaccgtaatcgatttgaagagatagcagtggagcttcctcatgtgacagacgatgtgcttgagtcagcttttctgaatgggttgaatgggacccttttttttttttttttttttttttggtaagaataatgacgaattgaattacgatgaaaacgaaaattttacttatctcagcgcaagagtttgtggtacgatcgagttttaagggtcgagttcgttgatacaattatcgaaaagacgatgctcgatgtctgccctagttcttgtcagttcgttcgtccgacgtgacgttgtgctaagcggcatcgtttttttcgtttgtgggatggcgttgggacgagatctccgatgttttgagtgacgacgtgaatttcgctgttgtggagagtttggcttttcttcagttcgcctagctccagcaggtgctgttacttttagtttgcatgatggcgcgaatggcgtttggttggttgcgtcgttgtgtacgtccagagccgtctggttctttcgtctagcttctcgtagcatgccgacatgatgtgtcttgttagtcgttttggtgtgatcattgctttgcggtattcgcgaaacattggcgtcagtgtcggatcgtcgatatcccttatggcgcgtccgacctcatggaccctggagatggctcaattgatttgggagtgaaggtcttgcacttggtatctcgtttatagcggtctgaggaattgccgagctgagttggtttacgacaacctgaatttcttcgcgtaggtcgggtatgcgaataacgactcatgtgcatgcggctgattttatcttgtatgtgctcttgggcggcggttaataatcgcgttgcgctgctttaaatgatcgatgatggtgttgagtagttcttcgccgcgttggttgcttttagccgtatcgtccaggcgatgaaatcggctaggtgaagtttctccttggtctttttgcaacgctaggtattcaggcgtgggcgataacgaggtcggtacaatagatgacgccgagtattatttttcctttatttgaatcgtcttcccgtgcgctgacgttatcgtccgagctgccgagctggtagtgtcatcgtcgaggttttctaagtgacgttcgcctgatgacttctcctcttggtcttggttaggcgcgagtgataacgaggtcggtatgtttaatgaggttatgggatgttcctctttgatcggcggcacttcctcgttggtcagtgttattgtcctgactgccgggctggaagtgtcatcgcctaggatgatggggtcgatagttccttgaagtccttttcttgtcggagaacatgctgcgatatcgaatgaagaggtcgagtgactggctctcccggggatcgacgttgtcgttttacttccagagcctgacgagtcggtatcgaatgctccatgtagtctgtttgttgtcactttgcttcgtcgcggggtcgtgttaacgtaaaccagaaatgaataaacagagtttgaaatcaatagaacagagagatgaaaacaaagtactccgattaacacacttgatacaacgttcgttaagagacgcgatatcaacttctcacctacaagagactcgacgagagctccggtaaaacgatgagggaaatctagaagtctctagagagagatgacaaccagattattcgataatgaaagcatgagcataacatgttgctcttatacaaaaaggtaaagaaagtaaacgttaaccacgttaataacgatcgccgttaacgtccatttgcattgccagctcgccagctcaaaacacgtgctttgcttaacatccctgagttcacattgccatctcgccagctcacaacacacacgtgctttgcttaacatccctggccaaacaacttagcaacaattgctccatcctcttccgttgctcctgtgccaaggctcataactatatacacacaacataattggcaaatgtaagcatttgacagcttcagagagaaacagaaatcacaaacaacataattggcaaatgtaagcatttgacaacacgtgctttgcttaacatccctgacttcacatttccagctcgccagctcacaacacgtgctttgcttaacatccctgacttcacattgccagctcgccagctcacaacacacgtgctttgcttaacatccctgacttcacatgtgtgagcttgaccttctagaacgctatatcaggtcgtagttttgagagatatcttcgagctatccccctacctggcgcgccaactgttgatgcacgaatcacacaagtacgaaaatgggatctctagggaaggaagaaaaatctttctattaatacgagcccgcgacttaggcgaattggacggattacaaaggatgatttcttcaacgagcacagatggagtaagaacgagctgattgtagataaaaggcgaacttgaggccggaagacgatcttgatgtccgaggaagaatagagtttattcgttttatagctgaaccttgtaaaaggctgcctacgtacccttagaaagggatcaagccacacgtagttcatatcgcgataaacgaactaggccattactggaggaaggtcgtatgtcgagttaggcagttttagggatgatccggcggataagtgacgagttgaatggcttctcgagacgtgcgagtaggttagttactttgggcgggcaagtcggcgagacacttcggacggacgagtaaacgagctactcaagatagatgggcaaacgaggtacttcggacgggtgagctgacgagctgcttgagacgggcgagatgataagctacttgagacgggccggctggcgagatacttcggacgggtgagctgacgagctgcttgagacgggtgagctgatgagctacttgagacggaccggctgacgagatgcttcagacgggtgagctgacgagctgctttagacgggccggctggcgagatacttcagacgggtgagctgacgagctgctctttgtctctaagtgtcctcgcggcctccccctttgacaagacatgctattccgtatttatagccttctgcgcgtgtagggcattcatcgagggatttgacgaaactacccttcgccttaatactccttggtttggaacttattttgggcttttgacccctaacaggaggagctgtactgggaaaggaaaacactgaagaaacgaggtaacacaccacttgaagccatggaggacgtaggaactgtgagagaaagaaatagagaagaggaattaggaaaaaaacatgaaagcgacagagtttaagagacgttgagaacaaagaagagagattcttaccaagaagggagctgttctggtcccaaagggttctcttaggaagaccaaagtcaagagtttgaattcttaacaggaataaagtgagagagtgcaatgtaagcagaacacaatcaatgtgtgtttcttacatacgaacctgtcttctctgtcctttctattcgtataccaaatgagaaagaagcattgctttttgtcttttatttttcttagaaagcccaagagttttggactattggtagctttggagttaaagtcacatgtaaaaacagagtctcaagctcattttattaagtaactctaaattttcaatcttactagttaatattctcttgcttgcaaatatcaatttgaattgatgaccgattagtaagtagcttcttgattgttcaacataaccatgtgaatgtcactattaggggaagcagttaaactagagtgagtgagccaaagacttgagagagatggtgttgttttgtttcatccttagtttattcaccatttaatttccaaaacaaccccacaatttgtactatagtacactcaatgatagcaaagaatgagaagatgagtcaatgacaccaaaatatgctttctttagacattgtgtggcaaaaacattgaaagctatatccagttctgtactcaatctctctgcactgttttgtcctatcactttcttttatatcgaattgagaaaatatctgtttaatccagattaaataaaaccgatgctatgcaattagtaagttaactaatcattgagtttgtttttaattatgatcagtgaggtcgttagttcaggttcatttaacagttttttgttttaacgattctgtttatctaaatacttatgggcaaaagaatgtgattaagactctctgtcgtcatagaaattaactagtctcaaattacatctctgttctatctatactcattgttaaccgggacatactggaactaaaacagataccaagattaggctcttaaggtacaaaatactgtttgattgtgagacagaggagttcagagaggttctaatgattataaaaaccttgaggttgcgtactcttatgggaatgcgtggtttacaacatagacgaccactgaggattgaagatctcgatctaccttgaaatgcgcgtggaaaaacctccttacctgtttcattgccaacaaaacaaaaaatttcgcccatgaatgcataaaacaaatgaagtcagagatgaatgaaaaaaaaaagaaagaagggagtgtgttcttgtttctaacttgcctctttaaaggaatgttggatcatgaaatctctgagttttgtttcttctgatgcaaacaatacaatatgactaggcggctctgaccagtttctagctaactctgatgcaaaacctaaagggtttactaagaactgatccgactcatcaagttctcccttctctgcactgtttcagaagaagaagaagaatcattaagaatcacatagaagcaagagctgtgactcggggtgtgatcctttaccttggagtgcagtcgagaaattgcattggaatgttacgatggagagtggaataatagggagtagaatggcacggcatgagaaagagaatgctctttactctgcctttgtatgcttcatccgataagtaattcatcgcatcctcagttcctctctgttggaaacaacaaaattcctttttagcacaaatagagatagagagtaaactcggaaactagatagagccctcaaggtactggtgtttttacctggtggaataaactcatgtatagtgccattggaatattggtagcaagcaaaaaatagactgaaagtcttagtttgggagaccacttggtatggttctgtcgagggacttgcttctttttagtgactgatgatgatgatgatgaaccagatacttccatttgagcaaatgcatacccagagaatatcaaagctatgggtagcacaggcaggacaaacctatcattcataatctaagtagacgacatggaaaacataataaatgatgaaagggtgttctttgcaaagtttttcgatattgaaagtgtaagaaaacggggtatgttctccaatcatattacctgaattccttatggccgagtatgctgtatattgctaagacccatagaataagagctgaaagcttctgattcttagacttgataattccagcaatggagaatggtgtgaaagtgaaaagcatgacaagaaatccctgggtgaagtaccagtgccatgggtgagttccgtaatagtctccaccagacgaaaggaaattaaacttcagaaaattgagaggcacaatgacccacgagccgtacatcagacggtccaacaaacaggtgaaaccgaggaccaaagatctaacaccagaagcaagttagcgcaatgaaatcttcaaaatcaaacattaaaacgaacattcaagagtatagcttagctgcagagttaaacttacccaatcgggatcacctctagaatgatgaatttgaccttattaggtgtcaaaaatagctcgagcatcccaacgtataaccatatgactgcactagttggccttatggcacatgctagggccgctatgaccaaaccccacttccgattcacgggatagtctattgaagaatctctaatacaaggccagtagtacagccccatgatggtaagaacagtctccaaacagtttgaaaaggtacggttcaaacagaagaagatgaaccagtttgccatttgacaaaagagctactaaaaaagttaaggaagcaatccagaataaaatgcaaatacaaaccaagaaagattaagaggaaaccactaacagacttatctaagtatttcattgaagctcaggatatctaatctaacacccttcccgttacatcgacctatcattgcgtagggaaccatcaaatgtagtgtaatgatgggttggctccattattgtagataatgtttgttttttattaaccaaggtttaatcttggttaaattcatagccatatcattcaaaaatgtaaagcaattaacttagtatgctgcatagaaaggatacagaccaagttgcaacatttcctccatataaagcatcagagagtttatacaaatagagatcaccaatagctgaaaatatggattgcataagacgtggggctttgatctgcaaagaaatgaaaaaggttgtaacacataaaccactctatcaacctttctttgaatacggtgaaagctagataaaactatgttcaattgaatcagattttggataaaacttagttcaaaatcaagataactaggttctgcttctaataagaccaaaaaaaatcgagaaacaaaccattatgtagggagtatcaaggccagtaacttgtagaagtttatacaagaatgcgaacaacattggatgcaaatagcttcgtattcctcttttccactcccatgtcatataaccatacctgtcattaacatcaatcaaccaacaaaaacttactatggattcattgctcaaatcactgattcttctgaattatcacttcaactatgtgatttatgcttccgagacgaatctagcactaacacagatcaacgaatgcagtaagagaaacaaacaccaaagtctcagttcaatcagttcccacgaatccaacttcaactaaaggaaaagtcaagtttcagaaccagagaatagaaccatttacccaaatatggtgcggtgagctacttcaagtgattgccaatgttcgtcaggattgaaataagtctgaatcaacaatgcatttaccacacgaaacgccaagcagaacaagaatatcctcctcggagatcctattcgaccaccaaacgaatcaggttcatctccgacattaactgacgcgccatcggcgccaccgtcgccatcgccgccggcgttcttccgcttccttatatccatcgaagaagtcgttaaagtgcctgcgattattaacacgttggattaattcactgctcagctttccaaattttagtgggcttatataaaacgggctcttgattattttaggcccatctatttttcagtgaagtcattgccctataattcgaacttcgacgattgaacctatcgttcagtgaagtcataataatttgttattcagtttagtttgttcctttattctctttttgttattttcgaagcaatgcttcgacaagaatacactctatggacgttacttattactttacttacgtaaagaaattgacctaatacaaactttacttacgtaagaaacttaactgacataaaacatctatccaaccaatctgtcattcaattgcatgcagagacgtgcctagatgaaaaaataacatttgctctcatcttcccctacaccctttaaatatcacaatatattttgggtcccaatttttttttttataatcttcatctggtaaaacatgcttttttagtggtcaatcattttgtgttttacgttcatagctccatttcgtataggaacgggagtataattaaaaagttgaacggacagattcaaacaaaatacaatcataaattttctttttttcatcattctttaatacttgtaaaacgttgaaatttatttacttttcaccaatttgattgtttggactttggagtagtactatgtaaacaaacactattttgtaacgttaattaacatctacacaaacaactttaggtaagtaaataaagtcaaataaatcatagtttgtttttttggaaacatcaagtcaaaaaacaataactactctttggaaatacaattatgtaaaaaatcccacctaaatagtctttgtgaaacaaatgtaagaaaacaaaaaaatggccgtttcatcgtcgcatcatgcggttctcttcccttacatgtcaaaaggccacacgattcctctcctccaattcgcccgtctcctcctccgtcaccgccgtatcgtctccgtagacgacgaagaaccaaccatttccgtcaccgtcttcaccaccccaaaaaaccaaccattcgtctcaaacttcctctctgacgtcgcatcatctatcaaagtaatctccctccctttccctgaaaacatcgccggaatccctcccggcgtcgagagcaccgacatgctcccttccatatcactttacgtgcccttcacgcgcgcaaccaaatctctccagcctttcttcgaagcagaactcaagaatcttgagaaagtttctttcatggtctccgatggattcttatggtggacatcggaatccgccgctaaatttgagatcccgagacttgccttctacggcatgaactcctacgcatcggctatgtgctccgccatttcggtacacgagctctttaccaaaccggaaagtgttaaatctgatactgaaccggttactgtaccggattttccatggatatgtgttaagaagtgtgagttcgatccggttttgaccgaaccggatcaatcggatccagcgttcgagctactcattgaccatcttatgtccaccaagaaaagccgtggagttatagtgaacagcttttacgagctcgagtcaacgttcgttgactaccggctccgtgataacgatgaaccaaaaccgtggtgtgttgggcctttgtgtttggtaaatcctccaaaaccggagagtgataaaccggattggattcattggttggaccggaaactagaggaaagatgtccggttatgtatgtggcgtttggaacgcaggctgagatatcgaacgagcagctcaaggaaatagcattagggttggaagattccaaggtacgttaaagaatggattaatgccaacttaaaacctcatattaatacagttgaccaatcacttttattattccaccaaattccatgcatgtccttttatttgtttttggtatcaacccataaaacattttttagtctatatatatatatataaagaaaagtattgttttgtgaatttacgtggtcttgattgttttaaaaaggtcaatttcttgtgggtcacgagaaaggacttggaagaagtaactggaggattagggttcgaaaagagagtgaaagagcatgggatgattgtgagagattgggtagaccaatgggagatattgtcacataaaagtgtcaaagggtttttgagtcattgtggatggaactcggcgcaagagagtatttgcgctggggttccactactcgcttggccaatgatggcagagcagccactcaatgcgaagttggtagtggaggagctaaagatcggagtaagaatcgaaacagaagatgtaagtgtgaaaggattcgtgacaagagaagaacttagtcgaaaggtaccgtatatataccctttcatgtttccatcttttgttttaattggtgtcatgcatatattagaataaaatgttttgaatatggtaatcatggctttgctttttgactaacaaattaacaagaaggaagcctctttttccgtttgactgtagagtaccccttgattgtatttattatttgtactatttaggttaaacaattgatggagggagagatggggaagacaacgatgaagaatgtaaaagagtatgcgaaaatggcgaaaaaagctatggctcaagggactggttcgtcttggaagagtttggattcgcttctggaagagctttgtaagagtagagagccagacggtgttaataagttgtcaagttctgatgcttagagagattaaggattggataacaaaacggcttcgtacctaattttagtcattaaatatgttaggtttgttgaaaagttggtccattcttctcaattggatatgaatgactaatttggagttctaattcttggttttggtcttatagtttcaaaaaatttcaattgcattcagtggttgctttatgagatttttgctatctttgaggttaatattggctggtcaatccgaagaagctatcaacaccttagtgttcttctgaaagacttaaaaatgagtttgtatgcaaaagtagtatctactatgagaagaaatcagactatataacattgagacagtttaagaacaatgtatttttactctacactcgttttctatatctaacatcctcaaaccgaaacgaaaagaaaagaaaaattacaagttgaaataattaagggagtttcctaactatttaccatctaaaaccaaacagttcacacaaaagttttttgcccataatgactacactttaaacgtcttctttatctatagagaaatcaggctcatctggtttgaatagttgaggcatcttcaaactggtggaagatccatctttcttaccagtactactacttgaagccttttgatttgttcctcttctcgtgttcgccgcaaatttagatgctaagatcgttgctcccagatttgtgttgtccattgatccgccttcctcgtcacttccatagtaatactctctagtttcttcgtcttcttcattgtaacctgtttcatccgggtaatagtatccgctactctcgtgaaggctgagctctttcgcaagctttcttcgcttgtatcttctccatgcagattggacaaaacatgctccccatgctctccattgatgtgagtagtacctgaaagcgtgttgaagctttttgctttgaagacgtttgaactgatgagcaacaaacttaagatcctctgcgcttaatgcaaaggcttctacttcagagagggcacggacgcttcgtgttgaagacggaagattgagtgtagagtttggcattaaggcccatgtaagaagttcttccccacagaaatcgccaggtcgtagagtagtggagttgaagaaaccagatcttcctccatttgttgttgagctctctatttgtcctcggatcacaaatagcatctcattcaccggatcaccttcacggaatatgtatgtcccggccgtgcttaaagatgagacaaggcatccgcatatagcatcaagaagttgatcatccatttgagagaagaacgggacctgcacttaccacaacaatgtgacttctgaattgaaaaacaatcaaatccataacagtttttgatgactgagttgatgtatgtacccggcgaacaagggagagacaaagatgacgttggatttcacggcgtaaatctgtaggtaatgaatggaggattgattcttcatcgacacctctggttgcaagccatttgtattggacaaatcttcggacacgttcttgaagctctggaggtagttgacgatgtctcatccattcttcagtgtctcttctcttaactctccattcctcaactcttactgacatcgattgcagagaagactttccaccaaattaaaaatcatgaagtctattgttagaaagacaaaaaaatgtctctgtattgaaaagttttgcagagtgatgcataagctctgaatcttacttgcatgttaccaatcaggagtgtgaagagaatcaacccaaaaatacaaattgttatacagaacaaggtctcgccaaggtatacacttgtggttatattctgtccataagaactgtgaaacaaaacctttattaaaaccaaaggaggacaatttaagcagatactggttagataaaaggttgtcataccttagatttcttaaaccccaccaaagacaatacaagtacttggacacaaaatctgttgtagcaacttgagtggtaaaggcttcagcaaacattccgaatttgaaattggtagtgctgcttgtagcatcacaatgagaaaggacctgagtaacgttctgccaatactggcgctctggttgttctaaactcttgcaatccaagaagctaggaagacaatccaaaactctcaaagcgttgtctttcttgcatacgttggaccagcacgaaaactgccgcccgattgatgacagataccacattgctcctaacacctgcccacaaatagagattcttagcaacttaaaactgaagaaacctaaagatttgaaaaaacacacaagataaagaaaacttacgtgactagcaaggatgtacaataggaggttgtatgcagctcctgcccaagcagtcttggcgataaacccggttgttttgataatcctttggttgagtgggaatatgatgaatgatcttggaatgtattgaacaagaacgataagtgcgagagtgctattggcatgattagcagttccatttgtggccgctggaattactagccaaataacaagctgagatcaaaagatagtcagaaacaaagcatgaggctcccaaaatatctctgttctttaatcttctagctaccgcctaacgatttttgaacattgatcttagctaatcgtaatccatatcattgctttcacattcaaaataagagcaaaatcttaagaacctgaggaaggggaagcatggcggcgacatcaatgaggaaatctgtcttcaagtatctcatagcaatctctctagaatccataacaagctcaccgcgaccaaaaacacgagaactcctcgcgacgaacgcagttctgaatttcatgaaaatgtgcaagaggtggaagatatcggcgactgtacggaagaaagtgacagtagcggcgaggctgatgtcgatggagagacacgccggaccaccgacgtaagggacgtagaaatagaaaggatcgaggaagagagcgaggattgaggtaatgagaaagacgtggttccaataggtgacgatgttgctgtccgggtccaggatctgatgccgccataggacgctgaattggctaccgtcagatcctcgatttgaggcggcggtggaggcggaggttatggtctccgggaggaggcagcggagagaccggattttattcatcttccatggcggattccggtgttaaatcggattccgcattaacacagagagagattgagattgatggacagagaggctaggtggttgcgtcgtgtgattttttgtttttttgggtttttgcattttgtttttgatgattatggaagaaggagaggatttctcgcgggaaaactgagagaagggccatggaaatagggggaagggtagtttttgaaaatatgatgggagaatgagggtatttacggaatgttatagttgcgggtctcgtttgtttatgctgtttttgtgttctcaaaacagcacacgttttgcatctcaaaacttcaatcgacacaatatctactgttcttagttgttggacccaccggcccaatagttatagatcggcccaatagttatttttttctactttttttctatgaaaatcaaagggatatatactatatatgctttaggattttaaaattacacattataatgtatacaattgctatgatcatttctattgataaactaataatgtttttagtagttttaacttaaagtccggtttaatattgtttagttcaattgttcaaagaataaaaaaaaaaattataattaattcgtaaaaccatgataagattagttaaaatatctaattcgttatgaggttcattagaatttatttaagtgaattattgaagttttatgagctacatttattatattttgtcaacacattaaacccgtaattcaattatactgtcttttgtagtatttccgtttttgacatcagtttaacaaattgtcttacataattcatttgttgttgttatgtactattaaaagtatatagaagcacgcgtaccaaacattctgtgacaatatgtggtagtgggaagatagtgtacatgcttgttgacaccatccataagatagtgtacctataaaataacaaaaagggaatagaaatccttagaaacaattatgcgaatataaaagggataataagaagtgagaataataaaatgaatactgaaattaaaaattacgtcacggaaaaatgatgtttatccacacaaaaagaacaacaacttccatcatatcatatagagggacatactaacttttccacttccaaaaaatcacacttatgcgtaattgttttctctaacaataatgacgtattttagtccttcaaattttagtactccatcattttccgattagacacaaagtagtaatttcaatataaaaaattaataacaagcttttataaatgattatgataacttatactaacatatgtgacaatattgttttctctatgcttgttaaacgtaattaagaaacaatgatgttaattactccaactaattcatggatctagaaatacgatgttggttaaacattattatcgactaatttattacttcgttaatggctgctattaagtatgaccacgtgtggcagatttgagatgtttagcgatctttaaatatagaatccgacgggatccaattctcctcttttttttttattccactttgccactgtgattatataataagtatgattaattaagagatttacattctattgatttactttattattttattcatgtggagtagactatacgacaactactttatcgttactttttaattttattttttagtgaaaatttgctagtcaagtttagaaaattcaaaatagcatttcacttttatatgcacgattgatttcgttgcttatattaagataaggaaaacaaatgttactcttcctaaaaaaattgttctttgagaatacaatttacgtgttcctcttttcaataaagtcgctggtgtttatgaaacacacattagaaagaaaaaaaaaagatttaaaacatttatgaagatggcaaaggttcccacttcccattgtaggaagcaacaaatttcctttttgtttgattaatataaatgcttacgggacgcaagaagaaatttcgtgatcgtgaacatattaatcatttgggaccctaatgaaaaagactaataaaatcttttgttttatcgaataaaaagtagattgtagttttgtgaagtttaaagcactcgcttatcaattgttttatctaaagaaataagataagctgctttcaaagtggtaagagttaggtcttgataaaaaaaaagtcttgaaggtggtgccacaccaaaatccttgcacctttctattacatacacacgtgtatagagatttttagtcatatctttgaataaataatctttggatatatgtatagtgaataatttgtgggtttgagagttggagaggatgaactacaggtcacgtaatataccctaaaataaaccatcacgaaagaatagaatagagaatctcttggtactatcaaacaaacaataaaaaaaaaaaaaagtaaaagtgacgaagacaccaatctattcatttcccacccatctcccattaatatttctttcatctcttattattttttacatgcatatttttctatctctaaccttttgtttttggttcactcaaaatttgtggtactttgatccacatataatatttgcatatgttagtacggtcttatataatagccatgtgatagtaaaccctttcacaacatacagtaaatatacctagtatatatagtttcaacggttcaagattcaaaatatcgtcttaaacagcgaccagatattcttgaacctccaaaacgatctaattttaataaattggtgaatgaaatcgatttattagtttaagcttttaaaatcggttttgatcaatcaaatcggcctagtgtgaaaaaacagaaatttttctattttctttttttttttttttttttttttgcagcgaatctataatacatgtaaaattaactagtgtgaaaaaatgttacaaagatcttacgtgaatttcgacacaatcacctatatatagtcaaaaatgaattttgatataataatactaatatacttaaccatataaaaagatttgcacattcttccataacaaagaaggccccactaattttcttaaggagtatgttattttgcagttatatttgtggcagttatcttaatcattctttcatatgttttgtctgtgtgtttcctctctctctctctctttgtggttcttgattttgttggccaaaccttttcctttgtaccttcaatgccattaatcacaaacccaaagaatccatagagaaaaagttcctaacgtcaatcgaattaaattccccacttttccacaaaaactaaatcgcatcttttgaagtttctcatctcccaaaaatgttattcctttgatctttagatacaaaacccattcaatggatctcgagcgtctaagcccaagaaatccagttaaggtataaaattctcaatattcaattccataatcctttctttcttttagttgcttaaattggtaatggtttttgcagaaagaatcttggtggacggttctgacattagcttaccaaagcttaggtgtagtctacggagatttagcaacttcaccattgtatgtctacaagagcacttttgctgaagacataacacattctgagacaaacgaagagatctttggtgttctgtctcttatcttctggacattaactttaatcccacttgttaaatacgtttttattgttcttcgtgctgatgataatggtgaaggtgggacttttgctctctactctttattatgtcgccatgctagaatcagctctttgcccaatttccagctcgctgatgaggacctttctgagtataagaaaaattccggggagaatccgatgagattaaaagttccggggtggagtttgaaaaacactctggagaagcataagtttctgcagaatatgttacttgttcttgctctgattgggacttgtatggttattggtgatggtgttctcacacctgcaatctctggtaaaagattgtttcctttttgttagatttgtgtggatttctcaagatctttagtagttgatggttttgtattatttttgggtgtgaatttgcagttttctcagcagtctctggattagaattatccatgtctaagcagcaacatcaatgtaagctctttacttcttttgatcaggatgtaaaattggaatttttagtatcactagatccccaaaatgtcaaattatgctatttttagtgttttcctctgaagtttagtccatactgtttaagatagtttaggagcaggatttgctgcatcaggtagttttagattagctattttggtctttcttttgtccacatagtcaattggctacttgcatgttaggttgaatccatgtaggatcaacaagaagcttcttaattatgtataaaataagttaattaacttttttttttggtgtggaaggtgagtctgatgcagatgcattcttataatcataagataatgaatgtggtttaggagttaataatttattaaagatataaaatctaaaggaatataaaagtcataaagcttataccttttgaaaactcaagtggtcaaagaaaaaggtagttggtttggataagaagactatcaagtcataaagttcttatgaatttgaagtaaccttctttatttgaatcattaacctgcacaattcttgcagatgtggaggtgcctgtggtctgtgccatactgatactcttgttctcgctacaacactatggaacacatcgtttaggttttgtttttgctcccattgtgcttgcatggcttctctgtataagcaccattggtgtatacaacatcttccattggaatcctcatgtttacaaagcattgtctccttattacatctacaagttcctcaagaaaactcgtaaacgcggatggatgtccctcggtggcatccttttatgcattacaggtaacaaaagagagaaagaactgttttgtttttgagtttcaaagcttttttcccataaatttgtttctgtcctgttttcgcaggctcggaagctatgtttgctgatctaggacacttcactcagttgtcaatacaggtaaagttttgtaaactttgaatattttgtgttctgttgttagctgtccctgaaacctgcatgttttttttgactccctggctgcagattgcattcacattcgctgtttacccgtcgttaatcctcgcatacatgggtcaagccgcgtatctatctaagcaccatgtcctccagagtgactaccggattggattctatgtttctgtaccaggtatatatctactcatcatcttgttaaccagctaaaatgcaattctttgtttggcatagtttttcactagtttgtttgttgtgtacagagcaaataagatggccagttttagcaattgctatattggcagctgttgttggaagtcaggcaataatcacaggaacattctcgatcatcaagcaatgtacttctctaggttgcttcccaaaagtcaaaatcgtacacacttcgtcgagaatgcatggtcagatatatatccctgagatcaactggactctcatgctcttgtgcttagccgtcaccgttggattccgcgacaccaaacacataagcaatgcatcaggtacagtatctgtaaccatagccataaccactaaactaacaaatgtatgaaaatcaagaaactctccggttctgatttttttcttctctgtaatctgtatgcaggtttggcggttattaccgttatgctagtaacgacttgcttgatgtctttggtaatagtcttatgctggcgcaaaagctccctctacgcactagccttcattttcttcttcggaacaattgaagttctgtatttctcagcttcactcatcaaattcctcgaaggggcttgggttccagtcgcactctccttcatcttcctcctcatcatgtacgtttggcactacggaacccttaagcgttacgaatttgacgttcaaaacaaagtctcaatcaactggctcctcacacttttcggctcttcaaacctcggaattgtccgagtccatggaatcggcgtgatcaacaccgaacttgtctcgggcataccagctatcttctctcatttcatcactaacctcccggcgtttcaccaagtcgttgtcttcctctgcgtgaaatctgtccccgtcccgcatgtgaaaccggaggaacggtttctagtgggaagggttggaccgaaggagtaccggctctaccggtgtatagcccggtatggataccgcgatgtacacaaagacgatgtcgagtttgagaatgacctcatttgcagtatcgcggagtttatccgttcagataaaccattgaattactccccggacccggaaaatgaatctggaataaatgagaggctaactgtcgtcgcggcttcctcttccaatcttgaaggcgtacaaatctatgaagacgatggttctgacaaacaagaaccatcttcttcttcggaggtaatcatggtggctccttctccgagattcaagaaaagggtacggtttgtgttaccagaaagtgcgaggatcgatagatcggcggaggaggagctaacagagctcactgaggctcgtgaggcaggaatggcgtttataatgggacattcatatgtgagagcaaaatcgggatcgagtgtgatgaagaagatcgctattaactttggctacgattttcttagaagaaactcaaggggtccttgttatggtctctctactcctcacgcttctactttagaagttggtatggtttatatcgtttgactatacttttttcttttttgttaaatctgaataaacttcagttttgtaaattatggtaagataaatttgtcagagttctttttcgttgttgttgtaatttttgtgtagagatgttagagttgcgtgtggcataagtgacatgctttttgtttttgtaatgacttgtccctactgattaggattcaaagagaaaaggattgaagaataagcagacaagactgagcatatgattcttgtctctttatgtttctttaactccaaatcttctcttttgtcggtttatctcatcatatatgtaagtgcatagaaacacatatacatgtacaattgcatatttatctactctctgaacttgtgagcaactcttgctctgttttccttaaaaaaaatgaggaaaaatgcaaatttgttgattttgtttatgattttcatgtttttcttttgtgggttatcctcagtttcagctaaacctcctcctgttagtgagttgtttattaccctaaactgattttctttatataaatacaagttttcacttttgttgtaatgaatgtctgaaaatgttcttgtttttctctgttttgggaacagagattgtaagtgggcttgtgacaaatgtagcatcgatactctggaaatggttatggtctcttcaaacatccacaaccacaacaaccaccacaaaatctggtaagaagacccacaaacaaagaagtgtataatgatcttgatttcaaagtttcaattgcaaaaataaagagaaacttgaggaaatgtaacaggtgtttctagccgttcgatggtgaaatacgaaagtggatataacatggagacagtttttgatggaagtaagcttgggattgagccctatgcgattgaagtttcccctaatggaggagagcttattgtcttggattctgagaacagtaacatccacaaaatctccatgcctctttctagatgtaagttcacttcatatctatcttgcatttgattgattataaagaaactcttaagatcgatttttccggacacgtatacaatttattttatgggatattcaatcaattcccattcctatatatgacccaccaaaaatgttaaatcatgtatgcacaattatgctttgcttcaagatggggattcgttttggtgcgctttttattttttagttcagttaaaaagtgagttcttcatttcagattccaaagtttctttctttgaaaaccaaagccttttatagattataacttttgcactttagtccacaacacgactcattagcttttatccatgctctgctttgttctctgtttttcaggtttattcattctgttctttcttgttcgtcaagttaacaaccttttgtcagactaaagcaccgaactattgcttatggatagattctaggatttaaattagacagattcagattcttagggatttgtgaattaatctgtgtttttgaatatgctgaagatggtaaaccaaagctactctctggttcacaagaaggctacacaggacatgtcgatgggaaactcaaagaagcgagaatgaatcgtcctcgaggattagccatggacgacagggggaacatctacgtcgccgatactatcaatatggccatacgcaagatcagcgatgacggtaactacaattcgtttgcatgcgtttccgctttgaaaaacggaattttaattaaagtttttttgttcaggagtctcaaccatcgccgctggaggaagatggagcggtggatctaaagaggagtcaatgagattctccgatgactttgatttaatatatgtctcttcaagctgctctcttctagtcattgatcgagggaatcaattgattaaagagattcagcttcacgatcatgactgttctcaaccggaacccgacacagatagtctccatcttggtaagcttcttgaaaaaacgacattggttgtttatatttggtgttgtggttttcttaaaaacgatgccatttcggtttgtatatctttgtaggaaccgctttgctggttgctgctgtgttctttgggtatatgttagcattattagttcgtagggtacgatcgctgttctcttcgtctagccatgtgagtgaatctgtttgctttggtttggttcggttcgaaatttgaactagggtagacaaccaataagcctcattgctctgtttttgatttcaggatactaagagtaagagacatgtagcaacaccgagcatgacaatggctccgtaccaacgttatccaagaccggtacgacagccattaatcccacctcaacatgaatcggaaaaagaagaaggatttctcggttcgcttggaaagctagtcgtgaaaaccggttcttcggtttccgagatgatgtccggttctagaaatgtaattcccccaaactttcatcagtaccaccatcagcaagaaccgaaccaatggccggtacaagagagtttcgctataccggaagaagatggaccaccagctttagaaccgagatcaggtacaaatccagataaaccctaccttagagcacaaggaaccaaccaaaaccggtcttattaccaagactatgatcaataccaaaaccagcagaaacgcaatgtgaacgatacagcgtcgttcgaagataaccgagagaagaacgagattgtttttggggcagttcaggagcaggacggtcgccgagaagccatggtgatcaaggccgttgatttcaacgaagccattaacgatcagcgcaatctacggcccagaattaattatatgggatattcttcacaagtttactgattaaagaaagtcaaattttcataatttacgtaaagcgtgtgtaatatatttcttcaagttcttattttaatgtaggatactttaaatcatataattggctcactaacggtcgaccgttataaaagttaccgggactaacggcttactgcaccgacttaacaagttatactatgagatcagaccatctaatatttaacaaatctaccggttcaatttcggttcatatcagcaaaaccgatggccaggtaagtgaagattcttaaaaaccggtttatggcagttacgtacgcaattccagctcttgatttagttgccatttatatcccatttatttcgcattggttatacagagtacgagagagaaatagaagacgaagaagaagaaggagatttcttgcaagagaaagagaaaattagggttagggttgcagagaaacagagaggaagaaggattcgaagaatccaaatccaagctctgtattcatctctctccctttctcttaatctttacgatctttctcaaaatcaatctcattgtttcatgggccttgaatcttttccgatctctgaaatggacgcgaccgatgaaatgcacgaagccatgttcgcgaaacgaggttgttgttttatcctcccttgtcttggatcatctcagccatctggtcctaacggatctgtgtggtggcaacgaatcagaaccgttgataaattggagcctgatgagcggtggtgggtctctgggtggatgaagatgagggaatggtctgagatcgtagctggtcccaaatggaaaacttttatccgtcgctttggacgtaatcactgctgcaacggtggcattgacggtggttgtaatcggccggagcatgttagtttccggtacgattcgtggagttactcgttgaatttcgacgacgggaaacagacgggtcatttcgaagatgagtttccttaccgtgattactcgatgaggttcgctgcgccgtctctgccggtttctactaaatgctccattgatttcgacaatgataaccacgcgccgtcgctgtttaagtgaaaaatgtcacgcgcttctctgttccggtactgctctgttctaaatgggctggcgctaacgtgcaccgcactgatgaaaggggagatacattagaagaaacagtggatttttttctttgcaaagaaatattacttttttacacagctttcatttatttgttttttgtaattctttcactttgaatgaaattatttatttgatcactattttctcccatttttgattaactttatttgatcaaattttgtgagaaaattgttagtgatcaatttttgtaattctacacacaaagataaactttttagagaaagacatgatgaaggtaggaaacatatatttatatatttatgtaaaatacagtatataatccaacaagaaataggagaaaggaagctatttaatgggttggagaaggttgcaattgcagaggaatagcaacagaaacggtaagagactgtctttgtgcctgtctctaccttcagacatgctcaccatgtttttttcaggtacattacattgttgtagaattaccttatgcaatttcctatttggaaccttgccaaaagctagagtttacttctaagtacctctgctgatttcctacagtttcatgtgttcagaaaactaaacacaatgtaatgtttcagacaatgatcttgtcttgtggttgaatcagttttttttttttttttttttttttttttttttctgtagaaa

SEQ ID NO: 1433 - DNA, 85992 bp, Arabidopsis thaliana
cttaattatgtataaaataagttaattaacttttttttttggtgtggaaggtgagtctgatgcagatgcattcttataatcataagataatgaatgtggtttaggagttaataatttattaaagatataaaatctaaaggaatataaaagtcataaagcttataccttttgaaaactcaagtggtcaaagaaaaaggtagttggtttggataagaagactatcaagtcataaagttcttatgaatttgaagtaaccttctttatttgaatcattaacctgcacaattcttgcagatgtggaggtgcctgtggtctgtgccatactgatactcttgttctcgctacaacactatggaacacatcgtttaggttttgtttttgctcccattgtgcttgcatggcttctctgtataagcaccattggtgtatacaacatcttccattggaatcctcatgtttacaaagcattgtctccttattacatctacaagttcctcaagaaaactcgtaaacgcggatggatgtccctcggtggcatccttttatgcattacaggtaacaaaagagagaaagaactgttttgtttttgagtttcaaagcttttttcccataaatttgtttctgtcctgttttcgcaggctcggaagctatgtttgctgatctaggacacttcactcagttgtcaatacaggtaaagttttgtaaactttgaatattttgtgttctgttgttagctgtccctgaaacctgcatgttttttttgactccctggctgcagattgcattcacattcgctgtttacccgtcgttaatcctcgcatacatgggtcaagccgcgtatctatctaagcaccatgtcctccagagtgactaccggattggattctatgtttctgtaccaggtatatatctactcatcatcttgttaaccagctaaaatgcaattctttgtttggcatagtttttcactagtttgtttgttgtgtacagagcaaataagatggccagttttagcaattgctatattggcagctgttgttggaagtcaggcaataatcacaggaacattctcgatcatcaagcaatgtacttctctaggttgcttcccaaaagtcaaaatcgtacacacttcgtcgagaatgcatggtcagatatatatccctgagatcaactggactctcatgctcttgtgcttagccgtcaccgttggattccgcgacaccaaacacataagcaatgcatcaggtacagtatctgtaaccatagccataaccactaaactaacaaatgtatgaaaatcaagaaactctccggttctgatttttttcttctctgtaatctgtatgcaggtttggcggttattaccgttatgctagtaacgacttgcttgatgtctttggtaatagtcttatgctggcgcaaaagctccctctacgcactagccttcattttcttcttcggaacaattgaagttctgtatttctcagcttcactcatcaaattcctcgaaggggcttgggttccagtcgcactctccttcatcttcctcctcatcatgtacgtttggcactacggaacccttaagcgttacgaatttgacgttcaaaacaaagtctcaatcaactggctcctcacacttttcggctcttcaaacctcggaattgtccgagtccatggaatcggcgtgatcaacaccgaacttgtctcgggcataccagctatcttctctcatttcatcactaacctcccggcgtttcaccaagtcgttgtcttcctctgcgtgaaatctgtccccgtcccgcatgtgaaaccggaggaacggtttctagtgggaagggttggaccgaaggagtaccggctctaccggtgtatagcccggtatggataccgcgatgtacacaaagacgatgtcgagtttgagaatgacctcatttgcagtatcgcggagtttatccgttcagataaaccattgaattactccccggacccggaaaatgaatctggaataaatgagaggctaactgtcgtcgcggcttcctcttccaatcttgaaggcgtacaaatctatgaagacgatggttctgacaaacaagaaccatcttcttcttcggaggtaatcatggtggctccttctccgagattcaagaaaagggtacggtttgtgttaccagaaagtgcgaggatcgatagatcggcggaggaggagctaacagagctcactgaggctcgtgaggcaggaatggcgtttataatgggacattcatatgtgagagcaaaatcgggatcgagtgtgatgaagaagatcgctattaactttggctacgattttcttagaagaaactcaaggggtccttgttatggtctctctactcctcacgcttctactttagaagttggtatggtttatatcgtttgactatacttttttcttttttgttaaatctgaataaacttcagttttgtaaattatggtaagataaatttgtcagagttctttttcgttgttgttgtaatttttgtgtagagatgttagagttgcgtgtggcataagtgacatgctttttgtttttgtaatgacttgtccctactgattaggattcaaagagaaaaggattgaagaataagcagacaagactgagcatatgattcttgtctctttatgtttctttaactccaaatcttctcttttgtcggtttatctcatcatatatgtaagtgcatagaaacacatatacatgtacaattgcatatttatctactctctgaacttgtgagcaactcttgctctgttttccttaaaaaaaatgaggaaaaatgcaaatttgttgattttgtttatgattttcatgtttttcttttgtgggttatcctcagtttcagctaaacctcctcctgttagtgagttgtttattaccctaaactgattttctttatataaatacaagttttcacttttgttgtaatgaatgtctgaaaatgttcttgtttttctctgttttgggaacagagattgtaagtgggcttgtgacaaatgtagcatcgatactctggaaatggttatggtctcttcaaacatccacaaccacaacaaccaccacaaaatctggtaagaagacccacaaacaaagaagtgtataatgatcttgatttcaaagtttcaattgcaaaaataaagagaaacttgaggaaatgtaacaggtgtttctagccgttcgatggtgaaatacgaaagtggatataacatggagacagtttttgatggaagtaagcttgggattgagccctatgcgattgaagtttcccctaatggaggagagcttattgtcttggattctgagaacagtaacatccacaaaatctccatgcctctttctagatgtaagttcacttcatatctatcttgcatttgattgattataaagaaactcttaagatcgatttttccggacacgtatacaatttattttatgggatattcaatcaattcccattcctatatatgacccaccaaaaatgttaaatcatgtatgcacaattatgctttgcttcaagatggggattcgttttggtgcgctttttattttttagttcagttaaaaagtgagttcttcatttcagattccaaagtttctttctttgaaaaccaaagccttttatagattataacttttgcactttagtccacaacacgactcattagcttttatccatgctctgctttgttctctgtttttcaggtttattcattctgttctttcttgttcgtcaagttaacaaccttttgtcagactaaagcaccgaactattgcttatggatagattctaggatttaaattagacagattcagattcttagggatttgtgaattaatctgtgtttttgaatatgctgaagatggtaaaccaaagctactctctggttcacaagaaggctacacaggacatgtcgatgggaaactcaaagaagcgagaatgaatcgtcctcgaggattagccatggacgacagggggaacatctacgtcgccgatactatcaatatggccatacgcaagatcagcgatgacggtaactacaattcgtttgcatgcgtttccgctttgaaaaacggaattttaattaaagtttttttgttcaggagtctcaaccatcgccgctggaggaagatggagcggtggatctaaagaggagtcaatgagattctccgatgactttgatttaatatatgtctcttcaagctgctctcttctagtcattgatcgagggaatcaattgattaaagagattcagcttcacgatcatgactgttctcaaccggaacccgacacagatagtctccatcttggtaagcttcttgaaaaaacgacattggttgtttatatttggtgttgtggttttcttaaaaacgatgccatttcggtttgtatatctttgtaggaaccgctttgctggttgctgctgtgttctttgggtatatgttagcattattagttcgtagggtacgatcgctgttctcttcgtctagccatgtgagtgaatctgtttgctttggtttggttcggttcgaaatttgaactagggtagacaaccaataagcctcattgctctgtttttgatttcaggatactaagagtaagagacatgtagcaacaccgagcatgacaatggctccgtaccaacgttatccaagaccggtacgacagccattaatcccacctcaacatgaatcggaaaaagaagaaggatttctcggttcgcttggaaagctagtcgtgaaaaccggttcttcggtttccgagatgatgtccggttctagaaatgtaattcccccaaactttcatcagtaccaccatcagcaagaaccgaaccaatggccggtacaagagagtttcgctataccggaagaagatggaccaccagctttagaaccgagatcaggtacaaatccagataaaccctaccttagagcacaaggaaccaaccaaaaccggtcttattaccaagactatgatcaataccaaaaccagcagaaacgcaatgtgaacgatacagcgtcgttcgaagataaccgagagaagaacgagattgtttttggggcagttcaggagcaggacggtcgccgagaagccatggtgatcaaggccgttgatttcaacgaagccattaacgatcagcgcaatctacggcccagaattaattatatgggatattcttcacaagtttactgattaaagaaagtcaaattttcataatttacgtaaagcgtgtgtaatatatttcttcaagttcttattttaatgtaggatactttaaatcatataattggctcactaacggtcgaccgttataaaagttaccgggactaacggcttactgcaccgacttaacaagttatactatgagatcagaccatctaatatttaacaaatctaccggttcaatttcggttcatatcagcaaaaccgatggccaggtaagtgaagattcttaaaaaccggtttatggcagttacgtacgcaattccagctcttgatttagttgccatttatatcccatttatttcgcattggttatacagagtacgagagagaaatagaagacgaagaagaagaaggagatttcttgcaagagaaagagaaaattagggttagggttgcagagaaacagagaggaagaaggattcgaagaatccaaatccaagctctgtattcatctctctccctttctcttaatctttacgatctttctcaaaatcaatctcattgtttcatgggccttgaatcttttccgatctctgaaatggacgcgaccgatgaaatgcacgaagccatgttcgcgaaacgaggttgttgttttatcctcccttgtcttggatcatctcagccatctggtcctaacggatctgtgtggtggcaacgaatcagaaccgttgataaattggagcctgatgagcggtggtgggtctctgggtggatgaagatgagggaatggtctgagatcgtagctggtcccaaatggaaaacttttatccgtcgctttggacgtaatcactgctgcaacggtggcattgacggtggttgtaatcggccggagcatgttagtttccggtacgattcgtggagttactcgttgaatttcgacgacgggaaacagacgggtcatttcgaagatgagtttccttaccgtgattactcgatgaggttcgctgcgccgtctctgccggtttctactaaatgctccattgatttcgacaatgataaccacgcgccgtcgctgtttaagtgaaaaatgtcacgcgcttctctgttccggtactgctctgttctaaatgggctggcgctaacgtgcaccgcactgatgaaaggggagatacattagaagaaacagtggatttttttctttgcaaagaaatattacttttttacacagctttcatttatttgttttttgtaattctttcactttgaatgaaattatttatttgatcactattttctcccatttttgattaactttatttgatcaaattttgtgagaaaattgttagtgatcaatttttgtaattctacacacaaagataaactttttagagaaagacatgatgaaggtaggaaacatatatttatatatttatgtaaaatacagtatataatccaacaagaaataggagaaaggaagctatttaatgggttggagaaggttgcaattgcagaggaatagcaacagaaacggtaagagactgtctttgtgcctgtctctaccttcagacatgctcaccatgtttttttcaggtacattacattgttgtagaattaccttatgcaatttcctatttggaaccttgccaaaagctagagtttacttctaagtacctctgctgatttcctacagtttcatgtgttcagaaaactaaacacaatgtaatgtttcagacaatgatcttgtcttgtggttgaatcagttttttttttttttttttttttttttttttttctgtagaaacttttttacgttttagctactactcacttgtacattttttatatcgttggtggatcttatattttttaaatgttgtccatcttgtccgttaattaggtgcagtatgatttaaagtgacggtatagcgttatggatcttattacttctgcagagatgctaaaattgatgaacaatatgcttttagaataagtggtaatagcttagtgatttagacatattaccctgaattaagggatggatatgggtattggaatcttattcaactaataaggtaatgatgtgaaagtttagctctgagtttttatgcagctggaagcatctcattggtgttggaactaagcttttcattgcaagttgcagatatatttagcttacacaatggcaaaaaaacaaaattaatgtaattaaaaacaaaattttctctttaagaattgctatacaatttacaactcctctcttctgacagttttctcttcttatagtgcctttcaagaactcgtttggcctcagaactgggaaagttagcaagcttatagtaatgtggtgcaacatctacaagccattcaccgcgaatatgtgtgacggttcggatgaaatttcggctagtgaaaacgtattcgttgtaaactacccactctggtttgtgatccaagcaattggaaggatgcaagtgcaccacttggtcatccttatctctgaaagtcaagtagtggccagtgcgttctaggtgagccacttgcatgaaataacctgcaagcaaggcctttcttatgttgacgtagtagtccctgctgttgaaatcagggctacacaacttaatctgaaacctcaacatgatccggaccaactgctctctaacactaactgcagacttcattgctctgtagttgatgaactttgtacagcaccaatttgggtcttggttgttttgcaagaaagcatggaacaaattcaaaagtgtgagatgatctccatcaatgtgtgcaaagctagatttggcttcatctgctgctttttgagcttctcctcttggcctgatgaaacaatttggtactgataacatcgcagaaatcgaaagaatctcgtttgagcagttgaattgaggactgactatgagcatctttgccatctgtgggtctaaaggaaactcactcatcatctcacctgtctttgtcaagttacagtcatcatcaagtgctcccaaatgatacaaatcgtccaaggcccgagcgagggtatcaggagcaggagaatctataagatcgaagcgtaccaagtttttcacactaagtcctttcaaggtcagaactgtgtttgcaaggtttgtcattgtcatttgcaaggagtaatataatgtttgatggtcaaaaattatattactccatgaatttatgaaccttctgacagaaagagagcttttctaaagggtatttatgtctttttacaggcttgcttcgagtggataatgtgagaaaagagcaaaacacaaaaatgaaaaaaccttcttctcttgtaactcgcacaaccttatcgagtgaaagaagattgggtcagtagtgaaaaatggcgtcgattgcagcttcttctacctttcactcgttttgcagaaccaaaagccctaatctttcttcgacccaccttcttcctttgtcgaaaaacctcaactttcggaccagagctatcggaaatagccgcaattgcagttttgctgggtttataaaacaaaatcgccttggattgaggaagctttcgtctattggagaaggaggagaaggtgtcgctgtcgcagaggagcaaccgcaagagactgtctctgttcctgtctctccttcagacatgctcaccatgtttttccaggtacatcactctctgtccagtgaatttgtgtgattatcatcctcattctccacttatggctttttaatagatatagtaggattgattcatggttgtattataaggtcttagaaatgaggtttgcaaaattgtattgatactgttttgaagatactatgagcattactctgttgcaatttcatgtggcctcaaattgagtctgaacattgttggattttttgcttgattatgaaggctgatggaactttgaacgaagcagctattcctaatgtgacaagggccttacaggtaatactttgctttgtaatctctccttgaactagcaaatctgtgtggagcttgacgagaatctttgtgaatgcatctggttcttggattatataacccttttggttacttgtttcaattcaatttaatctttgtagttgtgttaaacttggaatttgggtgttcactttactctttccacgctctaaatcttccttagtacctatagcttacaaaaacagtgaatataaaggttccaattgatacttgttttgttctttcaggatattgatggagtttccaatttaaaggttcaggtttctgaaggtgttgccgtcgttgaggtatgttttacatccaacattgcctttacatgtctcttcacacccctacacagtacacatatatgtttagaggatataaatagataaggacagatgttgaatatgttattagagatataatggctggcacacccttagaaggactggactggtcaaatatgtcattttgttgtacattttggtggttaaccaggggattagtctttggggccgtataacaaaagcctcgagcctgaccttgaatagttaaggcctttatatgaacggttctgttactgctcgtagcaacatctctatgtttgattgtacaattgaatctggcttatgttgtgatcaatgtatgtgaagcttttgaagcaaacaacggttcaagcaacaggagtggcgtcaaacttggtggagactatacaaggagctggatttaagttacagactttgaatctgagttttgaagatgacgatgaggttcttgtctagtgaaatcatccttttcctccattttgtgattaaagaaactcataatgttcaattctagggataatttctttcatttgttcctctaaagaaaacaaatgtggtaactttttttagaaagtgggaattaatgttttctttgttgaaataaaagagaaatggaaaatatctatattgattagtgggtcatatacatatgggttcccacaaagcatggaggttggcatttttatagacttttaggttcattgctttgtacaatgcatttagttttgtgtgtggatatgattgtcatttgtcactatgtatatgtatgcatgtacgatgttgacattgtggagtactgtggttgatgatatggtgaatcacagctcatgcattgttgtacttataacccaaatctttacttttttaaaaaatgtgatattatagaccaaaaacctgttcttaccaaaacatgtgaaacaatcctctgttttaacatcttaatttatgaaactatgtcatcgtggagtctgttttagtttattcattacgtaaaagaagataagaaacattcattcgtaacaaaattttatcatgttaacagaaaagaggaaagtgtgtgtactcgcgacatatgtaatgataaaaaatatgtatgtactcgttgtcgatttcactttaattacactgttgacctctttttcgaaaatatcagaattataaataaataataataataatcaccgcaaccatttaaagaactcatgtgctattgtccatctatgatttgagaacacttaattttttattagaaaatatgaaagatatataccatatagcttagatatttcaaaacaaagtatagtagtaatctcgtaggccatgcttgctaagttagctaaacataaacgacaaacccttgctcactggtgcaataatcgaagtgaagagcctctttatatgaaatatataagcgacacagccttatgggcaaatcgaatgctatttatttatttgataagaagattaataatttcaatttgtcatccactagtctcttggggtactcaaaacatatcaccaaaaagtccatagagttatttgttcttatttactgataaagtattccaagttgatgtacgaataaagtggcaatttcatgtattatcaatataatccatttttgggaatctgatattttgtttatcctcgagctctgagagatatattttggtgcagtgaaggttcaaagctggcatgcatgatgcatataataactgctctggacctaatacttactacgcatttaaattaatatttatggataatatggttaataaataaggaacttctatttatatcacaaaaggtcactggtcttcttcgtgtgacttcaccactttctcatctcccacaaaaatggctctctcacttctttcagtctttatctttttccatgtctttaccaatgtaagttattcttacttttcataacaaaaggtgttattatgttaaagactacataatagtatacaattatgtgcattacgttttcgcgtattgtaactaactatgtattttgattaatcaccgagcaggttgtttttgctgcttcaaatgaggaatccaacgccttagtacgttttctaatttccagtttaattatttctatgcgtctttaactatatactcaggcatttttattgattattgtgtatgaagttaaattttggtatatgtttgtattaaatttataggtttctttaccaacgccaacacttccatcgccatctccggctaccaaaccgccgtcgccagctctcaaaccgccgacgccgtcgtacaagccacccacgctgccaactactcctattaaaccacccaccacaaaacctccggtcaaacctccaactattccggttacaccagtaaaacctccggtttcaactcctccgatcaaactaccgccggtacaaccacctacgtacaaacccccaacgccaacagttaaaccaccgtccgtccaaccacctacgtacaaacccccaactccaacggttaaaccacccactacatcaccggttaaaccacccactacgccaccagttcaatcaccgccggtccaaccacctacgtacaaacccccaacgtcaccggttaaaccacccaccacaactccaccggttaaaccccccaccacgacgccaccggtccaaccacctacgtacaatcccccaactacaccggttaaaccacctacagcgccgcctgtcaaacctccaacaccacctcccgtaagaactcggataggtaataataattttctttcaaaagtgtgatgattatcggtcgttgattagatcggatgtataattggactaaattttggacggtttagattgcgtgcctttatgtgggacgaggtgtgggcaacactcgaggaagaacgtatgtatgagagcgtgcgtcacgtgctgctaccgctgcaagtgtgttcccccaggcacctacggtaataaggagaagtgtggatcttgttacgccaacatgaagacacgtggtggaaaatccaaatgtccttgaacctttatatgacgatggttgttaaacgaaataatttaaatcaatggagtttttataagtttgtaatgcgtttgtttttgttatagtaatattgagttggatctttgtttacgggacgtagaatactaaataatgaaaaaaaccttctcgatgaattaagggttttatgaatttgttttgtattgaataatatagggatggataaagttttattattctaacaggttactttattaggcatttcttcggctcatgtaactcttgtatcgctgaaactatgtaatagatagaagaacctaaaaaaagaaagaaaacaagaaatgcacatagcgaagctcaaaagatgagtgttctgctagcggtaatgttgttattcagttgggtcaaatgctctaattgcaaatcttatttgggccttatatagactcttatgtgcatatggtccagcctatttgggccgatgtgtttgaagatcatttgggaaagtcttgcgcaaggagaacttacttgggacttgggagacttggagtaacaaattcgtcttggagtaacaaatacatgtcaacttattccacaagttctttgtgataatgatatacatatttaaatgttttaaaaaagggaaagaataaacaaactctttgtgactttttgggtatttatgattcttttggtccttctcttgtacacatttgagtcctatcttatatggtaagctttcaaatgcaagcgtgttatttttattcacacttgttctatcttaatagtatgttgaactcttcgcctttggcgattcttcccggaaaagggaccattgactttcagatacacttcttttttttttttataataattattatcagttcaatgatttttcaatatggactctcgttctcagacatttatttctctcagtcttacaatataaattttcattcttaccatccataattttgtattgtcttctccacagatctattccagctcacgccatggagtcttcttcttcactgtaatcattacaattcactctcttgtctttctaacttaacctgctttgttcagcttctttcgtttcttgaaaaccgtatttttttgttgatgatatttttatttcttgttccttagacattgacttaaattcacaattttcctggtttttagaaaaggttctgcacttgggaagcttgtggtgacctctggtctcttacatagctcatggagtaagatcttggagatacataacccaccttattcgaatcatgatccaggtctacaagtttcaaaaaaaaaaaaagattcaggtctagaatttcagattcaccgagaagagaaattcacacttgtggtttttagcgcaccaccgatctgcagaagtagtagctctgattctactcttcttcatgtgaaagataaagaaaatcctttcccattcctctgctccgagaacaacccatcattctctcttcacacacctgcttttaacctttttacctctgcttctactagtctcacttacctcaaatcagaggtaatttaatctccatctcttcagtcttatctcgtttttaagactaattcagaatcttgaaagttagtgtctgcagaaatatatctctgccgtgtttgcaattcagtccaatagctttttaatactctgtttcagattttgtttgatctagtatatgtttctttgtgtattgtctggttttaaaagtcaacaactataagaaacagaatctttgtacgtagaaaacttgaaagttatatgtctcttgcagttgctccaaacgctcaagtctgagaaaccggtgatcatcaccggagctgcgttaggagggtctgttgcatctctctatacgctatggcttcttgaaaccatcgaaccgacgttaaaacgtcccttatgcatcacatttggctcgccattgatcggagacgcttctcttcaacagattcttgagaactctgtgaggaattcatgtttccttcacgttgtatcagcacaaactcgtatcaagatggacttcttcaaaccttttggaacgtttttgatctgttttgattccggatgtgtttgcatcgaggaccatgtggcggtcacagagttgctaaacggtgttcatgattcgggtctagtagactacagccaagttctaaatcgtcttgaccaatccatgttgtctctggcggattcaagattgatccctgaagatgttatcaaaggaatagagaaacgtgcagaaatgaaaaatctgcgatttgatatgatgtttaagaaactaaacgacatgaagatatcgatggcttatatagagtggtacaaaaagaaatgcaaggaggtcaagatcggttactacgatcggttcaagactcagctcgcgtttccgtcgaaagagtttgatataaacatcaagaatcaccacaaatcagagctaaaccgtttttggaaatcagtagttgaagaagtagagaggaggccgcagagcgatgcatcgattctcaagagacggtttctattctcggggaacaattacagacggatgatcgaaccactcgatattgctgaatattacctcgagggtcggaaagagtatcgaactacgggaaggtctcaccactatgttatgcttgagaaatggtttggaatggaatcgatattaatagaaaaggaaagatgcaaaaagagagatttgagtgatcttttgacgtttgattcttgtttttgggctgaagttgaggattcgttgattgtaattaatcagttgaatacaactgtggggatgagagacgatgtgagagaggtattgactagaaaactcgtggagtttgagggatacgtgtgggagataatcacaaaacgtgaggtttcgccggagatattcttagaggaaagcagtttcatgaagtggtggaaagagtacaaaaagatcaaaggctttaattcttcatacttgaccgagtttatgaacacccggaagtacgagagttatggtaagtcacaataatggaataatttggtaatttatttacatttcaggttactagtgtgtgattgttattattcatttacaacgagaattagtagtttctagtaaatttcgttaccaatttcttcccgtttacaagaaaaaaaagtattatatttaagaaagcaaaagcaaaagacaaaagtgtgtcattgcgagagtaacagaagtgaaataaaataacgttatttatgtgttcttgtaagggtggtatgatgaagtttacatcaatcgcaacaactcttagagtattcgtcttaggatcgtgacggattgcatagaactaactactccagatcgtaatttgcatatataacctcacccgtgtgagcaatgcctctaaagtttacagtactagtccttattaataaacttactttcaatgaaatcctccaagacccacgaataatcaaatgaattactcacgtcaaatctcactaagctactactcctttttgttaaacgtcctaaactcctaatctatatactcaataaggaaatctttttgagtataccttaggtaaagggccaataataaacccaataaaggcccattaacgttagggcaatagaggtgcattaaaaagagagcaataactaatatgttcgagccatcttgatcagtatctcgttgattattcttggtcttcttgctatgcctgcctttccatggcaaaaccctaaatctcttgaagaaaactttctgctcaagaatcccactccattctttttttgtcgccttgatctatttgccatcacataacatactttatacaatcatttaatacgacgaaagaaaatagatatatagtggcataggtcaaaatgaaaacagctgtcgttagatatgtaaaacagagtgttgaaacagagcaaatccaatggttctcatattatacaatataatgaatgttaatgagtcttgagcactttaaaaagaggtgtttctttagtttattaacaatttgtatcacattgatcatcatcatcacttctactcttgaaatgcttgcaaataacaatatacatcaagaagctaatagcacttgtgaaagccaaaagccaataatagttatcaagtctagcttccgacatatcatctgcaaaccagttatgttttccacctcttgagctcgtgtaagtctctattatcgaaatcaacgcagcactcacaaaactccccacaccgaaaacgcttgtgtacaaagcaaatcccattgttctcatgctaacaggaacctcgctgtagaagaactcttgcattccaacaactgtgaaaatgtccgagattcccaatagaatgtactgaggtaggagccacaatatgcttacggggtccaaattaggtgtagtcttcatcattttgcttatctttagtctttttctttcgactaacgcggcaataacaatggcgatgatggacaggaacatcccaatccccattctttccttcacagaaatacccttttcgtttttcgttagttttttggcgatcggtatcaagattttgtcgtagaagggcataagaaggattatggataaagtgatagtgctttgtagtgttgctggtgggatcttgaagtttggtccgatgtttctcttcatagtcataccttgctttgtgaaaaaggtcgcgggttgttggaatataactgcaaacataagaagcatcgtccatataggtaaaagtcgaagcaatagcttgacggtttcaagccccgaaaaaccggttttgcagcttttatgatcatcaggtaagctcttggtagtagtattagcttcagtgttgctacagttacatagaggcttctgatcttgcagcctatatgtagaaaagaaaagcaagaaatttagagatgtttaagcctatatattcgaacaaaccatatccaaatatttttttatggattgaatgtattaaagtaaaataacttactctagttccatggcatttaaatcgtggtcgttaacaagagtgatcttatttcttccacacactctttctttgataatctctaatatcctttgaaatggtttagctttgaggtctggatcagcataaacatagaccccgcagccacacaagaacaagaagatcaacaacaacatcgaagcggttgggattgcaaaaccgataacccatccaaacgtgtcttggatgtaagccatgacggtgactcctagaagactaccggcgcagacaccaaaataccaccattggaaaaactgagtcttgcggttcgatttgacttctttgttctctgaggatggctcgtggtcattgtcatggtcaaggtcgtagtcgagctggtcagcaccaaaggcttgtagagatgggtttaagacgccaaggcctagagcgacgagggaaagtgaagtgtagaggaagtaaagagagattgtttttgtagtcgaacgtgacccagcaaatgccgtaaatgtcaatcccactagaccctttgtttaataccaaaaagccaaacattagtaacttacgtaattaccaaaaataatttatctaacaacataaataagaatttgaaagaatactaaaataccacttttatattaatgatgacaaattcagttacaattacggattttttgctttttttttttttaaatttaatcctatatatttaatatcgcaagatttacagctggcgaataaataatcaagattagtgaggagtgattcgagttccattattatagttgattatacactaggcttaactatttctgataagatccccaatatcacattatggaaccaaactttaccaaatacaagtttagaaaacggtcggtgaaaacagttttttttttttttttttttttttatcgggaagatgcatcgaaatggttcaaatgcttggtaccaaactacatacagaaaagacaaaaaaaatatcaagaaacgttttgtgttataaaggttccatttttcaagcaaatagacctcataaaagtgcgcaaagaagagggtcacatgatcaggcatcatgcataaacaaacaaattcgagaaaaacaaatctttcaactctaactctaggatttgagtcagaaaaactcgttcaaaacataagttgatgggcttcaatttgctctcctttgttataagacaattttatcgaaaaaggcaacttgtaaaaacaaggaaaggaaagggaccatttgattaacatgtttggtacaaggaaatgactcttgattagtaataaaaagatggtatagaaataattaccacaaagtagagagaagaagaagcaaggatggtgaagaatctgtcccaataagaatcggcaaaaggagcagagaagagaggcaacatgaaagtgaagccactccaagtgttcacagtcgtggctgctcttgaattgctcatcttcactacatcagttagatatgtcactaagtttgatgcaactcctttgaatgcatatctctctatcccagcaatcactatgagaagagcacaagatttactaagtcctcttcttttctctcctccagccatcaaaagagagtatattaaagcttgtgtttgtgtgtgtgtgtgtgtattgagggagataaagagagagagagagaagaagaagtaaggttatgctttgtgtgaggaactatatttataaagcttttagaccacaaaatctggctttttctttgagaaaagttttattaatgtacacatatttgggtagaagcacacgcctctctacatctacataatacatgtctaaatatttaatctaaaatagaatcatatttcttaaacgccaaaacttacttatcttttagttcctagaaaacaaactacctttctaaaaaacagagtaaatatatatcttcagagtatacgttctatatacgtttctgctatataaatcttgtttgttaaataccttttaattcctcaaccactttttatctagactttatttttaattgagttttattcaatatatatataaagataccctgcatgtagaaactattaacggatattttgtttccctctttttaggatttgtcttttactcctttacttgaaaagagattgggacaagcacattgcaaaaaaaaaaaaaaaaggagtttgtatatagatacgtgaaaataatagaacattatgatagtgtcactatcggcaataattaattttggtccatatatataacacttttattttcatctaatgcatttctcttcttaaaaacaagtatatttcaaattgtttattggaagataaaatcacatccataatattatgtgttacgttaagatttaagaatccaatttccatgcatatgagactaacgcgtactagtaattaggatttttttctttctttcaacattagtgaattatctttcctccaagagggtatatattatccaaactcaaattaaaaccattatcaaaaactgtataataaataactaacaatccttgtttctttggagattttcagaaattcgtatttctaggagtctttctgactttaaagaagttttattattattttggaaaattaatttatcaatctgatgttaatgtaattgaaaaatatattcaaaactaaacaaaagggaagatatattaaagttgatcactttagggtttggctttggagaaagatgtagagtgagtggcgatatgtcgacttgcaccaacttacaattgttagcttacgtgcgtaacacttccttttttctttttctttttgttacataccatcatggtctctgaaaccacatggtgaaacactaaatatcaccatcccaattcccaccattaaatcgtttaaccgatatacatgctttctagtacacagaaaaaaatgattatatctttttattttaataacgtaacctagtcgatttacatggtgaaaatgctataatggttagcaagtattcaaaaaagaagaagataaatatgtattaattatgataaatacttttcacccaaaaaagttcacgttaataatagttatattttttttttttgaagcatcaaatttgatcatttcatgatttcttttttttttaactcgtcaaattttgatcatttcagaaatttatatattttattcctatttcgaaatatttaggacaaagtgggtgacattgttctaaattaaaggcttaaggataaaggagcgtgtgtcagtcgtgtgtgtgtttgacatgttgtgctttggttactttgatgataatatgtaattttgtagcattaaagttatggagagctttaaacccttcctcaaaaaaaaacaaaaatatgatggagagcttaaaaccaaacaaaagttgcatcgagtctagattatggtttttgtggttatgaattaatcttctttctataacaaaataacatctataaaaaaaaaaaacgtcgtctcgcgatttaattaaacaagtgtggtttaaatgcgatgtacaaaactatgtcggggtgtcttaatatacagataatttaatttaaagtgctattcctactaaaaatgacactaaatattatcttatcgcaagaaaaagttagggattagtcaatcaaccattgtaacgtttccatttgatccgtcattattctctcttattactatcgtttgctttaaaaagaatgtttggccataaacttatcacgcctaatttggcatataataacatttaatcaatgatatccaatttatctagattagcttagctagtaacagaatcatatgaatctaggtgtcttttatttactcgtaactcactcacttaaattatttaatcaaaattaactttggtacgccgacaacacaacactagttccaaagatagtagactactagctttggtccgtatttttgtgtttctgcaacaaaaatataagcactaacgtaattacaaaagatcaattttcttttggcaacagttacatatgaccctatgttatgagaaatgacaaagtatgtgtctagattttcgagttataaaggttattaaaaaattagtggtagaacaacgttacatgagagtaaaggttataatttgccataccaccatgactattagttataccttttctcctttttggtttctttcataaaaagaaagatacaatatttttggtgtcactagagactaatcccctcgtagcttacctacatcaattaacattcgaggatccactatccagtatccaccacagttcgtttcatgcacgatccaatcatataacaaattctggtcacaagtaacctcttaggctttttctttcttcttttgcattgcaaaaacgtacttaaaagatgaaaaatttccacaagcttcatagataaatttgaagttagagaataaggagttaggaccatatcttttgcactccaattcaatcgaatgtgtataacatatagtttatatacacacaacataataatcccaggcaaaatggtaaaactaattaatataacttgtctcaaaaagaaccggccaaaaaaaactaatgccttacagtagttttacatggacacagagatgctccagcttctactctctctttttgacagttcatgttcccggcacagcttttgtgaacaagaagaagccgattctgagcccaacctcttatagtcaacgatcgtttgaggccataccagccaataaatagtcaacgttcagtcttaagtgtgtgtatttcacttgtgaggtcgcagttcaagcttataagctcgtatttccatgggagagatcgagacacgtccttcccgtggctgtgaactatctcgaggtagctcttggtcatcgtacccaagaatctccatatcttcttgcaagagattcagtgaagttggttttacctttgaagctgcaagatctttgaacatgtcggaaaagtttactggttcattagccatgcttgtgcagtttacttgtcttcctttatggcaataagctgaatcccaagctcgtctattgaggataagagcgaaccttggcttgtcttcttccaattgctgagagtatttggatggacgaggaaccttgaaatttacaatgtggaggtcacatggtaacggtttggctaaaggagcaaaggaaccgtattgtggaacacgcacagatatgtcttgcggtttcttggcaatgaatgtgtttatggggtagtttaagtgagcacctatgaggtgagagagaagcgaagggttcctcgggttagtgttggaagcagggtctgcttgagaaatgttagattccgcaagaaggtgaaataccacggtcattgcgcggttatccatcacaccttgccctagaccccgtccgtcatcacgaaccaaccgtctgtccagcataatctccaaccaaccctctttgaggcttgcaacaccgagagattgacgagagtgcacggagaatctctgaccattggatccttggataaatgcgagagatggcattgggtagtagtttccttgaagagggatcttatcataagtttctctcctgctcatttggaaaccattgagatctgaatagaagaccttcttgttgtcaacatcagtcttgtaccggacaatcaattcccggtcatcaaaatcattaccaagaagctcaacatgatattctatctcgaccacttgatcctgaagcgtattacctccagtgtaaagacgagttttctgagagaggggtgatttctcccatttggttttagggtaagagaagacttcttgaaccagcagaccctcagaggtgactacatgtccatcaggttgaacaattggctgagcttcaccatctggtttgaacaggtaagctccactctctggactagagtacatacctatctcttctcccacaacagtctctgatccgtttctatggactatcttccgcagtgatccgttcttcacatcaaacacaagagtctgatgttcatttcggatctcagtaacgtcgttgtccagtttggagcaggaatatggaggaggacaaggaaatgggtcaaactcagaagcgtatttgagtttagacggagtagctttctcacactcgacattcccattagcaatgaaatatgttctcagaccaagagctgggatggaagctttccagtaaaggcgatgtctgccggtgaatagtttggtatcgtcatgctgcacttcaggagaaatttggctagggacacaagtccagtttgagtccaaaaccgagatttcagcgcggttaacaacaaccgtcaccacctcctctctcgtctgttctgatggattgaagagtataactgtgtgcgaatttccttcccgggcagcaattggcttgtgaactggccgagcatcatactttgatctcatttgctctgcctcgaaaaatgatggggattgatcagatttttctttctcgtggcggatcccaagaagaacttcgattgctttagacataaagatctgaaggtcttgcaatgaagtatgcatccgggtgccgtaatcttgtaccacataatccttagcagttccagttaccccatcatggtgctggaaaagagccagatttcttcttgcagcagtcaacttatacgtaaaacttgttggaaatttctcacattgaattcgatggcaataacctagcagaaatgacatcatgatctcagctccacgaagggtatgctcgagcacacgatcaacagctttgaagaaaggtcttgaaacataataaccactccaatagtcttgttgcctatctgcatatgtaaagaagtcacctgacagagaagggaaaccaacaacctgaccagagccaacctcaccaggacgagaataattcactctgtctgcttcttctcggactgttctgaaataatcctccaaagtaccaaactttgcttctgcgtttagactaggattagagttgatgtgatcaaacaacatctggtagttacggaactgagcctcggcttcatcgatactaatgtacctaaaatcatctccaagaggtataagaagtgtattagttcgatatagagtggattttttcctgtattgatccagaagctttaatgccctctcctgcacattttctagtgtggtctccactgggtgctttccccatggacaaagttcatacttaaatccccgcatccgagcgaaatcaaactgacagcaaattgcaggctctggtccacaagtgtgtgggatatcgtatgaataaaacggcatcatatgaacaaagatatctgtggtttccatagcatcccagctctgacgccaaatatattcaagattcttatgctgggcaaggtctttcttgagctcgtaatgagtcctttgaataagcatgttttcaaaacccatacgccggagaagataagccatggttgatgaatagccaaagggatctatagcccaagaattcttaggaataaccccaattgtgtcattcagccacatattaccctctgctatctgcagaagaagtgatccagtacaaaatcagtataaaaaggaaagaaacacaatgcaacaaggggctagttaactagcattatgactagccaaatgacattctaacatcacacgttctatgcataaccaaaaaaagagaggtttcacttttcagatcaaaagaggtctcaggggatgtcgaactataaccaaccataagtgacataataaatagaaacctagcagaaacagaaacattaaatgaaaatgcagtaatcatcgtcatcatctttgtttcagtaagaattaaaattcctaaaagcaaacaggagtagacaaataaagtgcctagaaaaactggaaagtcaagcgttgatgtacatacctgttcaattatggcaaaataatgtgaattagcctgcagggaacattaagaagaaaactttagcacatacaatctcaatcaaaacaatcagcagaagaatggcatgggactaaaaaaacaatttatttatttacaaccaaacaacaagtaagaaacatacctcatcattcataacccagccacctccaacaatctctagctgcccatccttaaccaatttagtcaaagcttcttgtttattaggtgaagcgtctctccaccatctctccagatatgacatctcctcccatataaactttcttcttgaatcctattaaacatattcaaaacaaacccccacacaaataagattctagctatccttcaatctcaaaacccagtaataaaaaaacaaactttagctccaaagacttcaaattttccaaaagaacgaacttctagaactctgtttcatcacgaaactaaaaaaaaacagaacccagcaaagaagtttggttatagagtttaatgacgtcatgagaattttaagacatttaagattgttcacgggataaccatgggagagaattaaaatattaaaaccaaaagcaaaaactttcgtcataccttagataaagtctcaacaatggtgtcaagaatatgtctggattgtctctgataatactcctctacagtcaatttccaaccaggatcgttatgagaatgaggaacaacgaagattttgagcttctctttctcccactcatcgtctttatacgtaactctccaaccttgtttccatggaccaccatctgtatcaagaaactcaatcctatcgtatagatctttagttgtgatatcaacgacggcgcctgaattggaatcgtttaagggtcggcgattaatattcttccgtggcttgacgatccgattggatctggaggtaaggaatcgtgaggagatcggtcctggtacgccgaagtggaagagagtgaggaggaagaagaggagtgagacggtgagtgcgatgacgaagaagttggcgaagatgaaattgactacgagagttcgttttcgtggttttcgattgatcgctagttttgactttgataacgctgttggaagaagagattggccccaaccgccggttcctccgccggtggagctacggcggctgttgccgatatacgaggagaacggcatattctcctcctcggaatttcctttttcttttctatctaacgaattaaacctacgtcgtttcgagttgtcttcttttttctttcttacttgtgttctgctctgagatttatgtaagcggatgatggtcttttagattcgatggacttttcttccgaatcctgtttggttttttgtttttttaagggaaagtaaatgccagtgggtgttatggtcttttcgacatacgctacttttttttaaggcccaagttggtgagtaactttttttggggtcggttactgttgtggagtaagtctagtatctttactggtttagattattattagataaccctaaggtcagttttataattataattattattatatttaagagtttaatatttgtatggtatcattagaaaataggaaaattattaatcatcaaatctttgaaagactaatgataaaatttattatcttatagtataactaaattttgactttttgtttcaaaatatttataaatgcagatttctacgttaaaggtctaaaaaaacaatttctgcaaaagtcctagctagatgatcacgttttacatacaactaaaacatcattagaacatgtgtattgcattgtaggtcggtattgcacggtattattttattagtttagttatgagaaaacacttacaataaagtttgtaattttgtgataaatgtaaactaaagtatcacttttctatgtttagtcaggaaattgttttgcaaaaatactctccaatatcatgcaaaacataagtgatttctaaagctatattttcctaacaatattctccatgccgttgtctcttgtctcatttgttcctttcatttgatcggatctcaactacaagaacatattaaactaacttccaacacactgatcgaaagagtttttgacatttttgttacgttttgacggaatactacagttttccacatgtggatcgcttgcataagacaaagttttgatggctttcactcgttcaaaactatgtgagactgaattatcagccaaaaaatcatcaacgtttacacaaacataaaatttagcatgaggaacgggttttccatgtttcgacaacatgacttattgaaagataataggcaaaatgtttccaccataaagggtggtgcaagaaaacttatattgctcttacggtgaaaccctagaacggctcaataaaagatcttaccattttaactatttgagtttctctttcgaggaataagagccaaatatcctatctaaacttcgggaacacgatatattatttagaaagataaagcatttacataaaacggttaaattttatacgaaagtcctacatgtacactaataaagggttgaaagtctaaacatttttaatgcatattaaccattgaagtttaaaccgctgatcaataacgatgaatttgatacgtcatgttaatgagaaacttttccgcttcattgctttacttgctaaaatctttattctgaggaaatatatcaatctcgtgttcatatgaataaatgtgtgactcatatcataaaatcctttttaagtataaataaaaagcgcgttctatagacacacgtaatatttttttttgaacaatgaatgatggaaatatcaaataagtaacaaaaagctcaaggtataaagacacataagttttttttccaaaaaactaatgatagaaataagtaacaaaaacgtgagctacagagacacgttatatttttttttgaaaaactaatgatagaaagtattatcaacatgtaaaaagaaaccttatcgaatggatatcataaaaaggacaataacaaccaaatctttttgctataaaattatgattacatgattattaacatgtttaaaacctctaattacataaatatatacactaaatatttacaaattaatttaaaagtaatacctattaaagaaaagtaaaaaatcaaaaagcaaagtgtaaaattagacaataacatttaaccccgggaaaacaagtgatagtatttcctaatttgaaaagaccccgcctataattataaaaggtttccgaggtcacaacaaagctcagatccaaacacaagtcttgtctctctttctctcgcaggtcaccgagaaaatatcttttgttgtctccacccaccccacccaggttatggattctctcgctctcgctccccaggtttacagccgcaaggacaaatctctcggcgttcttgtcgccaagtatctctctctctctgtctattacgattctcctgattttgatttttcaaattcacgtttccgttgaatttaatatctacttactctatttatgttactttcagtttcttgacactgtataatcgtcccgatgttgatctatttgggctcgatgatgccgccgcgaaattaggtgaattttatttatcatgtcttcccattaattttgtgttcgattgggttttggataaattatattatgcgttatccaattgattctagaataaaaagacaagaaaatcgcaatatcattttggctttgttttaattttggttggtatctgaaattgtaggagttgaacgtcggcgtatttatgatgtggtcaatatattggagagtattggggtataatatttcatgtttgatgatgtttttttattttcatattgtgtttgattgatttgaaattttgaggtgattagtttttgtgatgttgtgtttttgttacacagcttgttgcaagaagtgggaagaatcagtattcgtggaaaggttttggagctgttcctcgtgctctatctgaactcaaagtacttaataaacgaatcaatctatatgtttttttgtttttgtttagcttcttcaggattggtttggttgagttttgagttttgtgtcttttgttttacaggaagagggaatgaaagagaagtttgcgatcgtcccttttgtggccaagtcagagatggtaatttcatatttcagttactttgttgtgcttatgattctgataaacatcaatgaaacgagattcttatttgaataggtcgtttatgagaaagaaggagaagaatctttcatgttatctcctgatgatcaagagttctcaccatctcccagacctggtaatgtctcttatgttggagcatcattgattatagtgaagggcttagtattaattactctaggcattttcctttttagttcatgcatttactttcagtctaggatcccttagtttatgcttgtgatttttgcataagaatgcgctagtcagtgaaattgttcaggataggattcgtgttggaagctaacttggtaatatcttatgttggaacatcattgattagtgatggactcagtattactctatgcattttcctatttagtccatgcatttactttcagtttaaaatctgatacaaatgaaaactagtccttgtttgtgatttttgcataagaatactctagtcagtgaaattgttcaggataggattcgtgttggaagctaactagttgtttttgctatttttagacaacaggaaggagagaactctctggctacttgcacagaactttgtgaagctgtttttatgctctgatgtaagtgaataagtgttacggcatctctctaaacaagtctgaccaatgaccaatttattgacacctctattgttgctactttgatgtcaggatgatctggtaacatttgatagcgctacaaaagcattgctgaatgagtctcaggatatgaatatgagaagtaattctaattccttcccttaatcttttttgttctctgattattacatacataagcaataaccaaaccccatttctgtaaactctaagcagagaaagttagacgcctttacgacattgcaaatgtgttttcctcaatgaagctaatcgagaaggtacaattactatatgagcctgttcctaaaatattacaatatgcacaatcttggatactcaaatctctctcatcttttgtgttcatgcagactcatgtcccagagactaagaagccggcatataggtggttgggatctaaaaccatatttgaaaacagattcattgatggttctgcaagcttatgtgatcgtaatgtgcctaaaaagcgggcatttgggaccgaactcacaaacgttaacgcaaagagaaacaaatcaggttgttctaaagaagacagcaagcgtaatggaaatcaaaacacaagcattgttatcaagcaagaacaatgtgatgatgtgaaaccggacgtgaagaattttgcctctggatcatccactcctgcaggcacttctgagagtaacgatatgggaaacaacattaggccaagaggtagacttggagttatcgaagccctttctactctttaccaaccatcatattgcaatcctggtaaaaaactagtttctttcatatatgttttccttatatctataataatctgtggggactttttacaaaccaaagttttttttttttggtgaacagagttacttggtctttttgcgcattacaacgagacatttaggtcatatcaagaagagtttggtcgggagaaatgacttaatcatcaggtagattaacttgcggggcgtaacttcaattctctaatcacaagccaaatttcttttgctcatttgcgttaaactacagaaaaactcttacaatagagattattacatgcaaatcgaagcgttatcttttggttttttgtagaaaaaaataaaaacttaaagtagctaaccgtgtagttttaattttctagcgttcctttattgttacaatttacaaatggataccatttcagttctatgattatatatctatgttgaaaggaatttttaaaagcacaaaaagtttaaactttaatctgttaatgcttttgtcgtttggtatggttcaatttttatccttaactaatggtaactgctgaatttggttgaactagctaaattggctggaattggaatacaagtgatacatcatttgtgggattaagagaaaaagctgattatgtttcaaaaacaagcaaaaaaactcttagctagttcaaccaaatgtagcggatcgttccatttaactagctagttttactatttttggatattctattaaacaaaaatcgaaatattcagccaatttagctagttcaaccaaattcagtagtttattttagtagaatttttagtaaataaatttgtcttatttttgagatatttttagttggttgatgtggttctaggaaacttgtaaagtagtagaaatatattgaaaagggtcagtttcttgattagtgtatatattaatcgaccaaacataagaaaagaccaaaatctttggcttagtgggctcagataaataaaacgaacgaaggaagatttttcttaaatttaaagaaaaaatcataattatcaaaaatatttaaggaaacaaataaaaaacaaaaagattcatcttccaatacccaacgcatattacgcagccaccacacagcggagagagagagagaagaaacagaaacagaaacagagctcgagctcgagacgctcaatattaatggcggccgcatcagcacgagctttcttcatgctctctcgtgtaactgacctttcaaagaaaaagctaatccttcaccaaccaccaccgtcgtcatctcctcaccggctaccttatgctccgaatcgtgcggtgtcttcctccgctgtaatcagctgtctcagcggtggtggtgtttcctccgacgattcgtatgtatctactcgtcggtctaagttagatcgaggtttcgctgtgatcgcgaatttggtgaatcggatccagccgcttgatacgtctgttatctctaaaggcttatctgattcagctaaggattcgatgaaacagacgatttcttctatgcttggtcttcttccttccgatcaattttccgtttccgttactatctccgaacagcctctttatcgtctccttatttcttccatcatcaccgggtaagttaaaatcatccatctcttttgttggaacactgtgaatttagggatttttgtgggatttaggtatacattgtggaatgcggagtatcgtgtatcactgaggaggaattttgatataccgattgatcctagaaaggaggaggaggatcaatcttcgaaagacaatgttagatttggttcagagaagggaatgagtgaggatttagggaattgtgttgaggaatttgagagactgagtcctcaggtgtttggagacttgtcacctgaagcgttgagttatattcagcttttgcagtctgagctatcttccatgaaagaggtaattgtcaaacactcaaattagtgcatggtttatgtctgagtttgtgatacttttaagctcctaatacttgttttgttcttaatgtgtatattgcaggagctagattcacaaaagaagaaagctttgaggatagaatgtgagaaaggaaacaggaatgatttgttggattatttgcgttctttagatcccgagatggtacttaacgttgaggtttcctttgatttttattctcagtctcaagatttttagtctgatgacaagaaatcatattggcaggtgactgagttatctcaactgtcttcaccggaagtggaagagattgtgaaccagcttgtccaaaacgtattagagaggctcttcgaagaccagactacttcaaatttcatgcaaaatcctggcataaggactacagaaggtggtgatggaactggtagaaaggtggacacatccagggattaccttgcaaagctccttttctggtaagtcttttaactccgtttgtgcgcaaataatcaggacagagcttgttaatctcattggtggtctgtttcgtctcaggtgcatgctattgggacatcatttaagaggtttggagaatagattacatctcagctgtgttgttgggttgctgtaatatcagagaatcataaaaaggagacaagataaaaaagaaacacaaatgtatattcttctcccccattttgatttctttaatctaagcgttaagttattatctatcaatgcccccctgcaaaattttcacctctttgagttcttctaattaggtttaaatgtccagatagtgttagctaatcaaagtttatgaacaaagggaaaaagaatcagtagtaagtagcaagtcgttaaaagcataattagattatgccttccttcttgactagagaaatgtcttcaaatggatcttagtgctatttgtgtttaatagttataatttgattcattaatctcttttaatcaactaatttgactttttctatattgttgttcttcaagtaggtggtttagtctaacttctcacgtgtacccacttcaccaaaccacccatcatgataatttacacaagggtggtcaatttttatttatatttcagaagaatagtgattaatcagtcaatttaaatccgaaaacgtatttagtttaaatatgttattttgatcacatatcgttatcggatgttgttttttttttaattccgtctggtttatatggatagaagtcgaacatatgagacaataaggtaggtgagttttgtttgatttattttggttcttaataaataggtagaagaacttaagaactgaaaacaaataagaagaaattcttgtgaacacgaaaccaaccgaaaaaacagcagtaggtaagtaaacttagcttgtcacacaagaagcattgcactcttttacttcaaatatacgaatttaaagacatcttaattaacggtactactaaaagatgggactccatccagtctcagaggccaacgcctcaagcccctttggttccctctctgcggctgaattctactcccgccactccgtcacccactcctccgcttacgtcaccaaccccaccggtctcaaactctttacccaatggtggactccactcaaccgtccaccactcggcctcattgctgttgtccacggcttcaccggcgaatccagctggttcctccaactaacatcagtcctcttcgcaaaatccggatacctcacttgcgccatcgaccaccaaggccacggcttctcagacggtttgaccgctcacatcccaaacatcaacctcattgttgacgactgcatttccttctttgacgacttccgtaaacgtcacgcttcctcctttctcccggccttcctctactctgaatcccttggtggcgcaatcgctctgtacattactctccgccagaaacaccaatggaacggtcttatcctcagcggtgcaatgtgctccatcagtcacaaatttaaacctccatggccgttacaacacctcttaaccctagctgctactctcatccccacctggcgcgtcgtcccaactcgcggctccatcgccggcgtctctttcaaggagccatggaaacggaaactcgcctatgctaacccaaacagaaccgtcggtaaaccacgagcagccacggcctatgagctcgtacgagtctgcgaggatcttcaaaacaggtttgaagaagttgaagtcccgttgatgattgtgcacggtagagacgacgtcgtctgcgatccagcctccgtcgaagagctttaccggagatgcagtagcagagacaagacgataaagatttatccagggatgtggcatcagctgattggagagtcagaggagaacgtcgacttggtgttcggtgatgttttggattggattaagacacgatctgaaatctccaccattcatggtggtaccaaagcttaaagtttgcatatataataaataaacaatcaaaattcaaattttatattggtatacaaatccgagaattttgtatttgagatcctcaagaataggtcaactaaaatcctaaattctaaagaaatattgttaacgaaaagatgagagtaagttctaatctcttgtggatgccactgaagaaaaatgaaagatataatgaaggaagtagaagggaaagtgaagttttcaatggcggattcgacaatgatgttacttgttcaacaagcaatggacaaagcccatgaaaagatcaaaaccaaacacggtcttctcctccgtctcaatgccatatccattttctacgagctcgctgtgatacagctagagagctgtcttagttttgtcggacaagagactgataaactagagagtaaccacgaggaagtggttcgagatctgagagagattaaagacaggcttcaccaccgtctcttagagactgaaatagcgattcttgagaaagatagacagttgttagagatgtctgagaaccaagagtctctgagaaacgtgttggagagtaaagaaacagagttggttcatttgcaagatcttgagaggaagagatttcatagtaagattggggattttatcaaggaagatgagttttctgagctgaagagctctgttgatcaacaagtgatgaatcttagacaaaagcttgagacagagtacgatgaattgagaggagaaacagaggatccttcagcggttgatattgatgttttgaaagggacaatggatcttgctttcaacaagatgcatcacgcgatattcttgtcggaattgggtcctattgagcagagttggagatggtctatagagagagattcaatggcgttactgataaaaggtttcatgaatggtttagaggagaagatggagaaagtaatgatagttgtaaaagattatgaatcgggttttaaagatcgggttggttcgattcgtagagagttagagtgtttagaatctcagtctgatcagatcatcgtccataggtcatcatctcctagatcatgtgtagcaacagcagcaacaatatcatcatcatcttcaatagataatgaaattggtgatgataaagaagcaaaagaagatagagaagaagaacaagattcaagcaattttcctgtttcgaagttgataaagagtcatgaatcaatcattaggaggaaaagcgaagagcttgctcctcctaagatcgagtctattaaacgacagaagagttgcaacggctctagctcgaagcgagctattgatgatatcgtttcaggtcttgatagcttgatgagtcttaacactaagttatttgaacatttgtttgatgatgatgatggtgatagacatgagcatcatcctgaagtggtaatggatgacaatttagatgatgtttggatgaaaatgcagaagaataactcggtgttttcagacaatgcgatagaggagaaagaagatacagagattagattaatgatattggaagatacttacttgactttgctcaaaggtctaaaagcagatgagatcacaaacaatagaaaagcggaagaagaagaagaagagatcaagagtgaaaagatcgaatccgaggttaaatgtatggattgtttagagaatttgaatagggagaaagattatgagattcttcttgaagatgaagaattcagacaagaactaagttggattattgtaacagagttgctaagagaagtttcagagactgtggagaatcatgaaaagattgaagcaaataataaaagagtgattgaggaagaagtaaacagagcctgcttggagatttctttactctacgatgattttgatttcaagattcaagagaagttaaagatggtaactttcaggtgagggttcttgaaaaaacaaatcaaaacgttatgttgaatcttaacaaatgatcttttgtttttttttgaggttacaaaacttggagattaagattgattcaacgatggattttatagcagagttaaggcaaagagaatcagtttatagaacagcttttgttcttaggtctgagaatctcaggaaggcagaaactgaggtaaaatagtttgtgatttcgttcttaaaatgtgagaacttttaatgagaaactgagataaatttccaggttgatcttcttggagatcaagttgattcgcttgtgaagcttttacaaaaaacactttggacatttcatcaacatccattgcttctctgcaataactcagatgtaagttaaccctacctctctattttcaagtagattgtattgcaagtaagttttattttgaaaaaaaaaaactgtattttcttattggctttttcagatattggagatctcgaagatgatcaagaaagagttattatctgaggattcataaaaccaatatagtgtttttttttttttttttgggaaaccctttttccatcaattaaatgtttcaaaatataccaaatccagttccactacaaccattctttttccctcgttttttcataacttttttaatataaatttatgaaagtcaacttcaatttatatatggttactaagaaatctgtaaagaaactttaaatttattaccaaaatattgttgtattgaaaacgataagtatgttgttatacatttgtaacattactagtaaaaattaaatgacccaccaatattctcttatgtagtccaagtcaccattttctataagaaccttaaaacacaagatcttatgtattccactcagacaaaaacacaagatctttaaaaaaagactagtccattttcagaaacaaaaatgggaataaaacagatcgtcaaagtgatgttcttgtttttatgtgtgatcatggcgttgctctgtcatcatcaatccgaagttcaagcggcgcagaaaccaagtcctgttgcttgctggtcgtcaataaacaaggttcaaggttgtgtggatgctgtgaaagctgccactaaaggagattataaaggtttgagcaaggattgttgcctcgccatctatggcctcatcgacgattgttttccgattgttttcagcggaaaaccagacattgcagtactcgttaaggatgcatgtgctgttaattaattattagaccaaatacttttttccttgtaacgcaagacactctgcgtctgcgtttgggtaataccttatttactaaagaaaatattataaatcaataaaattgctgtttgattttctcacttaccaaaatcaatacaacaatctagtcgagcatgaactaaatacgttttcaacatccaaaaatcatcgattgggtattacgaaatgtggccaaagtgaagaactttggtctgtagaatcacaaagaaaagacatgtgattaccttgcaaagctccttttctggttagtcatttaaagatggtaactttcaggtgagtagaaaaatggctattaagaacaatcaccaaaactttatgttgaaatcttaactataatgatcttatgtttcttttttgaggttacaaaacttggagagaaagattgattcaactatggatattatcgcagaattaaggcaaagagaatcagtttatagaacagcttttgttcttacaaaggcagagactgaagtaaaacagtttgtgattgtgagattttttagtgaatcatatgaaactgagaaaatttgcaggttgatcttcttggagatcaagttgattctcttgtgaagcttctccagaaaacaatttggatatttttcatcaatatccattgcttctctgcaataactcagaagtaagttaacctctctatttttaagtagattgtttcacaagtaagttttatttagaaataaaatctgtattcttatctgaggattcatagaaaccattgtatctttcttcttttggaatttccctttaaaggttttcaaaaattccaaaatccaattctactaaaaaccattctttttctctctttttcataattttttttaatataaatttatgaaagtcaactcaatttatatgatttctaaaaatttgtaaagaaaatataaatttattactaaaataattctgtattgaaaacagtaaatatgctgaccaaataattattcttcaattgtagcaattaaatgactaaccaaaattatcatatttagtctaagtccaatttctataagaaccctaaaactccttttttcaacttctcagacacactacaactacaagatctaaaacaaaacctgtccaattcctccagaaaacaaaaatgggaacaaaacagatcgtcacagtgatgttcttctttttatctgtgatcatggcgttgctttgtcatcatcaatccgaagctcaagcgccgattccaactcccggtgattgcttctcgtcaatcaagaaggttaaaggttgtgcggatgctgtgaaagctgccactaaaggacatcttctacgtttggtcaaggattgttgccacgtcatcaatgaccttgccgacgattgttttccgatcattttccccggaaaaccttacattgccgcactcgttaagcatgcatgttcttaattaataattagatcaaatacttttttccttgtaacgcaagacaccctgcgtttggggatttacctcttttcctaagaaaatttattaagtcaatagaagtgctgtttgatactctcacttaccaccacaatcaataaaatccagtcaatgcatgcactaaacaagttttcaacatccaaaacaaaatcctccaacaacattttagttctcaaattataaactcatgtacaataaaaaggaagataaatatcctaaaaataccacactattaagtttttttgttccaaaaatatcatcattagtttatttcccaataataatacctcatatattcgtataaaaatatgttcaacgaaaataaattacaaataaaaattttaaaactatatttgggtcccacattttcaatataaggtttaatattctattatttaaaagagattttaattcattttaataatgaatgtatggtattataggaataaaaacactctaatgatggtatctttggaataaaaactaaaaatcttgtattttagagaattgtccaaaaataaaagacatttaagttgtattctttgagaagctcactttgtttttccactccgttaaacacatgccaatgtatgttagtccatgaaacactttacattattcttggacatttcctcggacataaaaaaaccaatatgacaaaagcttaagcgcaagtggcaaaacattgctcttaagaattactcaatctatctcaatataccaatgtactcaatctatctcaatggttggataactgttaccacgagcattaccacattataaacccagactctcacgtcaatagtcagtggtaacctcatgaagaaattcatgaagacttaggtggatgtcacccaaaagtcattcgtaaatcgtaataagtcagtcgcatatcaaaatctgatatttgataatcattctcataatagcaaccctcaacatcttgaacaaggtaaagaaaataactagtctcacccagagaaaagttgtatctataaaactttttcaaaataaaaataaattaaaactaattctcagtttttttaggcattttaacgaacaaattttgtgcagtttataaactatcttaataataacaacacagactgtgatgaaagattcgacgatagcaaaagtaaggcaacatcaaatataagtacgatagtgataagaaagactagactgtggaaaaaaaaatctcaaaaaagaaatattaataagatatcattagatcaaaagatttctagagttatacaaattattttacttagcagaaaaaacaagaatatgtgggtaaatctttttataatattttctacttatttactaaaccattttgtatataacacttaattacatcgaatttatgataaaagaaaaataaatcgcatatcatgtaatcgtaaattcgtaatctagaattcgtatacaatatacattgatactattaaccttaaacctacacagctatacctaggtatattaacagtcacatataataatcataaatctcggagattaacgagtaaaaatgtagtatatgacattcatataaaccataataaaaccacatttaaaggttttgcgcttgaattactttacttgaacacaaactaagggaaatttcatccattagcttactcaaattggttacttagttataagttattattattattttttattatttttttttgtgaacacttagttataagttatatgaatgtcatatactacatttttgacacatatacatggcccatggggttacaaaagaaaataaatgggctgagatagtaaatgggccgaataaattttatgggccaacaaattaaatagcaaagaagcccatctacgaataacctcagcttcactctgcttgtcggatgtgataatctgtatcgattcccttatgattacttcataaatcatcgattgggtattgcaaaacgtggctaaagtgaagaactttggtctgttagaatcacaaaagacctgtgatttctctggttctgttactgttctttctcggaatgagaggaatttttctgattagatcaaggctatcaatctttagggctcctgcagttaagtgtttaagatttagtaatgttttgcctagtttgagcaataattgtattgttcgactgtatatggaacctcccgtagcttgtgtgcttcctttaggtctgtgttctatgttctctacttccatagctgattcagagcaagtgggatttactcggagtaacattgagaaagatgatgagagtgacattgatcttggttgtagtataagtgatgagcttgtttcagaggatgttggaaagatttcgaagctggtgaaagattgtgggagtgaccggaaggaactgaggaacaagcttgaggaatgtgatgtgaagccatcaaatgaattggtggtggagattctttctcgagttcgtaatgattgggaaactgctttcactttctttgtttgggcagggaagcagcaaggttatgttcgttctgttcgtgagtatcactctatgatctcgattcttggtaaaatgaggaagtttgatacagcttggactttgattgatgagatgagaaagtttagcccttctcttgtgaactcacagacacttttgatcatgattaggaagtattgtgcggtacatgatgttgggaaagccataaacacgttccatgcctacaaaagattcaaacttgaaatggggattgatgattttcagagtttgctctcggctctttgtaggtataagaatgtttcagatgctgggcatttgatcttctgtaacaaggataagtatccgtttgacgccaaaagtttcaacattgttctcaatggatggtgtaacgtgattggtagcccacgggaggctgaaagggtctggatggagatgggaaatgttggagtcaaacatgatgttgtgtcttattcaagcatgatatcttgctattcgaaaggtggtagcttgaataaggttctcaaactttttgataggatgaagaaagagtgtatagagcctgatagaaaagtgtacaacgcggtggttcacgctcttgccaaagctagctttgtctccgaggcgagaaatttaatgaagacaatggaggaggagaaagggattgagcccaatgttgttacttacaactctctcatcaaacctctatgcaaggctagaaaaaccgaagaggctaaacaggttttcgatgagatgctggagaaaggactcttcccaacaatccgtacatatcatgcgtttatgcggattctaagaacaggagaggaggtttttgagctattagctaaaatgagaaagatgggctgtgaaccaactgtggagacatacataatgctgatccgtaagttatgtaggtggcgcgatttcgataatgtgttattgttgtgggatgagatgaaggaaaagaccgttggtccagaccttagctcatacattgtgatgatacatggtctgttcttgaatggtaagatagaagaagcgtatgggtactataaagagatgaaggacaagggtatgagaccaaatgaaaatgttgaagatatgattcaaagctggttttcaggaaaacagtatgcagagcagcggataacagattcgaaaggggaggtcaataaaggagctattgtaaaaaaatctgaaagagaaaagaactttctccagcagcctgaggtgagaaaggttgttagagagcatggatattcgttttgggatgaatagaaagctagaggtcaagaagaatcataggtaggagaaccatcttaaagagctgcttttaccagattagctagttctggttaggttttgatcataacaggctaattttgctttacgaagagaagagatatagttaaattgttcctgacgaacattcgaaagagaagagattagataaaatatttttaaatcatatttatataagacgaagaagaatctctcttttgaacctgtctatgtagagatacaaacggagagcataaccaaccacgtatgtgtttccattatttacaaacatacatttaaaaaaaaaaaaaactaaaatcaagattaaaattagaaaatacacactactgtgcaaaggatagggaaggttgcagagagaacttggtctctaaccttcctttgtgtgttgaagtaaaagagaagttttgcgtgttcttgtttgctgtcatcttgaagctgagagaaacttgtggaatcttgctattctattctgtgataatttagccagtgacaagttgttgctcttcttctgtttcttcttcctgtggaagaaatcctctgtgtccaaaacatacgaaatctacaacacgagatgttatgaatcacataagagcttgattttgtaaacaagaaactctgtattggttgaagacctgtatcattaccttgtaggaagagcaagacatcttgcattcaaggccattaattacttgtacaccttccatggccttgcaagctactgcaagatcatccagaccattgtatccacgcatgttcctgcacacaaaaaaggatttggaattatatgtaataagagtaaggtgtgaaaagtactgaaactcaatatacctttgtagcacaatgtcctgtagctctttcttccctgatgagttggagagaaactcattttgcaaataactcgtaaatgtgggctccatggagactgcataagcgtcgggcttttcaattatgttatccataagctggattgacaaacgagatggagaggaagactgcgtatatgaaaagcaaagaaaaaaagtgacagggtcaatgaatcatcactaatcctcaatgaagagataggagaaaggtgagaattggtttcgggttcttacacattctaaccgataaatattttcttcatgaaggaggatcctagcgttttcataatataccgagtcaaataccctcccaggtctccgggaattctcatactcatacaactgaagaagcttattgtccatgtcgtcagctacaacagcttgaagctgcaacagatgaaacaaagtcagatttgagaaggattataatgtttgaaaaggaaacatgatcaacctaaaaccaataaagagagtgaatattacctgtttaaccaatttgtatatcagtttttccaaagtgaataaaacatatgactggtttccaataatagctcggcattcatcctcaaacttggaattttcagctgagccattaagcagactaaacagagcattcataaacctgcagaacatacaaatacgagggtttataaattttactgaagtgaataaagaacctgcatagtctacataaaagcaatggaccaattgtatatctacattggttaaggaatgtaccttgcataaggatctggtgaacaagtatctttagtgtttctcagtttcatttcactgccggagcaatatgttttcgcagacagaattctctcgtacaggatctggaaataaaagccaattaaaaagaattactaaatattttcaaggtaaaaagtactttttcagatttaacgtgagaaagcaaatcataagaatcaattgcactcactcgatgaagcctgaaaaggacataaaagtcgtcattcccatagaatactctggaatccttctttttctcatcaaccaaagccgctgcagctatatgttttgacagaggcttaactgataatagaacacgttctgatgacggaaacaaccctttgtcttctataagatgtgactccattccctctgcctctccttcactttcagctttaccatcaatctcatcatgctcaccctcttcctcaacgccattatcgtcctgtgaacattcgtcaccaatagattcagttcccgaagcatcctcaccagcttcggaagcatcatcaccatcctcatcgtcagcgtcctcatcattttctccttcagcttcaactgaatgttctgttttcgcagtagccttcaactcacgatcttcgtaaacaacaaagttgtcttcggaatcaccaacaggtgataattcaccttcctccttctcaattttggatggaccacccgattcatcataattactgttggctttagaagtatctgactgcagaccatttcctaagactataattcggcctatatcaactccctagagaaaaggtcaggaacagtgagaatggtcagaagagtccataaaaagcagaacagacaaataagaacatataattaaaatgtgaaactgaatacagtacctgcgtatgttgaatgctatcaactttatctatagcttcacttggtttggataatatgccccgtgaaccttgaaaataaaagtaaagcaccgacatgttaaggtaggtatagcaaacacaaactgaagaaaaggaaaaaattaaagttcaatcctgaaaatacctgacgaatctctgcttcctactttaccattattgttttcgaccccacttgggaaagacgaacttgaagtggccactctttcatcaacatctccagatcttttagcagctccatttccaatttcttgatctttttggggtttttcagcacaggtggcaacatctttattagcaagatcaccatccttcaaattttctttccctgaagaatccctattcaacaaaccagtctcaccatgcttggagaccccagatgaagcatgcacatctccattggtagcaaattttagttgcctagaaaccaaacttatcgcatcagaactctcattagcctccccactggtaaatgcacgctgatgctgggtttctacaacatcttcaacagaatctgaccccttggccctgggtgcaacatcaagcatcagctccaaaaaattagcccagagcttcagaactttaccagtctgctcttttgtagaacatatctcctcacaagaaaattggactagtttgaacaggtcttcatgaatagctctgtcgagatagtcatactcgaggtgaggaattatcggttgcctgtaaccagcagaaatagacagaacaacatcgtcttctttctgagacttctctttcaagtccttgacttcagacaccagcgctggtatttaaccaaggattaaaaaaaaacagaattatgagaacaagaaagtaaatgcaagaatagatccatgacagatggttgtaagcaattataggtgaggacaagtcctctgatggactgagcacattccaagagtttacttaccttttgcactcaaattcttagaatcttgctgcttaaaatagaagctgcggtgatcaagtgatttgtaatggtttttcgcatacacatccgcccagaccacattaaaaccttcacggcattttgtccattcatcttgtttctgcttcaatcgagttagaattacaggaagtgcagcagctggattcttacgtattaagtctgtcacgtcaagaccatggtctccataaagtctctctatacaccttagatttagtgctgtattaagtcaataagaaaatggaaagtgttagcttaaaagatgatggcttaaagatatggtaagcgaggtgggacggagagaactacaatcactaatataggtccctggaaaataaatgcccacatacctgtgaaatggtcttcaatccggaaggagccctcaaaacttattttcttatcaatgataatattcaacaattcttctgcacttttggcagcagatcccacagattccaacagcatgtccaactcaaatctgtaagaagaagcaagtaaacaatcttaacatacaaattacttaaagactacaaaagctatcaaatgtgtaatactttttgtaaacgaacctatcatcttcacatctaaacaagctttcttcatattggttcctgcgcatgtgcttaaaagagtagtcttcacttcctgaagtgacagaaacccagtgatcatttaacacagcagctcctgatttctgtctgtggcgcacagacgggattggatactgcaaataagatctaatataagtacaattaaaatgtcactgtatgcaatatagaactctgaaaatcttattacatctggagggagaagccggtagctaggagtgcaacgctcacaatcagatagatcaagctcttgaatagatttccccatgtacttgtccttggatcgctctttttccttagcagcctcaacgtcacgtttgtgttctctatctttttcctcccccttcactgatctagataaattttcttcactaccaagtgattctgcagcaagtgtaccaggcagtgttatttctattcctataacgtacgaaaaaaaagagaaaagtatactcatagacaagaagctaggagactgctgcctacttttgctcataacaccagcaaggtgctggaaaccatctgcacaaaaaggatgatgatcagaaacagctagataacttattaagtaaaacgacagtatgcaatcttatataccaatactctcacaacgctcaaagaactgattgaactcatccatgagatcagggaattttccaagcacatcggaaacctggatgaaagaaagtaacgtaaggacaaaattttacccctataagtatcaacacatgcagacctaccaaattctgcagatctttcctttggataattccattgctaaacatattgagacacttcaagaatgcttgataatcatcttggctgcataatctctccttgactttctcacaaaacaaaaatgcttggttgtacatgcctaacacaataaaaggacatacaaaaaatatgatattgtaagtatcagaaaacagaaaagactggttgcacttgaacatacctgttgactagaaaattagaaaactgaaattgtggagccttaaaaacagaaaagttgttggttctccatataaataaaagtcgcttactttttagattgtttttctcagaatgtgaagcaggaccagaataagcttcaaacccctccattcttctcgaggacttccttttctctgaaaaatgttgcaagttatcttgctctgcttctccatcttccaaatcacggcttctcctttctctattatccttatcaacacgtttcctctgatctctgtgcatcttaaccattgatttatcatcattaaggtcagaacggtcaacactgtgatcacgatcaccccgagaagcaacagttctttctcgtcggcgatcctgatgatgaaaaatgtatcagcacagaaaagagagtcctgaaaacaatatagtagaaccaggaagaaacgtaaccgataccataccttctccataaacattcgacgcacaagaggagggcctgatccccggtcatcataccgttgggcttgactacgaagtaactgggcttctgtatgaggcgccaacgagtctggtaaaaacctagtgaactcttcaagcaaatccgagtggtcctcaaaaagagtagacacctaaataaacagatattagaggtataaaatatcgagaattatcgacgtgaaagtatacgagagatataatcacttcaatgtgacattacctcattgtaaacctcagtgatgtccttattatccttccgatacatatttaagatttccagaaacgacttatagacaagttcattgtgctggaaccgtgtctgcagtgatgcaaaagaaactgatacaatgagatactaggtgtagaggacacttcaaagataaggacatacatacgagaagagaacttcttgaccttaattttattaacaaagcttatggcttcttcaaattcaacagttttctttgaaggagcttctacatcatcaagcgttatttcaaaccccttaggcaaaaaggtgttaaacccgaaaatcaaattgttatgccccttaaacagctccttcactcgtgaaatcacaccagatgtatcagtcctgtaaatgcaagatgaagaattgttcccagaggcttcaaaaattcaatcgatctgataggaaagaaattaaagatcttacttttgtgccttaaagtctttcataacctcaaggaacatatcatatttgtctcgctgatcttgaaacatctcctttacttcctttaagtaggtcaaagcatcatcggtagtcaatttctgagtgttgattcccccttcaccaatgctccctcctccagtgattggagattgctcatatctgcaccaaacaaactctaatcacttagtaactttcatgcaaacaagctataatgtctcatcgccagcaattttaaattttcgaagtctgacgaaaagggaaactcacgattcgccacgagaagagcccaaaggacgtttaaattgagacccggttgcgtaaatatcatccctaattcgcttcattgctgctctgagtaaaacaaacaagaaagatcatcgattagagaagagaaatgaagaaatttgaaggtaaacccaaaatcccaatttagaaattccattactgagcatctaaaaaaggaaaattcagatgaagttgataaaacctactttctcgttctccagatttcccagagatataactccgggaagagattaatcagatctctcgagtaagagcggaatcgataagaaacacttccgatcaaattccggcgaaaacttcaaatttcccgaattgtgccaaaccccaagaacaattccgatgagaacagagtggaattcagaagaagattaaaaaacaaatgagagagaaatgttttgaattggagttgctacgactgagaagcaagagagagaaagtaattttcgaataatgaagaagaagaagaaacgaggacggaatttgcctatgaggtctctcccggcaccttctttagaattgtttcagcgagaccaaattattattatttccttttttctatttttgggccgttaaaatttataatgggcttaataaaaggccctgattattaggcccattaaataaattcgtaaggtaattagggttttgcttcatcatattcgccgaggaagatatataaagaggaaacagataacattactcagagatatcgatctaagcttgctacatcttcttatatacttctgcagtttttagtgtttttgaaattcggattttttgtttggatcagttgatgagcaaatactgcaacaatatgatggagaaatctttatgattcttagtatttaagtctctgatgatcttatttgtttttatatttcctctcttctccttttagatcttgcacatagtcgtccctttttctgaacagagatgtgatgagtaacaaattggtccgtgtttctgattaaccgtgactgagaatttattaaccaaactctgatctcaataagttttattatttgaatcttcaaatcttggttttgtattagaaaaacaatgagaactctttggtttttggctctgtgattgcttcgccttattggcaatatacgctattctgaaatcagagtatgaaagataaacaaactgtactttatgagagcccaatcgaatagttattttgaaacttctgctgtgatgatcttttgaataaaattcacatgtcagacttcagagatcttttgatctatgagaaaaaacattcataattctgagcagaagtaacaacacaacctgtttctccaatactaaaaataaccaattgtaacttgtagtagagctaagaagatattaaaaaaaaggtcgaacagagagctaatttgatatatccgtctcattcaaatgctagcttcttgatccttaatcctcatcctcatcgtcaagagtaatttcaaacccatgtggcaagaatttgttaaatacgagaattaaatggttatgtccctttaacaggtctttgactcgtgcaatcacgacagaagtatcggtcctgataaaatgcaagatgaagaatgggttcagaggctaaatatgatacttaaagaaacaaaacaaaaagatgttatacctttgtgccttgaagtcgctcataatctcgagaaacagatggtatttgtacttttgatcatgaaacacgtcctttatttcctttaagtaggccaaagcatcatcggttgtcaaagcatctttggtgttaccgtttccaggttttggagattgcccttgtctgcgtcaaaaacaaccccacgatcatcaacacaatacttcaagattacgatactaaccaaagtcttttgctaaaacgcaactagattaaaagatttgaaatagcataaatgcgaaaccctctgtgtgctcatcgctaagattgaaaatggaacttacaattcgtttcgaggggagcccactggatgttgattttgagacccagaaccgtcgatttctttatctccaatccgcttcatccctgattgaagaattatgggggaaaaagttattgcaagcagaagagaaacaaagaatcacgatgaagtttagagagactcactttcggagaagatctgaaacaaatcactcagatctttcaagtgagagcaaaatcgagcagaatcacttcgatcagcgacgattctatgcaaatcagaacaagagtgttgcgatgacaaatagaacaaattgcgcctattaaaaccgtccgtttgcaacttctttgggcctatatcccattatcagccgaagtaaggcccattaaagtatttattaggattttatttctttcttttttgtaaccatttatttttatttttatttttatttttgtaaccaaatttatgtgaacgtaaagaaaatataagaggtcatactttattgcagtgaaacgttccctcatgcatggattacaaagaaacatatttgataataaaccaccaaaaactgaacatagagattagtttagagattttgatggtatcattggtgtcatgaccatgataggaaatttcaatagtcttatgcggtggagctagtagaggcttctgcgtcaccatgaagaaatatcttatctccaagtgacaaaaaggtgttaaagccgataatcaaatgtttgtgcttcttaaacaacttcttcaatcgtgcatacaatatagaacgatcaatcctgtaaatgcaagaaattatataagcaaatctcatcaaaaccttaaagctaaaccaaaagtaaattataaaaccagtcaagatcttaccgttgtgccttaaaatcgaacaaaaccttacggaacatagcatatttgtccctttcatcatgatcaataaacgtatttttcacttgctgaaggtatgcccgagcatcactaatggtcatccctaaagaaggatctagatatatagatctttctatattccctccatgcctgcaccaaaaccaaaagaccaatatagagacagaaatataacatgttcatacacattcataaaataaaggaaccacacaattcgtccacaagccaaaagaagaactcagagatcagtcgcatgttttttcagataaaatttttatctttcgaacaagtaacaagcaacaagtaggtcaaattcttcatcgtcattatatatgcgtttaaacaaccaacgattatcaacacacttcacgattaggaaactaaccttggagaccttggcacgactatttcatcaggagtccgctccgtttcttcatgactaatcaaaacatcaacaattagagagattctacagggaaaagtaaaaaacagttaacgctttatataattaaaaaaaaagatatgaaacaaatcaatcagatctttgaagtgagagcataatcgagaatatgaaacgaatcaatcagatctttgaagtaaagcataatcgagaataagaaacacttcaatcaccgaagattatgcatacgttatgaaatatccaggcatttccgatgaagcgttgcgacttgtgatgagaatagtgcaaaaatcaggaatgacgaacgagatataaataaaggcgccaaatggtgccatctcttcgtaacttatttgggcctataataaataatgggcttttataggccgtagttaggccttatttaagtattcatctcgctattcttattttctttgttttaatatttgactttttggatatttttggttacatttgatcagcaaatacagcaacaatatgatggagagaaatctttgtgatttttagtatttgtaacatcatactgtagaaccaatgtgatcatagtgtaaggctatatatataaagaggccttttttcatccctgaagttctgtagaatatgctctctcttttatttgacagctaaaaaataaacattaataaaaaggaataaaatcgttttcactttttttttgaattgttattgtatcagttgatgagaaaatactgcaacgatatgatgaagaaattcttaatgatttttagtatttgtaacaatcaaactatgatctcaatatagttcttttttcaatctatgattttaacttctcgttagaatattacaaatttcatatatacttcagttttttttttcattaagaataaaaaataataagtagataataatgcttttgccgaaggtcaaattaagtaaataaagaaattaagtggacgtaaagaagatagcaaaaggtcaaactttatcatagtgaaattcctacatgcatggcaaagcaaagatactcgataaaccatcaagaactgaatagagagactaatttagagattttgatcgtatcatttgagtagaaaaaatatgacaagataatttcaatagtttcttgcagtcgagctaaaagagtcttctacgtcatcatcaagagctatcttgtatccagttggcaaaaaggtgttaaatccgataatcaattcgttgtgctccttgaacaactctttcaattgagcaaacgcagtatgacgaccaatcctgtgaatgcaagaaattctttgagcaaactcatcaaaaccttaaggctaaaccaaaaaaaaaaaaaaagcaatcatcttaccttcgtgccttcaaatctaacaaaatattcttgaacatatcatatttttcaatttgatcatgaaacgtatctttcacttccataaagtatgccctacattcagccataatgtctcttcttcttccatgcctgcaccaaaacccaaagaacaatagagacagacattataacatgttcctacacattcacgtaataaagaaaactaacaattcgcccacaagccaaaagaggaattcagagagtcgcaagttttgaaagtttacagttatctttagacaagcaacaagtagcccaaaaacaacccacgatagcaccaacacacttaaagattaggaaactaaccttcgagaccttggaacgtttattgcatcaggagtccgcttggaacgtttattgcatcagggataaacaaaagataaacaattagagaggttacttggaaagatatgaaacaaatcaatcagatctttgaagcgagagcagaatctagaagaagaaacacttccatcaccgacgattatacatacatgtaccagaaaatgttctaggcagatacgattaagcgttgcgacttgtgatgagaagagacccaaatcacaacgcatgacaaacaaattataaataaaggcgccaaatggtgccgtacgtttctcttcgtaacgtcgttgggcctaaattaataatgggcttttataggtcgaggttaggccttattgtaagtattcatctgcatttcttctttgttttatatttactaatatggatattttgttacagtttcagttgatgagcaaatactgccacaattggtccgtatatgaaaccgtgactgagaattttagaccaaactctgttctcaattgtttatttgtcagtattcgatatggattcttgttagaaatataaatatatttttgcttctgctatttttgtgacattttaatgaaatatatatttaatgttatgtgacagctttgaatgagagccattatatatatttttgtgacattttactatgttcatttgataagcttcttgcttctgctatgatgattttttgaataaattttacatgtcagacttttagagatttttgtttatcattaagaatctttgataataaaaaatcagagcagaagtaatataatcttgacttcttgagtaatataatatttccaaaacatttgataaatcaaattcaaaccaaatctttgccaccagtcagtcacatggaatgagtagtgaccatcaataggccctcatgtaatttgcacttagtcacatgggtgtatatctataaatttaaaacaacaatatcaatgtgagttattgaatcatgtatcaaattaattcaaaagcaataatatcaatgaaacacctatatgttagtcacaatagtcaggtaacttcatcatgcaaacaataaaaaggacatgactaatatgtgacaaacctataaaattggtatcaagttggaaaaggccaaactttaggtcggcaatagaagacaaattccaataatcaatgatctttcccgaaatttctgcactttctcaaatgaagaaagtccaaaaagatctctatacaaccatatcaaagtatcggataatcaatacagttcatttgtgtgaaaaaccacgtaaccatctctatgacaaaactctaatttgccattaccggcattgccgtggtctgaaattctcagtagataacaaataagttatgagtttctcgatccgtttagctccaagaccaggtttaataaccgacgtatcaccaatcaccgcacacggatcgctcccgttttccctcgtaccaatacaccaaccacccggagtgaccatcccgtgactccgaaacaatagttccgaatcaatcttatcgagaacaggctcatctctacggaatttcctagcaaaaggagcgttactgtccaccattctctggaaatcatctaatgtaagatggtgaggatgttgctttggaggattgtcccatgagatgaaatgtaagtcactgttaaccgttgtgttggtaaactctcgagcattgcaaatcacagtgtggaagtaaccttctggcgatgaaaggaagtttgcgtaatacattaacacaattcgaggaagattatcccatccccatatgaaataatccacaaaaggtctagataacatcatccacgcagatcctattaaccaacaacatcaaaaaaccattagagcctaagaattgttatatcacatcaatgagtgtaacaaggatcctacatttaaggaagactctacatttagacattcccattatgttgattacccaaaacaggaaagattatgaaaaatgaaagcacctgtgaagagtttgaaagctgtaggcatacttctcttctgtgaaacccagaaaacatcagctttctttgacatatacaaaccaggatcaataattataggctttgctctatgagacctatacaagtttttaccaaaattatcagagaaagttgccaaaaacaaactgttgtagattgtaatgtagctagctaaactcactctttccagccaatgttgcttgtatgatcgatgaaattgagatctcgaggaagatacgaaaacgtatgcaacagatctgaaaatcgaatcgacataataaacctcaaatgattcaattaaaacaataaacagagtctgagattataagatctaaatttcgttaccatcttgtgttacgagaggataatcagaggcactgagattgatgaaccaatcccaatcaccaccttcacgaagcaaaatcgctgcagcgtgaagtgtattagccaccatagttggaccacgatacgtaacgaaattagccttaacaatcatccgaacattttgaaatctctgaaacagagtatgattcgccacaaaaccactgagatccaatcgttcctccggtgaagattcccgatcgagatgaacaacgtactggttgttgggatgataaagcgccattagagttcgtttcagcatctgaccgtcaccagaggagccggagattagataagcgagacgtggcggcggaggaggagagacggagacggtgagtgagacggatactggatttatcttggattcgacgaagacggaggatctaaatccgtaaactgaaaatggaatcaaacgagtttgaccagaagaagaagctaagttcgttagcaacaagagaaagagagaacaaatggatccgattgctaatggaagaatccattttcggtcaagagattgttgctggttacgaacttgcatgtaatagcttttcaatttcttcatattcgaagcttcatcaatttttaacagctcttagatggattcttcttcagtggtttgtggcttagagagacttgagagtgaagtgtacgaattacgaaatggagaagatgaatgaaggaattggtgtgtttttgtttgtttgttggtctgttcttttcgtatgttcgatatctttatattacaaaaaaaaatgtttcacggtatttttgtaatttttacttttttcttctaaattttatccgatttatgtatgttttgacaatgatttaatattcattatacagtatcatgtgttatttatctgatagtttaagtacattttatcccagtcaaagtttctatttctgaagaaaatatattgtttgaataatagtaaatggtcatttcaaatcttctaattctttttagtaagtatataatggttgcttaagaaacgatacacttttttaggagtagtatggaaagggtttaaattaatgaagagcatttaactggtcttccaagtttattctttcccattttaagttattgactgttgaatgacttttgtcagactattaggctgactaatcagcactgtaatgctaatcccttaaacacgcaaggattaatgggctttaaatctatgaaagcccgaattgaaacactttaagcccacatacaaaatatcaactaaaggggatggatgagtcaaaatgtcgaacaaaccaaaggcctctatcggcctttacatgattaattcccaaagacccaaactaagagattgattttcttaatttgtgcaagtaattagcgttacacactgaaccgattttttttctctcgataataatgtacagacctatttaaagtctataatgttaaaacgaatccagaaagtctaaactgtattttacttttcgtatagtaatttttttttttgttatctacatattgaaaatgggagaaaagcctacaagagaatgtagagtagtaaaagaatttttacgagagagtaagtacgacgaaaaaaaaaagagagagtaagtacaaaagatattcttctctatcgagactagttcatccccaaagtggaaagatctacggaaatgggaagtcatcatccttggtcatagattgatatgcactgttaattaaaaacaaaagaaacagcattagtaggatggtatcgtgtaattataaataataataaaatgcgtaagccattttaggccaaaagcatagcttattggtcccacgtattcttcctttaaatgtatactatatagtatacggtctattaatctttagactagtcactaaagtcataactaatcaaataaatgttaactactacattaaaaaaactttggcaagcactaccaactgtgaaaaaaaaaaagttctttcaagttatagaacgacataaacacggaatcaagaataaacaaggagatatttttgtttatgccattgtattaaatatttaaagttatgcgtagttttaatcatataatgtaacagtttttgatcctaaaaaaaatcataaaattaaatagtgcaagtaatgaaatgaggaaatcggaaaacgtaccacttgtggcgggaaacttgagcttccaagagagacataatttcctcatcagtaaagaattcacgaaacactctctcgatatcgttgttacgaggagcaccacctagttgttcttgttccaacgcttcaagattaacgtcattttcgttggcatttgcatgggaaagattcgaaccaaccttttaccaaaaaaaaaaaaaaaaagattcgaaccaagattaacggcctagtctcagtcacacactcctcgtgtacgaaattaccacaataccctccgccgctcaagaattcgatcgtgccatcgtcgttgtttgcggtgaggtttcgaaaaggatttacggcggaggagggatctaagaagttgttagcggcggaattaaagaagctggcggcggtgggattgaagaaagcggcggtgatttgatcacgggtgcgacgtagttcagcggtgacgagtgcgatttgggttcgaagatggaaaatgtattcgtgacagccaccgacgggccggggaattgagagcgtatgttggattcgtatatgatcgagctcattgcttctctttgttcctccggagacaatcctaattctttgagctttttttggagacgggtattggaatgtagacgatgaaagttttggaactcttgatgtcgctccgccggaaagtaaggacgaaagaaacagtccggtgtgcaacgacggcgttggtgcctgcaagcggcgcattggttgacataaccgccgttatttacgccggaagagccttgcaatgtcatcaagatgatgactgatctgatgtgagaatcaagaagaaaatgagtttgttaggcatcgtcgccgattttgttatagttttttttttctgtagagtgggaaaaaagaaagattgaaacgagtatttatagagaacagagtgaagcaagaagaattataagagatagatttgataattataaagaattaaaaagcttctctaataacaaatgtcgttatagctcggtttaattctgttttttttttccagattataaaccccacttcaagtcgttttgtttaactaattagtggacgaaccatgagtcaacaatattttagaatttggctttaaccaacagacaatatttcttcaacatttgctctttcagtcatttgattggataacaatatatttgataggctacacacatggaccatttcgattacttgaaaatttaaaacgcgttctattgaccttctcattaggcattgtgaatttactagtgtataattacattgtgatatttaattgtggatacacaagaataatcacaattttagaacttcctaaaaagaacaccgtaaatattatcatgtatccacttattttttaaaaattcacttgagttttgtatagttgtcggtcggtggttaattaaattattaatgaccatgattttaataaaccaagcaaaatctatatataatggtaatcattttttttttgtaattctgattcaaagcaacgcctctgacgcctgaatcttctggctctctctctttcctcgtgccatcagcgcactatctctagctattgctctctctgcttgtgatcatcattttccccagtaacgtttctcctcgactttttctctgcgagatctcgcattgctctctcatgttatgcactacctgtttcttctatttatgatcctatcttagttgcggccatgattccgagattgttccaaacccaagcgatttagtctctgttctctctgaacgaatttttcgttgtgttttgtgaatctctgatttcagacggagaacgagagaacgtcgttcgaggaacgaaacggaaagaggttcgtatcgggaggagagagcgaaaatgggggtggaagaaggagctggtgttgataagaagataacgattggagtctgcgtcatggaaaagaaggtgaaatgcggccccgaggttttgtttcctttcgtgcttttattatcgcgttttcttgctctgacgaacagattgcgatagtttcgttgaatctgttgttactccggtgaggttttcaatttcactctgatgtctcgcttattgagattgttcgtgtgtgtggattttctaggttttttcagctcccatgggacaaattatggacaggatacatgcgtttggcgaatttgaggtagtttttcactttctcgatttttctcatgattgaggatttgatgtttctcaggtttttcatttggtgatttttcacctggagaataaaaatgtctcttgaaaagacttagttctaatttgtgatttcaattttattggaagatgttttcctggggtaatttttacaagttgtttgtgtctgtctctgtggattctctatagtgtattctcttcttttttcctttttatttgtgatctcatggacccattgttaccactttattagattatacattttggggacaaggtcatacttgaagacccagtagaaaggtacgtctctaaacaaatttatgaatatcgtttttacttttggttttatcctatttaattcatggatttgtaccaattctctctattagattatatggagagagtgtagttaatgattatcaagtaccattatattcttggaccacaaattcaccagggactttactccctttactgtttcagttggccgatttgtgattgtttgattgctttctattcctctggatatcctcttgagaaagttcaagcatattcttctttaagaaagtgagttctacctttttaacctttgttgattgttcagtaaataaattgagtttggcttttgagttcaaacttctatattcaggccctttttagtgaatgaactcgatccccaatatcttcttcatgaccgccggaaagtgtatgaggtaactattttacattgcatgaaagttggcctgtgcatttctaatcaccatgtcattttcttttttcatgtctcccactcatttattttcttcacattaccgtcgttcatgaataagaagagctacatactttctcctaaattagtaaaattttctattgatgggcatctatagcatcttgagatgtatggtatcccagttcctagatatgcttgtgtcaatagaaaagtaccagacgaagatcttgattatttcgtcgaggaagaagattttgttgaggttaaaggtgaacgattctggaagccatttgtggaaaagcccgtcaatggtgagcttctcttttcaaatctttgatcaaagtttctgaaacattcttaaactacccatgaactacaaatctaagtttgattatgtgtcactgaaatattcttacatttggtgtattaggtgaaatcgtttttttatgttttgtttaattcagtcttccctctgcatatgcgtgggatgtaaatagtagatgaattttaaatttacagcctgatacactttcaagaaatgtgatttaattgaacacaatgatgtttctgagtttctattatttttccttgctatatcagcagtgatcccaattgtttccctgatttgcagatttttttaattgtctactaataatgaaattttttatgcttgtaaaggagatgaccatagtataatgatatactaccctagctcagctggtggaggcatgaaagaattgtttcgtaaggtactgcttctttctgcagaacttgacttcctgtgaattgaacttggtctaatattattttaattttcttggtacattactgaagttggctcgttcactacctaatgtctttctgcagatattggttcttctcggattgaacattttagtttcaaatgattgtaataatttgtggcacatttctgtggttagcaatatttctttctgacccaatgtttttgttttaggttgggaatcgatcaagtgagtttcatcctgatgtcagaagagtaaggagagaaggttcttatatatatgaggagtttatgcctactgggggaactgatgtcaaggttgtgatttttgttgctgtctagataagcttattctgttttaatccatgaccaggctacttaacctttcttaaaacattgaatgtgtttttatgctcttgtttatccaggtctcataaattgagatagttgccgtgttaatgtccttatgctgttttgttgtcctgtttgttcctgcaatggatatttttccatgtcgtaaggctatctggaatagttttttttttctggattatgttttggttgaagcttggctttgacgagtttttgactgacagtctaccctgaaatacaggtctacactgtgggtcccgaatatgcacacgctgaagcaagaaaatcacctgttgttgatggtgtagtaatgagaaatccagatgggaaggaagtaagtctgctgatctttaccaaaccattccacatatgaaatcttatgtcgctttttccatgaacaatggagctatggttaacagggtactaaaggcgtcgagtatatagaggaattgtaacttatgtcttatgatggtatagaatttgatcaaaaatcagtattgttattttattgaacaggtgagatatccagttttacttacacctgctgagaaacaaatggcgagagaagtttgcattgcatttaggcaagcggtatgtggttattccagttatctgactgtcattgtgtcttgcagagttctatcgcctcataattttatatgtgcaacagtaataaggagacatgcctgagtctctctcataatgcttagattggaaattgttgagctaactcttttattttaatacataagaaaataaatcaagtaattgtagattacaaatgaactgtttttaaatgttctctttcatatcttctccacaatagaattagacttagtgttaaagtcttgcttctggtgtagtttgtttgaaggaatgattacgaaatgttgttacctggaaaagttgaagatattattgtataatgcattagtggaattattttcatgtctgcaggtttgcggttttgatctcctacgatctgagggaagttcatatgtttgtgacgtaaatggatggagttttgtgaagaactcctataagtgagacactaatctggacttctatttttcttctcagttctgcttattgtttcagttatatcttcgcaaggaaaatcacaaatcattgtatatttgctgccgctgacctagctctatagttaataaattaatctcattgagtgaatttcaattctagaggtttttagcagcatcttttgccttctaaaagatcgtacattttggcataagctagtagaggcagagctcattgcttattatttgagataaacactgtgtcatcgtcatatccacttttggaactctcagtttgtattcatttggagttttaatcagaaatgtcaccagatctctttctctgtaaggtattacgacgatgctgcttgtgtgctacggaaaatgtttttggatgcaaaggctcctcatctttcttcaacaattcctcccattctgccatggaaaatcaacgaacctgtccaatctaatgaaggtcttacccgccaaggaagtggcatcatcggaacttttgggcagtcagaggagctacgctgtgtcattgctattgttcggcagtatgttttagcatatgatcacctgtcctctcttaactcctctctgttcacccaggccctgagttctgtttatcttctcttgacagtggtgatagaacccccaagcagaaagtgaaactaaaagttacagaggagaaactgttaaacctgatgttgaagtacaatggaggaaaaccaagagctgaggtgagaggcttgggattttccaccttcaactttgccccgcctatagggattttctgataccgtgtattttttttttccttttttacagacaaaacttaaaactgccgtccaattgcaagatctattggatgccacaagaatgttaattcctcgtgcaaggtagacccctaataatgatcttataacttgagttatgcttgcagtatttaagcctttccttgcttaagtggtactctggaatacaaaaattttttactgattaagagaaccagtggattcaagaatttcatggatgaactgaaagaaatttaacttgaatgagtgagctaaccaaacagtggctttcatatgttaattttctacttgttacaaattcctttgctgaactggacttttgtttatgatcatcccggtaaagctttttctgtattgacgaatatgcttcattgacattaactagtgatgtaattcatgagtacaattttaaatctggcaactaacttattgtatttatgtttgatgtttagatcaggtgaaagtgatagtgatgcagaagaccttgaacacgctgacaagcttcggcaagttaaagccgttcttgaagaggttgtgtgccttcaaaatcttattttttctttcttttctctgagctatatccatttcgcagtcccattgtattgtttatagtccttgtaattagctgtacagtaacagttacagcctgcaaactcagtctcatgttatagatgtgtaaaatttgcagggtgggcatttctctggcatatacaggaaggttcaactgaagccgttgaaatgggttaacgtaccaaaaagtgatggtgaaggcgaagaggaacgcccagtggaagctcttatggttctgaaatacgggggtgttctaactcatgctggtagaaagcaggtaacactatatttgttagcagacgagtatgtcaaatgcagtgcaaagttcagtactggtattggtaatagttagtgtatggctacctaacaccagtgcaggcagttgaggaattcatctctgatttctttgatgtttgcttaattttttccacaggccgaagagcttggtagatactttcgaaacaatatgtatccaggtgacaacacattacctgcttgatttgtccaatcatttcatattctaccttccatatgtctcatacaattttctgaaacagtccattgtagttgtgttgatcaatatacatttatttctaagtggttaatgaaaaactggggatatgctttcaggggaaggtaccggtttgctccgtctccatagtacataccgtcacgaccttaaaatttacagctctgacgagggacgtgttcaggtacaactttctgccgatttcgtattgacgatgaccattgagcattcaaatgttcactatatcttctggatattcctcatcggttgcactgagatatgatatgaatgtatgcagatgtctgcagctgcttttgccaaaggcctgcttgacctagaaggacagctgaccccaatcctggtttgccattttcttttacctagctagtatagtgcctggcaatgtcataatcattaaatgtcttatctttttctctaggtttctctggtaagtaaggactcttccatgttggatggccttgataatgccagcagtgaaatggaagcagctaaggtttgtctctctctttactacatcttgattgtggcttcagcagatatgagacgaatgaaaggatgtttaggtgctatttagaagcatcaaccaatagtcagtagtgacattcataacgttctagattggatctatctctaatacaccgaaagttttctttctaaattgactaaatagaggcctttccaatgcacttactcatcgaatgtttgaactaatggtttttcatgcatggcttagatggttgaatttcatttgggaaaagaagggtgaattatattcccatatgtacagtaacaaccatgtgtaatattttacagctctgaattgctttcccaacttgcctgcaggctcaactgaatgagatcataaccgccggctcaaagatggtacatgatcacgtctcttctgaattaccttggatgactgatggggctggacttcctcctcacgctgatgagcacctacctgaattggtacgcccatgttttttcgacctttactttagtctattagcatcatggaacccggatagtgggctttctatctgttttatgaattgtatatatgctacaagccatcatcactaccgtttgcattttttagctgcatattttttccattgttaaatagtattctttgttaaaatggaatgtcaagtgttttaactacttggcgcaagaaaaaggtttactggagagcacaaaataacgttacttctctgtttacttcttaaataaataggtaaaattagctaaaaaggtgactgaacaagtaaggctacttgcacaagatgaacacgagaatctcgctgagcctagcgcttatgatgtagtccctccatatgatcaagccaaggcccttggcaagtcaaacattgacgttggtcggattgctgccggattaccttgtggtagtgaagggttccttttgatgtttgcccggtggagaaaactcgaaagggatctctacaacgaaagaagagagtaagtaaatggccatatgctctcttattctctgtttgagttttagaaatggcactgatcgttggaattgaatgcaggcggtttgacattacgcagattcctgatgtttacgattcatgcaagtaagctatgtgtttaagtctattatgttgatgatttagtgtgtatctagattgatccttgctttagtttctccattcttaatatatcgtgaatgtgttgtcaacaccaggtatgacctgttacataattctcatctcgatctaaaaggactagacgaactcttcaaagtagcgcaggtatgagctgaataaatagctgtagtatctcttccactatttgaaatttcgatggtatttccagttgtcttgctcagacagttttactttaccactactagccaatgcgtcctagatttccagatttaaactgttccattttttattgtacatctccgttttgcatttcgatcgtggactgtgttgattagggccacttatgtgttatgtggttgcagttgcttgcagatggtgtaatcccaaatgagtatgggatcaatccacagcaaaagctcaaaatcggttcaaaggtgtgtgttctcagcttggccttctaagttccacaatagcatctgacttttcctctcttggaatttccctgagggtccagggttttctcagatgatctcacaacttaccattttttttatttttttttgttttctaaataaagattgcacggcgcctgctgggtaaaatccttattgacttgaggaacactcgagaagaggccatgagtgttgctgaattgaagaacagtcaagatcaagtctcagtgtcattgtattcgtcaagaaaggaggatagatatagtcaaccaaaacttttcgttaaaagcgatgagttgagacggcctagcactggagagaataaagaagaagatgatgataaagaaaccaaatacagactagatccaaagtaaccgaaaactctcttttagattataagtggcatcatatatcttcatcatctttcttaatatcatctttttattgtgttccattttaggtatgcaaatgtcatgacgcctgaacgtcatgtgaggacacgtctttacttcacatctgtgagtaccttcttccatttctgatctctttcttacaaattatttatgtccagctacatgcaagcatccggctggcagaaatggaaaaaagtctttttgacattttagtgccactacaaggctcttcgaactcttagaattttagaatgtggtttatgactagatcaatgcaactagctttataatcagtagtgaagcctgtggaatttatacatgacttttcttctatgaaacgattgacaggaatcacatattcactctctgatgaacgttctacggtattgtaatcttgacgaatctcttcaaggagaagaaagtctggtctgccaaagcgcgttggatcgtctatgtaaaaccaaagaacttgattacatgagctacgttgtcctaaggctgtttgagaacactgaggttttataaatcaccccgtctcttttctctctcactcttgctttcaagttgttatactcactcgtgtcagaaaccagacattgaaacataaaaattattgcctgcagatatctctggacgacccgaaacgatttagaatcgaacttacatttagccgtggcgcagatttgtctcccttagaggtaaagagccaagcttatttagacccttttgtctatggatgggaaatgagtcccgagtactaaaaagaagtgtatttttttgtttatgttacataacatcagaagaaggacgaggaagcagaatcattgcttcgagaacacacacttccgataatgggaccagaaaggcttcaagaggttggttcatgtttgaccctcgagacaatggagaagatgatacgtccatttgcaatgccagccgaggatttccctccaccgtgtactccagcaggcttctccggttacttctctaaaagcgccgctgttctcgaacgtcttgttaaactttggcccttccacaagaacacctctaatggcaaaagctaaacgccaacaaagtgggtgactaatgactaatgaatgatgatgatattcctaatccatttattttttgaatcaaaattttgaattgttagtagtttctaattgagtacactaaattgttcattttgttttgtagaatcgtcaaaaaaaattgttaaaaacaattgctaattgatttagcattatggaaaatttccaagcttctacttgtcgtttgctttgatgtatattcttaagacaaaagatgatacatataccgagaaagaagaaagagttaaaaacgaaatggaatttgattcgtacctttgatattcccaaagaactaaacacgaattgataattggttccaaccagacaaaaataaaacagacacaacacaaatcctggaggttttgtaaaccaaggaaaagcttataattatgaaataattaatgaaaaaaatcccggtgattattaaattgttaatctttatatcatgtaaattaagtaactactgtagaagcacatgtgaaaaaatctcacttttcttttcatgattccttcctctttgctcgttctctctctctctctctctctgcctagtctagtctttcttctgcacatcttctctctctctatttccgcagacatcaattcccctttttgactaaaattccgcgacttgggctttgatccattcccagtgaatctcactgcttttctcacagaaaaaaatcactcctttttcctggattttgttttctcgactgatttggggaaaagctatggtggtctgattaatctctgtctgtctttggtgagatgggtttggatgctgttaaagctaaagggaattggaaatcggagaaacctaaagagactgagaataagaatcacaagaagaagaatggtgatgataataaaagtagaaatgaagaagaagaagaaggagaagcaagtggttgctgggtcaaatttaggtttatgattggttgcataccttcaaaatcagaccttgatgcttcttcttcttctatctatggctctaactgcactggtaaacataacttctctgatttctccatttttggattttgttggaattgaataaatgaacaatcttttttgtgggttttgtttctataattgtcttctcagctatatgtatgtttccattaagggtttttgttatatatgactatctttgcaaaattcacgtgatgcttgtgatctaaccctttttcaagcttccttgttaccaaatttagggacataagagttaagtgtaattttgaactgtgattgtatttggagttttatttgattacctctttactttcttaatgaatctgagctttacatatttgatgacctctttactttttgtagttacaacaatggaaagtaaatcggcaaatgagaaatcaaatgatcaaccagttggtcaagtttcctccacaacaacaactagcaatgcagaaagctcttcatctactccagtcatcagtgaagaacttaacatttcttctcacctccggaagtttactttcaatgatcttaagctatctactagaaatttcagacccgagagtcttcttggagaaggtggttttggttgtgtctttaaaggatggatcgaagaaaacggtactgctcctgttaaacctggtactggtcttacggttgcagtcaaaaccttaaatcctgatggacttcaaggtcacaaagaatggcttgtaagagacacttcttcttctgtttcttttgatttgatcacttgttgttttctgaatgtgttcctgcttgttgcaattgcaggctgagattaatttccttggtaaccttctccatccaaatctagttaagcttgttggttattgcattgaagatgatcaaaggttgcttgtgtatgagtttatgcctagaggaagtctggagaatcaccttttcagaagtatgtataaatcaaaccattttaaagttgtttccatgtttaatcgtttttcttatgatactggtgctttcatgtttaaagggtccttgcctcttccttggtctatccggatgaagattgcattaggtgctgcaaaaggtctcagtttcctccatgaagaagctttgaagcctgttatatatcgagatttcaaaacatcaaacattttacttgatgcagtacgtatctcttactctttaggatcaacatcttatatttgcaaattttttaaccaataaatcccattgtcaggactacaatgcaaaactatcagattttggacttgccaaagatgctcctgatgaaggcaaaacccatgtttctactagggttatgggtacatatggctatgctgctcccgaatatgtaatgaccggtgagtcctctttggtttcatccattttcttcaacttgaaaacattcaatgtttacatctttgttgatttgcttcctgttgaacttgttaaggtcacttgacatcaaagagcgatgtttatagttttggggtggttctacttgaaatgttgactggacgacgatctatggacaaaaaccgcccaaatggtgagcacaacttagtggaatgggcaagaccgcatcttcttgacaagagaaggttttaccggttacttgatccgaggcttgagggccatttttcaatcaaaggtgctcaaaaagtgactcagcttgctgcacaatgtcttagccgtgaccccaagattaggccaaagatgagtgatgttgtggaagcacttaaaccacttccgcatctgaaagacatggcaagctcttcttactacttccagacaatgcaagctgaacgtttgaaaaatgggtcaggtcgatcccaaggatttggatcaagaaacgggcaacaccaacccgtgtttcgaacactgtctagtcctcatggttcttcgccttatcgacatcagattccttcgccaaagcctaaaggagcaactacatagctcttacgtggtggaaataggccacaaacgaacagagctagaaggctcaagcttttatcgtcgtttttaagcaacaaggagatatttttaaacaacgttagggtaactctttaattgattaataatgtacgatggagaagggtaaatccaaatggaaaaaaaaaaaactgattttgtcttccattgctgaaagcatagaaaagttataaattgaaaacatttttgatgctctttataaattgaaaacaccaagtatctaccattttcaaacgcaaaagccagtatcccggaaacagaggtatcgtgtttgttcatctacttctggtggtcagaatgatagattcaaagtagagtacactccttggcttatcgttgggttgggcaatccaggaaacaagtatcatggaacaagacacaatctttttcttttactgatttgctggatttgatctcggcaatgctacaactttgtgttgttttcaggttggtttcgagatgatcgatgtgttggctcgaaaagaaggggttttgatgaacacgatacagtccaaagctctaatcggaataggttctacttctcttgcttttggttctttggtttgaagaataataaaactgatgactttttggttctatgtaagaatcagtacaggtgctattgaaggtgtacctatcttgttggctaaacctcagataaaaatctgaccaactagacaaaattaattagacatgtaagaagaacctcatagaaaaatccactaagggaactccaaatggaacaaagtatagcagaggcagaaaataaaagagagaaccaagtaaaagatatggaacagagtattgtagcagaggcggaaaataaaagagagagagccaagtaaaacgatcttaatggttctttatcgtcaaagacgatcctttcaatagtatttttctcttttattttctacaaatcccaacaccgaacaaaaaaaacaaatgaaagattgtttagcaaaccagacagcgatttgtccaaagatttgaagacgaaaaagaaataacacctattctacccacttcagggcccatttggtggtatcttctcagggcttgagagcgagagcaatcccaaccttggcactcttatcgatcgccttagaatcaacctctccagaaacggtgaagaacgactttggacgccactcatgttggatcagagcgttagccacaccagcattgttcactcttgccttcactgtggtcaatgggtcaagcgcgtgttgagttccgacagtgatggcgttctctttggtcgtgaagttgtggctaatctcagctccaaccacagtcgacgggctcacaatctggtagtaggatgcattcaatttctcacctttgtcattcctgaaaaaaaacagtttaagaaacaactcttttaaaaccagcagcattaaaatctcaagtcatcatttcatatggagggaggcacttacagaatgagggaagcagtcaaatcatccttggtgaagttgaaaccagcattgaaatgtttgaagttgccagattcggtgttataggccacatcagtaccaagagacaaaccattggttccaaccacaccggagaagttgacaatcggggtagctgtgaatccaacgctggtagagataccagcatagtcatggaaatactgaacctcagcctgctcagaaaacaacaaataatggttatctccaacataccaacctttaaaaaaacggaacagaaagaaaagaaagctggtggagttatatacctttccagatttgtgatcgggcaacttagcctgaacaataactttcagtccaggggcaggctcatcaaaggtaagagtggtcaaaagctgaaattattcacacacaaaaaaaaatcaattgaatactccagcagcaatcggcaacatcatatatctactagaaacagctaaagctaaaaagtctacttacagaagaatcagtggaaactttgacatcagcagtgaagttgttgttcttcacttgggtagcaacatcacccaaaaacaagcttcctttgtttgttcccgttgtagtgatcgcctacaaatttatcaccattcgacacaagaaagagtcaagtgagagtacacatgaaaacaaactgtacaaccaaatttgacataacagaaaactagacaaatctcaattttatcactaacaataaacccatcgcaccaacaaaatagagaattgacagaaataaaaacaataataaaaacttacaacaccagttgaagagtaagtggtgacactgaatttctggtctccttggtaatccctgtacagaagatctacaatagcattcaaaaaccttcagattcaactcaaatagaaaagttcaacacgagacaactactctgtatccttgatagacattttccagatccaagataaaaaatttcaaaaccagctaatcaacgagtgacccaaaaattgaaacccagagaaccagtcttgttattctatctatacagataaacgaaacggatagcataaatctgacggaaacgaacacagatattatcaatcagctcacaaaacacgaatatttaactttttatgcatctattcaaatttcaacgacctaagcgtgaccgatagaaatcggaataaaaccaggaatgagaaaccctaaccgattcaatgaatatcaacctaaacccagatcagaaaagagctcaaatgtttacgaaatgtcaacaacagtcacattcgcgtcaccatagagaaagagagagagatcgtacctctggcctttttgccgatttcagtgtagagtcctggacctttaaccatgattgcctctggaaaaatcgaagaagctttgaaagattccgaagtcgagaagaagagtaatggaggattctggagaaaatgaggtgtggtgtttgtgtatataaggggaagaagaaagggtaaccctaaattaatttatattataatattgtatttccctgcttatcaagtaaaaatatctcagccgttagattaatatgacatgagtcggtgtccctctttatcaaccgttgattatatattcccctctctccaaggcattttttttatgttttttatttgattttcgtattcttattttatttttttatggcttttttccatttttcattgcgtggcaagcaaagcaggccgtgtactctctagttttcttcatccccaaaatttatttatttttatataattttttttttgttgttgagtctttgacaatgtctatttattttcttagagttaaccatctgaattgttcttattaatgtgatatttaaattttcttaaatggtgttcttttatatttactcctatatagtatctattatcctattttttaaaaagaataagtcaaaattttgattttactagttgacatgtttttttctaatttaatatcaggagaaaaatgatttacaataattaaagagaatggttgacattattagctttataatttcaacatctaaaaaactatgactaaattaaataccatataaaatccaaaattaagagcctacgtataaaacatgttttttttttgaacatgtcatattcataggtccaatagaaaataatatgccaaagttgttggtaaggcaattagcattccaaatatcaccctgaaaaagcaaaacaataaaaaccacaaaaataaatttcaaaaaaattgtaataagaagaaggaaaaaaaaaaatcaaatcaagaaatatatttatttacccagtactaatgatctccgggtgaagattatactcttttgcaaaaacaaatggcactactccttgaggcaatgctgcctacaacacaataaatcaatcgacaaaaacatatatatgacagattttattattaacggattattaattttaatattttcacctgtaatattgctactttgaagagagtactttttaatctgatgcaatacgcagaagcaatcataagagcaggtcctaatacgaacttgagcagcattgttataatcgccatttttgtaccacatgctatgatactactttgtgatgccatgaacagacctgtttcattttttgttaaattaaatttaatttccaatcatgaaagtttagttttttttttttttttgtatagatatatagcttacctaagctgaacatggccattcctaagcctccatcagataataaatgtattgatttatcaatcatctcaggcaaattccatcccaatctattggagaaaataaataaaaacatgagtaacatttgatacaaactattaaaaaaagaagctaatcttaatagttgggaatatcacttgactatcacttttcgattttaaaatattaaaaaaaatgaatttgtagatgcgaaaaatgatcaaacagaaagcttaaaataggggaaactcactactaaattatcgcttttctttttgaaaaagagaaaaggaagtgtttgaatatgtaagatgataaagattgaatctttagatgtgtaagatgatttatcacaaaagatatgattgcagtgttaaatataagagagttttgttttcacacctgaaatgtaaagtagcccaaatgattccgatcaatgttgcgtatgtatttggattgattataagctttctccaagccttcaatagaatcttcatagttccaacagatcttgttctcactattgctacttcttcttcgtcctcttcttcttttggctcgtcctctatattagcctcttcctggtcattgccttgttttacaagaaaccaagatttaattagggtaaatcattttttatcgaaaaaacggaatgatttttagttacctgtatgttctagggaagctccagaagatggtaacgcccttgcggcgttaagctcgaacaaaaagagcaagatggtgtaccaaatcaagctttgcaagacaacaatctgctccaagatgctcgcagcttcatctccatagatggcactcaagattggcattccaagaatgagagtatttggcaacaccgatatagataatccggttatgacccaacccaattttcctcctcttcctcctgttggatgccagaatcttaaaaccatggctaatacaacaacgactaagaatttctggagaatatcagagagaatgagtttagggctcatcttgaaggggttgttttcagagattatttgaaaagaaagcaaagggatggagaatttggccacgaatttgttgatgcctgcgcattgttcgggtgagaagagctttagatgtcttgcagagaggaaacctaatgtcattgagacatagagaggaacagttgctgaaacaacatggtagatatcgagccaggagatcatgtttttatcaaattgtacaatacaaaaaaaaaaactaataatacaaatttgaagaaactcgaaggaatagtttcttccaaattaatggaaagaaactgtggttgatcttatggcatatatatgggtaaagtcgatggcttttttctttcttttgttcaaatgtggaactcttgaatttcaaggtttttgattccacaatgaatattttgtttcaaagggaaaaaatgaaacaaaaacactgggtttaatttatttttcttatttgttgaaagaagaaaattatccctttaattataattcttgttgagatgggtttgtctaaaaatctacatatatacaatactgcggtattcattttctttgaaaacaaattggcattttcttctcaccacatttatataagaaaagaacaaacgaaaatcaaaagataaaaagagaaggctgtttaatttgtcttttgcatgaacaaagaggagctaaatatgctccaacagaactttaattctatagcctttgattttttcttaccttagatacttaaacgaaaaaaaataaaaattacaaagaaatttttcccttttaaataagcatatataatggtatagcttatttatatatatatattttttatgacagtttctggtcagatgatatacaagatgccatcaaaatgtctttcaagtaatgattgtaattcttatatatgcatacacataaacataattgtagtcgtagacagaataattaattagccgatatttttcaccaaagatcatacgcatatcatatcatatgatatgagaataaaaaccaaaagaataaagaagtgaattgagaaggaagtaataatgaagcataaatatatgtttgtttctaaaattggtttgaagattgagaaataagcattttcctttataaaacatatacagatagttttatgcttttttgctgaaaaaatggaaattgtctctttcttttaagtttgcttcttacaagaaggaagcaaatgcttaccattttaggttgaacagagaaactttggaacatttgaaagctaaatttgtctgcgaaacgaatcaaagcctcatgaagttcctttagcaacagtaaaacataatctgtttgatatcagccataagttcaaatcattttaattttttttaatagaagtttttacatgagaaataagtatttatttacagtctaagtgaacgcttattcttactttttgtaccgaaaaacaacctaataacatttctatttttactcatatataagaacttaaaatatcaattataatattattttccccaaaacaaatcaatatttatcccatggaagatatatataatagtctcaatgattttttgcttgagtgaactttgtaacgaaaatgaaatgttagtaaccatatgaaaggttcacaacccacaagaaatagacttcttaatgtttaatagatacaaaatcaaagacctttatgaacaaagcaacatagcatgtccaccaccagtctagattttttctattgaatcaaaagatcaattgacaaacataaccaaaataggtaatcactcaaaactagtatataatctaagaaatataatgaatcctcctatttttatcccaaataaaacctaaacaaagaaaacatttgggagctaaaaataataaattttaaaataaaaacatagaaaccatccacaaacaaataatgacggatatccatccttagcggtgaatttctaaaattggagattacttcttaatcaagtttatttaaacatcaaaccttcacattttacaaaattcgcagtacgattcatcatcttaaaggctttaggctctaaaagaaaaaatagaaaaaaaaaagcgacctaaagccatgtcgaaagcttagtaaatttctccatataaaatcttaaccccttaagaaaacaaggaaaaaaaaagaagagattgtttaaatattatataaaaaaactatttttctgagaaagaaattttttgaaaaacaaaaaaagaaagatggagatggttaggctgtcaaagttgatgtttacgttttgtattgccgttctaattccgaccattcgaggtaacatttctgagctggacgagtattggtcgcaacgagccgacgaagccagagaattcactcttcaagcttaccattctgatccttacgaaatcgtcgatcactttcacgagcgtcactacgagtaagtcaagtcaatatatgattttgaacctaaaaacattactaatattgattcaattgtttattatctgatagctaaaaagtctttggccttactatttctgttttggtgtatatatgtatatagcaactctactgatgttacaacgcctgaggaagatggtgatgcgaagcccgaagaggaggaaaaagagttcattgaaatgctcggaagctcgacgaacagcaccagacgaagcctaagaggtaaaggcaagggaaaatggagtaagctaaagggaccttgtaccgcaagtaaccccatagataaatgttggcgttgccgatcggattgggctaagcgtcggaagaagcttacacgttgtgtccgagggtttggtcacaggacgaccggaggaaaacgaggacgcatctatgtggttacaagcaacctcgacgaagacatggtgaaccctaaaccggggacattgcgtcatgccgtgattcagaaggaacctctgtggatcattttcaagaacgatatgagcattcggttaaaccaagagcttctgattaatagccacaagactatcgatgcacgaggagctaatgtccatgtagcccatggcgcagggatcacaatgcagtttgtgaaaaatgtcatcatccatggactgcatattcaccacatttctgagagtagcggtggtatgatccgagactctgtagaccatttcggaatgaggactagagctgatggagatggtctatcgatttatggttcgtctaacatttggcttgaccatatctcgatgtcgaaatgtcaagatggactcatcgatgccattgttggatccactggcattacaatctccaactcccacttcactcaccacaacgatgtaagcattcgtcaaattttccataaaattctatctaatgctcattgatatcaaccactacatttgcattttcggggatatttgtttatgtaggtgatgttgcttggtgctcaaaacacgaatgaagcggacaaacatatgcaagtcacagtggcttataaccattttggtaaaggacttgtacagagaatgcctaggatccgatggggatttgttcatgttgtgaacaacgactacactcattgggagctttacgcgatcggaggtagtcaaggtcctacgattctcagccatggaaaccgattcatagctcctccacacaaaccgcattacagagaggtgaaaattgggttacatattgcaccaaataaaagtttaggtatgaatttgtaaacttataaaattttaataaacgcaggtgacaaagagagattatgcttcggaggacgagtggaaacactggaactggagatctgataaagatgtattcatgaacggtgcttatttcagacaatctggtaatcctcaatacaaatgtgcacacacaagacaacaaatgatcaaaccgaaaaatggattggctgtttcaaagctgaccaaatatgccggagcacttgattgcagagtcgggagacgctgttagaaaatttcttttaatttactattgatgttttaagggaaagacaattttttcaacattttgattttttgcttctaatctagttcaggaaataaataatttcaggggtgaaaatgattaaaaaaaaattctaatttgtaaagttattttttgtgttatgaaaacaagttatataaagagtaagccataacagctggttcttgtaatacataattcacattttgtttgttaaacaaccaaaactaaatcatcaaatacttttttttggattcaaatctgcataaaacatgctggtaaacaaaaatataatgataatgatattagaggtttttagacattatgatatgtttttcttaatatcatatcattagaatcatataatcaacatcttctgatttgttatgtgcttaattgctttattgtcaaagatctcaactataaatgacaattatactgcatgacaaaaataagatatacacaaataatattgccaaagataacaagtgataccaaaacaaatatttatcaatgaaaagagaaaaagaaataacaaaaacaaagattcctagtactcattcccatataatccggtgaagaaaaaaagatttcagggtcaaagacgacatttttaaattatgtatatcaaagtaaacaacacacaaaacaatcctatgattttaacatatttcaaattaaatacatgtatttttatttgtcaaatttatataaatgaatctatgaaattgacaaattatgagtgaaatagtaattcagccagtgtaagtaaataaaacaaatctaataaaccggctatttataaccaaccgggttagagtaaaccgataaaacatatgataatattttaataaagtgtatgtgtttccaaatttgcccctttgcgaagaccgaaacggataaaaaaagaatccgctgtttgaaaaaaacacagcccataggaaacaaaagaatggcccctggttttgtaatcgataatggtataatcctcttttcttatttttccctgtttttatatctcattcttattcttcttaaatccattcccagattcacacttttgatttcgtgatacactgttacattttatttttttttgttgggtttggtgagacttttatggggtttgagatgaaaccagagaaagaggttttggaattgatttctagtaagaatcaatgcaagtctaatcccaattctgtgaagaagaagaacaaaaacaagaataagaagatgatgatgacgtggcgacggaagaagattgattccccggcggatgggatcacggcggtgcggcggttgtttaatacttgcaaggaagtgttctctaatggtggtcctggtgttattccttctgaagataaaatccaacagctacgagagattcttggtatacaatttttatcagttttctgaattccttgttctgggtttccataaagttttgatttttgattggattttggtttatagacgatatgaaaccagaggatgtcggtttaactccgaccatgccgtatttccgaccaaactccggagtcgaagctcggtcttcgccaccaataacgtatctgcatctacaccagtgtgatcaattctcggtaaattccactacaaacactctctcacttgtattgttctctttcttgtggtataagtaatcatggttagggttttatcgcagattgggattttctgtttgccaccttctggtgttattcctcttcataaccatccagggatgacagtttttagtaagcttctctttggtacaatgcacatcaagtcatatgattgggtggttgatgctccaagtaagtttactttcgtcccaagaaaacttttgtgagctctgaaacttgtttgtcgttgttaccttgcagtgatttctggttggcttattagggttcattagatattcgactgtgcattgtgatagaagtaacaaaaggaaatcactttattaactttttatcttgaagatcaaatatcccaatttagctaaacattataggctcttgattggtaatacccgaaagtggtgaatgaagtgacatagtgtgatgaacttttttacgtgttgaattttcatgatttagaacattcatttatatactatttacgcagtgttaccaaacaaagcagtaatactactctctgttttagacttcatgatagtaaaatgaggaaattgatttttttctgtcttatctcaaatgcagtgagagattcaaaaaccaggctagcgaaattgaaggtggattcaacattcaccgcgccatgtaacgcctcgattttgtacccggaagatggcgggaacatgcatcggttcacagctataacagcatgtgcggtgctagacgtgctaggacctccttactgcaatccagaaggcagacattgcacttatttcctagaattccctttagacaaactctcatcaggtcagctttctatacttactaaccatgatagtctttacatacttaagagatatagattaaaagttcatgttgttgttttcagaggacgacgacgttttgagcagtgaagaggagaaggaaggttatgcatggctgcaagaaagggatgataatccagaagatcatactaacgtagttggagcgttatacagaggcccaaaggttgaagattgagagcttcttttttacccatttcgcttttcagatttcgaatcaactttcttcttctttttttcttctcatagttttgaattcttctttgtacaaaaaaaaaaagaaaggaaatcaggaaaaagaaaatatatttacagtttttaaaatagactatgaatcagcattggtgtttataatttgtttctagttaaagctgatttttaaaaatcaatatgttttttcaaagctcaaatgctagcaaaaatcaggacatactaattcgtatgagaagttgatgttctttttggttccatttgtgggattgataaactttggtccgctatagtgcagacaaaaacataagagaaactattttgttgtcagttgcaaacctttttgttcaccattcataattttattttgtatatataattttttggcaacaactgcaacagatatttgtccattccaaaaatagaaaagaagtattcgtaaaacttcgatttgcctcgcttgctaccactacttaaaacctaaaatattacttagtttggataagttcgatttagaaaatacgtcttcattttctatcgattgttagagaacgaaatcaatttatgaaccgttttttttttttttttttttctgttgaggttgtatgatgtagtaaggacaaaagtactacttgtatatattccataaaacgatatagcaatttgaaatttaaaaattagttctacattcaacaacgtaacagttaaccggatagttggcattcaaaccggcagatatgctcaaattccacggagaagaataattagtagtactacaagctgtacatggtcatgtactatgattccttcaacttaatcaatattttctgcgaatttaaaagctgattaaatttgaattc

SEQ ID NO: 1434 - DNA, 103996 bp, Arabidopsis thaliana
gaattcactcttcaagcttaccattctgatccttacgaaatcgtcgatcactttcacgagcgtcactacgagtaagtcaagtcaatatatgattttgaacctaaaaacattactaatattgattcaattgtttattatctgatagctaaaaagtctttggccttactatttctgttttggtgtatatatgtatatagcaactctactgatgttacaacgcctgaggaagatggtgatgcgaagcccgaagaggaggaaaaagagttcattgaaatgctcggaagctcgacgaacagcaccagacgaagcctaagaggtaaaggcaagggaaaatggagtaagctaaagggaccttgtaccgcaagtaaccccatagataaatgttggcgttgccgatcggattgggctaagcgtcggaagaagcttacacgttgtgtccgagggtttggtcacaggacgaccggaggaaaacgaggacgcatctatgtggttacaagcaacctcgacgaagacatggtgaaccctaaaccggggacattgcgtcatgccgtgattcagaaggaacctctgtggatcattttcaagaacgatatgagcattcggttaaaccaagagcttctgattaatagccacaagactatcgatgcacgaggagctaatgtccatgtagcccatggcgcagggatcacaatgcagtttgtgaaaaatgtcatcatccatggactgcatattcaccacatttctgagagtagcggtggtatgatccgagactctgtagaccatttcggaatgaggactagagctgatggagatggtctatcgatttatggttcgtctaacatttggcttgaccatatctcgatgtcgaaatgtcaagatggactcatcgatgccattgttggatccactggcattacaatctccaactcccacttcactcaccacaacgatgtaagcattcgtcaaattttccataaaattctatctaatgctcattgatatcaaccactacatttgcattttcggggatatttgtttatgtaggtgatgttgcttggtgctcaaaacacgaatgaagcggacaaacatatgcaagtcacagtggcttataaccattttggtaaaggacttgtacagagaatgcctaggatccgatggggatttgttcatgttgtgaacaacgactacactcattgggagctttacgcgatcggaggtagtcaaggtcctacgattctcagccatggaaaccgattcatagctcctccacacaaaccgcattacagagaggtgaaaattgggttacatattgcaccaaataaaagtttaggtatgaatttgtaaacttataaaattttaataaacgcaggtgacaaagagagattatgcttcggaggacgagtggaaacactggaactggagatctgataaagatgtattcatgaacggtgcttatttcagacaatctggtaatcctcaatacaaatgtgcacacacaagacaacaaatgatcaaaccgaaaaatggattggctgtttcaaagctgaccaaatatgccggagcacttgattgcagagtcgggagacgctgttagaaaatttcttttaatttactattgatgttttaagggaaagacaattttttcaacattttgattttttgcttctaatctagttcaggaaataaataatttcaggggtgaaaatgattaaaaaaaaattctaatttgtaaagttattttttgtgttatgaaaacaagttatataaagagtaagccataacagctggttcttgtaatacataattcacattttgtttgttaaacaaccaaaactaaatcatcaaatacttttttttggattcaaatctgcataaaacatgctggtaaacaaaaatataatgataatgatattagaggtttttagacattatgatatgtttttcttaatatcatatcattagaatcatataatcaacatcttctgatttgttatgtgcttaattgctttattgtcaaagatctcaactataaatgacaattatactgcatgacaaaaataagatatacacaaataatattgccaaagataacaagtgataccaaaacaaatatttatcaatgaaaagagaaaaagaaataacaaaaacaaagattcctagtactcattcccatataatccggtgaagaaaaaaagatttcagggtcaaagacgacatttttaaattatgtatatcaaagtaaacaacacacaaaacaatcctatgattttaacatatttcaaattaaatacatgtatttttatttgtcaaatttatataaatgaatctatgaaattgacaaattatgagtgaaatagtaattcagccagtgtaagtaaataaaacaaatctaataaaccggctatttataaccaaccgggttagagtaaaccgataaaacatatgataatattttaataaagtgtatgtgtttccaaatttgcccctttgcgaagaccgaaacggataaaaaaagaatccgctgtttgaaaaaaacacagcccataggaaacaaaagaatggcccctggttttgtaatcgataatggtataatcctcttttcttatttttccctgtttttatatctcattcttattcttcttaaatccattcccagattcacacttttgatttcgtgatacactgttacattttatttttttttgttgggtttggtgagacttttatggggtttgagatgaaaccagagaaagaggttttggaattgatttctagtaagaatcaatgcaagtctaatcccaattctgtgaagaagaagaacaaaaacaagaataagaagatgatgatgacgtggcgacggaagaagattgattccccggcggatgggatcacggcggtgcggcggttgtttaatacttgcaaggaagtgttctctaatggtggtcctggtgttattccttctgaagataaaatccaacagctacgagagattcttggtatacaatttttatcagttttctgaattccttgttctgggtttccataaagttttgatttttgattggattttggtttatagacgatatgaaaccagaggatgtcggtttaactccgaccatgccgtatttccgaccaaactccggagtcgaagctcggtcttcgccaccaataacgtatctgcatctacaccagtgtgatcaattctcggtaaattccactacaaacactctctcacttgtattgttctctttcttgtggtataagtaatcatggttagggttttatcgcagattgggattttctgtttgccaccttctggtgttattcctcttcataaccatccagggatgacagtttttagtaagcttctctttggtacaatgcacatcaagtcatatgattgggtggttgatgctccaagtaagtttactttcgtcccaagaaaacttttgtgagctctgaaacttgtttgtcgttgttaccttgcagtgatttctggttggcttattagggttcattagatattcgactgtgcattgtgatagaagtaacaaaaggaaatcactttattaactttttatcttgaagatcaaatatcccaatttagctaaacattataggctcttgattggtaatacccgaaagtggtgaatgaagtgacatagtgtgatgaacttttttacgtgttgaattttcatgatttagaacattcatttatatactatttacgcagtgttaccaaacaaagcagtaatactactctctgttttagacttcatgatagtaaaatgaggaaattgatttttttctgtcttatctcaaatgcagtgagagattcaaaaaccaggctagcgaaattgaaggtggattcaacattcaccgcgccatgtaacgcctcgattttgtacccggaagatggcgggaacatgcatcggttcacagctataacagcatgtgcggtgctagacgtgctaggacctccttactgcaatccagaaggcagacattgcacttatttcctagaattccctttagacaaactctcatcaggtcagctttctatacttactaaccatgatagtctttacatacttaagagatatagattaaaagttcatgttgttgttttcagaggacgacgacgttttgagcagtgaagaggagaaggaaggttatgcatggctgcaagaaagggatgataatccagaagatcatactaacgtagttggagcgttatacagaggcccaaaggttgaagattgagagcttcttttttacccatttcgcttttcagatttcgaatcaactttcttcttctttttttcttctcatagttttgaattcttctttgtacaaaaaaaaaaagaaaggaaatcaggaaaaagaaaatatatttacagtttttaaaatagactatgaatcagcattggtgtttataatttgtttctagttaaagctgatttttaaaaatcaatatgttttttcaaagctcaaatgctagcaaaaatcaggacatactaattcgtatgagaagttgatgttctttttggttccatttgtgggattgataaactttggtccgctatagtgcagacaaaaacataagagaaactattttgttgtcagttgcaaacctttttgttcaccattcataattttattttgtatatataattttttggcaacaactgcaacagatatttgtccattccaaaaatagaaaagaagtattcgtaaaacttcgatttgcctcgcttgctaccactacttaaaacctaaaatattacttagtttggataagttcgatttagaaaatacgtcttcattttctatcgattgttagagaacgaaatcaatttatgaaccgttttttttttttttttttttctgttgaggttgtatgatgtagtaaggacaaaagtactacttgtatatattccataaaacgatatagcaatttgaaatttaaaaattagttctacattcaacaacgtaacagttaaccggatagttggcattcaaaccggcagatatgctcaaattccacggagaagaataattagtagtactacaagctgtacatggtcatgtactatgattccttcaacttaatcaatattttctgcgaatttaaaagctgattaaatttgaattcaaatatcgtggataatgcatagagatgggagctttcttccaacaataaattaaaagatatagtaataaaataatcattcattcaatgaccaatcttaaaccattgacctaaatttcaatatagagaatctccaagttgtctttaaacttataaatctttctttaattgtttaatttcaatgtctaaatccaaaccattgaccttaggtcagtactattagatatttatacaatctattcgcaagttgatgactgatgacccaaaaataacttataagttttttctaattgtatatcctattaaagaccagcaaatatacgaacccttcgtcacaatgcaaatgaaaaacattttatactaacaaaaaatactatgcgcgtatttattgcattacatggatttatatctgaataatgacataattacattactaatataattaaacctaattttacacatctaatttttttttaagtgtcgaactattttcaggaaaggttgtaagttgtaactatatatgatcatattatatatgtaatacaaaaccaattctattaaaggttcaagtcaagatcgctgatctgtctttgcgagtctcagagacatgtaagttgaccatttcgttcactcattgtctgaaaaaaataaaaaaaaaaataaatcgtcttacttgcaaatttattaaacagtgcgaccatatgaacataactatttactctataactgattaaacaaacttatcgctaaattagaagaaaaataattaatacagttgaccaatgactttttattgtctaaataagactaaaaggttgataatctttctttgtcttattatggatgattaagccatcaataagtttccacacaaaaatatttaaatttcagcatcactctttagaaaaaaagtgacgatgtgggttatcagaaaacgatacagttttacattaaaagaaaaaaggaaattacgggtaggtaatcggaatggcaacaaattaacaaaatttcttataaaatactttgaaatttccatgtagtaacgtaactttacttagttaatctggagttaatcatgtgggacgtgctaatgacctaatgtaatatctcattcattactaattcaatagttagctgtagttaatcaattaaacaaaagccacattgcgaccacgattgtttacttaaccatattatgaactgtacacatttataatagttaacaagaaagtcttttgtttatactaaaaaatgaaaaacaaatggatgatgtaagttgagttgatcaaaatgtctactaagattatttttttgtgattaaaaatagaaattctgtgggagctcagatccccaaaaggaaaaaagtaattgaaatttggatcgagaccaaatgaagtatttaagattcaacttggcatataattaaatttaatcacattcacgaaataatttttttaaatgttgagccatcaaaaataaaaatcatttgtttcttataatacgggccatacaaatattgatttgaaattagaactaataaattgcccggtttgaaaaattggagacaggaaagacgacaatttgctagcttatacattaataagaaaatggttagctacttaatgtaatctcttcgaaattttatcatacttgtgttcgagtaacgcttatatatatgcgtataactatagataatgataaaatatatttcgttatatcttgagttgaaactaaattattaataaatataaaataagagaatagaacaaatagtgtcttttgacggaaaaaaaatgcatgttattttttcaacgccatgcagcgttacgtcactgacgaaatttgacaactatcaactatgtgaagcatttgacattcgtatgttggctgtaaaatgaaacaagatgtaacaggaatatgataatagcattgggacataaaaaaaggattaatttccttaataacaaagtcaatagttgacaaaatcatataattaccgtgtgtgacctgcgtattgaccagtatacgcaccctttggcctaccatatgaacaaggtttacatatataacaataatcaaatgcttaatactgttttcctttctcttgttgcatgatttgacttttagatttgtttcttaatgacttattgttgaattatactcgaaacttttacagaacaaaaacgttagaaaccctaaataatgaagtaacggaacttaagatacgataaaatggcaatttttgtcactaaaatggtaagagcaaaatcatttcgattatcaatcagaaattttatcacacatggattaattcaatgttatgtctatggatgtataaacttgtagatatttggaatataaaacatgtttttgatgagggaggactaataaatacactcgataaagaaacaatattaagttttagagagttgacgaatgctcatttgatgtgaggccaatagatagaagaagtcttctcccatgaagcttcaaggacatatcctttcacattatagaatctctatttgacgccgtacatttaggctctttcttgtaagtattggtttcatttaatgcatttggacatttaaataatactctgatctgataaccaagatccatatagactttacctacactttcacttaatgagaaggaagtttatactttctgttatattcatcacagtttcatcatgttaaaagttcttcattagatttaatttaaatattattggattcacgtatatatggttataaatatttgattttatttgtgttatatgttttttaacaaaataccagtaaggaattctattaagtttgatcattcgttttcgatgtactagttgtaatattttttttaattgaccctatttaaacggagaagtagtattattaccaacaaagtcaggaaataatttcttttttcgctagttagtttaaaataaataacacagatatgattggaggaaaaggtactgaaattcaataaaaatgaaataaaaaaattgaacatgttgaagtgttgacgctttgggtcccctcgaagaaactacacacaaacacaaatggctataagtaaagggtttgataatatgtttctgaaggaaaaaaacagacaacaaaaagaaaagaaaatccaaacaagaagaagaagacgaaaatcttctgatatttctgacaatggaggttcttttgaaattaccctcttcagagtctcctcttaaggataaatttggatctgttcaaatccatgaagctaataaggtaaataccaactctatatgtgcatatacaaaattatacatgtatatggaaataatttagatcacaaaaccagaaaactgaccgttcttattctttatcggtgtgttttatgctttaacgtaattcttgtatcctgagatgtctcttccactctataatggcctctctcttttttcttattatcgtaattggtttaaaaagaaaaactcaaaactctaccatgttcattttttttatggaaacgggaagattatattagttatctatctagaaatattgaataattcgttagaattaagaatggaagtatgatgtgttagaaacttagaataaagaacatttttagatttagttgagaaattaatcaacttttttattcaatgatattaatcagggtgatggtgatcatcaagaacttgaatctgccaaggcagagatgagcgaggtgaaggaagagaacgagaagcttaaaggaatgctcgaacgaattgaaagtgattacaaatctctcaagctcagattcttcgacataattcaacaagaaccttcaaacaccgcaactaaaaatcaaaacatggttgatcatcccaagccaacgacgacggatttgagttcttttgaccaagaacgcgagcttgtatcgctttcactagggagaagaagttcttccccaagtgatagcgtccccaaaaaggaagagaaaacggacgcaatcagcgcagaagtcaacgctgacgaagagttgactaaggccggcttgaccttagggatcaataatggcaacggaggtgaaccgaaagagggtttatctatggagaatcgtgcaaattctggctcggaagaagcttgggcgccaggtaaagttacggggaagagaagctctccagcaccagcctccggtggcgatgctgacggtgaggccggtcaacaaaaccatgttaagagagctagagtttgtgttagagcaagatgtgacacaccaacggtacgtcctttaaattatacattaaataagttgatctataacgttaattaaaagatttgattatttatatgtgactaatgttgattcggacatgtttattaattatgttgtatagatgaatgatggttgtcaatggagaaaatatggacaaaagattgcgaaaggaaatccatgtccacgagcatattatcgctgcacggttgcacctggatgtcccgttagaaaacaggtatatttcgtattctatatagtctatttaagaatggaataaaaaatcggtttgaatttttcgtctggttttattttcatttccgtttgagttggatctgattttagttgttaaaatgtatcattcaatttaaactgaacaacataatttaagataaaaatgtatcattcagtttattttattttttgcgtttgcctttgcgtttccatggtattatagaaagtaagaaacatttgtgaccagtgtacaaataaaaagaaacgatctaactatttgtcctcgattatgtatgttttaggtccaaagatgtgcagatgacatgtctatactaatcacaacctatgaaggaacacacagccactctcttccactctcagccaccaccatggcttccaccacatcagccgctgcctccatgctcctctctggctcctcctcctcaccagccgctgaaatgatcggaaataacctctacgacaattcaagattcaacaacaacaacaaatccttctattcacccacccttcactccccattacatcccaccgtcactctagacctcactgctccacaacactcttcctcgtcttcttcttcattgctttctttaaatttcaacaaattctcgaactctttccaaagattcccatctacaagcctaaatttctcttctacttcatcaacatcatcaaacccgtctactctcaacctacccgcgatttggggtaatgggtattcttcttatactccatatccttacaacaacgtccaatttgggacgtccaacctaggaaaaacagtccaaaatagccagtccttaaccgaaaccctaacaaaagcgcttacttccgacccaagtttccactcggtgatcgctgctgccatctcaactatggtcggatcaaatggagaacaacagattgtcggtccacggcattcgattagcaataacattcaacaaaccaacacgacgaataataacaaaggatgtggaggctattttagcagcttattgatgtctaacattatggcgagtaatcaaacgggtgcttctttggatcaaccatcgtcgcaacttcctcccttctctatgttcaagaattcttcttcttcgtcttctacgactaatttcgtgaacaaggaagagaaaagctagtcattgttcttgttttttgttttttgggtgattttttattaggtgttttaattagtcttgtatcaagatatgttgattcttgttcgtccgtttctcaaaagtgtttattttttcttcttagttaggagactatggaaccaaattcaaataaaccaaaccaaatgtacaatttttttatgttcttgtgtggcaaatattatgttctaatttgatttagattgagatgatacaataatttaatctatctactagattaatcaataatcacaacgtttttttatttaagtagaaaataataaaacaagagtcaacaatacaatttggtttcaagaaaattacaatttgaaagggaaaaaaaaatagagagagaatattatatcatatgtatatatatttagacaaaaaagtgaaaataaatgggcgtgggcctaaagtgtcggagcaactttcgaattaaaagtgtactgtaggatgaaatggatctgatatgctgattcagccttattggggctaaacaaatgggcgtgggcctaaacatatgggcgttagtgagaaatctttgatattcaccgaaaggatacttacaagtgatcaccgaaaagagatgcaaagagaaatgggaaaacataaagaaatacttcaagaaagtcaagaaagttgtaaacaacaacaacaagacgacgaataatctgtaatgatgatgattcgagttcgaaccggtttggtggtgaatgattagtaatcttttcaaaaccggtttggtttctgattttggtttgatttgttctgttcagatccgaccggaccggtttgctactaaggtatgcaaataaattatttagagaaaattaatctatttaaagtttcctccatttaactaaataagaatagcttattggttacatagattttattttatttaagagtttcatcatttataagacgaacacattttatctgtttcttactataattcaaaaaagaatagaatgacaatattcttgaccaaaaaataaagaaggaaaatgtgaatattgttctatcattagtttattcgtccatgaattatttatctattcatttcaaatttactattcatctaattaaagaaattagatggacttatatttgatcaaattcttttgaggtttcgtcatacacatttcggtttaatcaatctaaagattcttgtgaatcaaaaaagattagtgccgccttggatgtattcatcatataaatgattcaatcaaaggtctctctttctctcttatgacatgagttaatgatgaatctattttctatctttagataagccataattaattcagtcctagaatcaagcatgtaagcaatagaaagaatcaagcatataagtaaactatcactcttatcgctaaacaaaacggtataaaaatatatcgtttgcgatttgttaaatacgtcaataaatttgaatattccatagttataaagatttcaatatctcaattatagtccattattagttgtaagataaaaaaatggtgtgttcttaccaaaaataaaaagataaaaatggtgtgtttaagtttatctattagagtttggtgattcatgcaactttagctgtaaagattttgggataagaagaaaattataaatggtaaacacaatccggtgatatctcctaaattctctatgaatcacaaattcgtcaaaaacttcctattttgtctaattttatccagtaacattcaacctataaattctcaacaagaaattcatttgactcataattacttgtgattcttatttgtcttcttcaatatggcgagaagttctgttttgctatgtttaattctattggttacgttaggagttgtgataagtgtcacatttgccgacaacgttgaattgaaatcaaaagatctagagagcagtaagaaagataagaaggttgatcatgatagtacacacaaagagaagggaggtgaaaaggtagatggtgccggttctgatgatgaagacaacgataaaaaagaaaaaaagaaagagcatgatgtgcaaaaaaaggataaacaacatgaaaacaaagacaaggatgacgagaagaagcatgttgataagaagaagagcggtggtcatgataaagatgatgatgatgaaaagaagcacaaggataaaaagaaggatggacacaatgatgatgatgatagtgatgatgatacggatgatgacgatgacgatgatgatgatgatgatgatgatgatgaagttgatggagatgataatgagaaggagaaaattgggttatacgagctcaagaagggaaatctaactgtcaaattcacaaattggggtgcttcaatcatatctctccatttcccagacaaaaatggttagtgaacaatcatattgattgttggcaaaaatacaactcatactatatatatcgtatagacatataacgaaattgtattattaatggttaatactgattttcaggtaaaatggacgatattgttcttggctatgatagcgtcaaaacctacaaggtatgtagaaaattctttttaccgtgtgtgttatatttttaatttgtacttttgaattattgctatgtttttgttatactaaactaataaattagttttttttatcactatttagaccgacaaggtttatttcggagcaaccgttggccgagtagcaaatagaataggaaagggcaaattcaagttgaatggtaaagagtacaagacaagtgtcaacgatggaaaaaacacactccatggtaaattaattatgattgccataacataattagatcaattagttatgatttatgcgaatatatgtaattgatttagatttttgttaaattaggtggcaagaaagggtttggggatgttgtgtgggcagttgcaaaacaccagtacgatggcaagaaaccacacattgtcttcactcacacaagtcctgacggcgatcaaggttccctttctttcactacttttttattctacccaaaacttttgaaatgtactatgatctaaggaagaatctaacgattactagtcctctttttttatatatcaatagggtttccgggagaactcagtgtcacggtgacatataaacttgtcaaagacaatgaattgagtgtggtgatggaggcaaagcctaaggataaagcaactccggtgaacttagctcatcatagttattggaatcttggtggtcataattccggagatattttgtctgaagaaattcaaatcctcggctcgggttatacccccgtcgacggtgagctcattcccaccgggaaaatcaatccggtgaaaggaacagcatacgattttctccaactccgtcctattaaagataatatgaaggatcttaaaacagggtgagtggtagcacatatatatactttgctaaaatatcagttttagtatgaacagtaacctatatgattgtttcattttttatcttgcagatatgatataaattattgcttagatggtaaggcaaaaaagatgagaaaaatagttgaactcgtagataagaaatcagggaggaaaatggagttatccggaaaccaagcgggtttgcaattctataccggagggatgttaaaggatgtcaaagggaagaatggggcagtttaccaagctttcgggggattatgtttagaaacacaaagttatccagacgcattgaaccatcccaaatttccttcacagattgtcgagccagggaaaaaatacaaacacactatgctcttcaagttttctattgtttcatagattgttttagatgttgttacatgaacacccttggaaccatgtccaatgttcatgaacaagaaactaaatacattgtaatattttgtaacaatgcttaaattatcaaattatatgaacctaacgtgaatattcgatctgtacgtaatttatgcataactcataagtatgcactatttttctgtaaccatataacagtatatgattatatagaggaaaaattaagtgccctatgaatttgattcaagatccgaaaccagtttgtgttgcatataactccactgaagacgtaccttaagggtttgatatttgtataattgtatctaagagtaagagccctaccaacaagagtcaaggtcgacgtaccaatctctatataaggtgctcacaccaagtgttttcaagaatcctgacgtccttttttacaaaaatgcaaagcatcttcggattttttttcggtataatacaaagcatattttcgaatagtttactcattggttcatcaaacaaatacctttcgggcatatgttgagatggtgtcgctcgtggacatagactttctcggctctgcttttgttaattatttcagtaaatccaaatgtgattaaaataaaatactaaaaataactaaaatcctgaagctatttgggagttagatcttttgaacgaactcgaagtaatttagaagaatgagtttttttgcaccaactgtaacggtctaaaagagatacttcgtatgtaatctgtcgcttaagaatagttcatcgtccatcaatttttacatttaaaagaaaacttatgtattcagttagacaatattcttattataaggcacaagcaaaggtatttatcaatgtcctctacaacaacttacgcaaaaaaaaaatccgcacatcctctcattatatttttctttagagaattactattagttaatattatttcaaactatgtgggtaatctggggatgtttgaattgttcaaaagtttggtcataaaaatgtgggaatgaagaaatattattacttttttcggatttttaagatcaaattaatttatttaatgcgattatatatggcgggtcaatctattcgacgtattcgttatgacggtgtttgttaaatcaaatgtagaaaagtagaaaacagaacattttaggagttgacctatccattatccatcaacttaaacatgtgcacttcaccaaaattcttatacaaccatataaaatatacgagagacccaagatctcacatgccattatctatttatctagctatatattccataaactacgtatgtaagtacgcacacgtattgagtgatgtccgaatagattagtggagttgacatttagttttgcgatctgaccataaattttaggttttacagtaactttctttcaccctatacaacaattcgtttcactttacttggtaaactgaaactttttgattttgtgatctatttatttatttatattttctaataaagggtcttcgttttattttctacataaagtttaggtttagtgatttatatcacaataaatttaagaaaaaccattgcctaacaactaaccacctcataattttagatttgtttttgccaaacattcaaaatcgcaagtagtttttgtggaagtgaagtggtggcagtgaggtcacatggagagcccacaaagaagcaaaatatttggtactacctttgttttcttgtgttttaacaaaaataaataatatattcatctaaagagagagagtttctattaatacttgtattcaaaagcatccaaaaatccgaaaagctagctagatgagtgaacgattctccgaaacactgtttcacttctgttctctttttggacttttcttcttcgtctttggaatgtgtgcttccaataatcatcctcagttagttaccactatcattattatctaaaattgttaataaaaacttccataccgtagttggttactgtaaataccttaaatgaaaacgaaagaaaaaaccttttatgtactttgagtttcggttcaatttttttttatttttttttaaaggaagtttaatcaattcatgaaaagtacagcagtactctcaccattgtgcatgattgaatgaaaagtaaatagtacttaaatggatttgaacaacagatttatatatgagactgactacgtgacatgcacattagttcatcaaaatttattgtgatatattataattatgtatgaatttgttctttcgattttgtaatttacaagaacaataagaaaggaaagaacatataaaaaatagcaaagaaaaatattataaccaaacaattattaagatcaagcaaagtttctttaatttgtgataaaaaaaaattaaagttcaaactacaaaaatttaaggtataacaaaaatgaagatttagaataatataaaagttgaattagttttggtggttgatgtcttagttaaaatcacggtaactatatacaaaaaatattatcttatatatctgattaaaaaatatcacacacgagaacgcgattttataaattaaaagctagatggaaaaatgtcagatgtaagatatatttcataactctttattcaaaaaagaaaatatttcatcggtcatgttgtgtcaatggcagagctggaatcccactcgaacgcacatgcatctgaaatttctctcatatagtcatatgtttttgttattttctttttatctttctgttccaacctagcaaaatatttaaaattaatatttatttatatgtatgtgctgttaacttgttatacttttagaagaagaaaaaacgaaaaaatcattttgactaattcacttcagaaatatatttgcttataaagctttaatcgaaagtaaatatttatttgcaaaagcagtgaataaaaatgattttatgcatctaataagaagcgcggtagttaaaaaaaaaatcgtcattatactgacgaaaatatttcgtagtatgttttagtgcactgttttgttatgtacggatataaagttgatatgaaagaaaaatttattcattcaatacaagtaacaagaaaatatcatactacaaatttgttgagtatcccctatacaccaattctctacaaacccaaaggagagaaaaaaaaaacataataacccaatttaattaattttaaacgtgccaaataatttgaaaatacttattaaaaaaatctacgaaattttcttttgatgataataatgatatcaagatgagtatgatgttgttcttagacaatatgatcaattgaactgatgatgattgtgatgttgttgctgctggtcaggccatgcccaataactagccgacgtcgtttcatcaataccattgaacatattgcaaaacccttgatcttgatcttgaacaatctgatgatcaatatgggtagaggtcgtggtcgcggtcgcggatcggatcgaagaagggaaaagatctttgatcatgctcacatgattagcgtctgaactattattgttatgattattttctgtgcttccattgttgctccatgaagcttctgcgaattctctcttgatctttgctgattctttacggtcgtgtttcttcaatgccactaactgttttatgtagcaatattatcacacgttagtggagagatttattcacatataaatttattaatttgttaaataacataaattatcgtaatgtcaactccacgagcacatgggaagtttactaatttaaaatgtaagaatctttatttgaaaatagaaaagaatttataattaatgtcttttgacaaacatctttgcgttggatcaagagcctatcattaatctaattgcaaatgatatcatactatatactatatcttaaagctattctaagatctcacactacgtgttaatccatgaaggttttccttttgtatatgcttgattaatgataataataattcattagctataattctacgagctatatatcaatacacattattttttcatcgtatagaccacgaagaattcgtacatataatattcatattaattagtgatttgtaaaaacatttcttatcaatctaatcgaaaatcgtttcgataagattagcgcttaaaaactaacgcgatgttcaacgattagtagaatttgtgtgtatattatatacctcagcatgtagtttcttgttgtgggcaagaagagaatcattgtccgatttcaaaacatcgaactgttttttgagagaatcatagtctctctcgagctgctttgtcttccacctagctctcctgttctgaaaccatattgcaatctgcctaggctgcaatcctaaagccttagcaagctgcatcttcctctctggctccagcttgttccctagctcgaagctcttctctaatgccctaacttgctctaaattcagcctcttcttcttctctcctaacatcatatgtgacccatcgtctgataggttgtcttcctcgcctacctggtcttgatcattcatgttgttcgttgttgtcgggcttttttgagttagatgatgatgatctgatactcccgtgaacgacattgatctgttcatcatgtagtttcctcctcctcctacaccaaaacaaagacaacaaaaattaccaattattgcttcttttggtaacttgggatttcaaggtaataacgcagtgaattccaaagtgaccaaacatcaaacggaaaattgataaatttgtaatcaaattttggtaagagggagagaggtacttaccatagaagagatgaggaggacaagaggggagagaggttggggaaggtaagtgatgagcattgtcttcatggagttgctgaaacatgaagccatgttgaggaaaggccatctccaatctcagtccttcttgattattattgatattgttcctttcctcctcatacatatacatatatataattaatatgtatgtatacacaccctcaaagcccacaaatgatcaactcttattatgaattctgagcagatcaactttcgtagcttagatcaagaacttgtttagatatcaatatcacaagatcgttgaagttttctgaaggaaaattagtgagaagagaagaagaaggagaagaaggaagagatcagttcatgggaggtttgtataggacccaccctttataccatttaagcttttagggcatatgctgatttttcttttgattcaatttgtataggacacttgggaaattaaaattgaaattaaatagcacatggattatggatacgtacatacattttccacttcatttacatatctgtttaatcttatgctactaatagacagcttagcttatacaaatatatacaattataaaccaactaatacaactgatttaacattcttcaattacattaattcttttgtttcacacaatcattatcctaatattcacacttagatctcgcgattcaaccatatatcatcttctacgatatgatataaagattagttcgaaaaatctagtttaaaattttgagatcaaggagaaacttttaaaactctgttctaaagttttagatctaccctcaatcctcgaatataggcgcagcattaggggatttatcatcaatgctagtagtgttggaacgggtacgctcgaataaattaatttgttatggatttttcttaacatcaatgtatagggcatgaaatcatgaattttaatttttcaggtgtaatcaattattgattaaattatattcctaatatatgtaactgtagtagtttgtacgtataaggtttgctagagcatatagcgatcaccgattatatattattgaattttccaattttatcataatcgttttacgtactatcgagtacatatattactttcttaaaaggattaaattttccttataagcgttgaatactatatgtaaaaccacactcattggttttttgaagaacattccacagtacaacttaaaacgcatgtgtgttcttctcgccaggtaaatgcgttcacactatgcaccgacctaagtatttcttacataaccaaacttatgtcttttattatttagattcaaggtaataagtgataactatatttttttgttaaagaataagtgataactgtgtcaaagaagaaaaacataacaccttttataacttaaaagtgagtaccaacattctataagtttagtgttatgctacgagtttggggtcaaaatatcaattatcttttacgttctagacttggcctaaatattttttttaataaatctctttctctaactcataaatttaagaatgctcattccaaatttcggcaaatttattcgattttaaaaaaaccattcaaagcaatataaattgtaaacaaaatttctatgatatcaagacattatatattgtgataaatagatattgattggcaacatgatgattgagatgctctttctttcactctactgaaatttgttggaaagagtttttatgagtatccaaggtagatgtgaaagatagagagacccaccacttgtgtttcccaattgtcatatctatgtggtggctttcgcagtatcaaacatatagacatacattttttacatttgttagtatatggtatcataaataatatatagtatttgaatacaaataaaagaaatgggacctacaatattagtgccacagacctgtcctacaacaaggtctttcacatgcttgtattgggaagatttgaaagagtattaacacctatctatctatcccctttggcaatatgcttttcttgcagaaaataattgaaatgtctttttaaaaaacattacaatttatatataaagaaaagagaaatatttgatctgaattaagcttctccaactagctccactgctcccatgtgctctgcttcctctccttctctctgcctctttcttgggatacttcaactctccactctttattttttaaaaaatattttttgtttgatacttttcttttcttgtatgttatatattgacccagtcatatattaatgtattttttaggtaaattacccgtagttgttattaaacatcaatcaaagtctcttatcttttattaaccggagctaaagcaatggttcctttgttcacaattattatcatgcggcaagcaaaatatctagaactagattatctagggcacgtttgagcgggtatcttgataaagtaatcaagtgaattatgttacttcatatgcaccacaattttgctagagtttgaatcgtacaatcacctttacttacaaagcacaatgtctttgttgcataccaaaccattacctacaaatgtgtaaatttattgcgttcaacaatcatccccttttgagatgtggtgttaagtttcatgggcctatataaaagttttgttgtctctttagtgctgctctccacagtgtcgcgcgcgtgaagaatacattctaatgatgctcgcgttaagtatttccttgtaatagttttgaaatcacgtgtgttgagcctatgggcctaattatttgggcctttaaaagaccacataaattttttcagaaactacggctccggttcgcagccccatcagaacgtagtagccatgaaaatatattttcaaaatatcgagaagaagaacgtgagatacataagcaagtatatttttccttacatcgatttttcacatcggaaatcaaacctaacttcttctaaaagtgaactattgaaacttttttttttgggttaatatatgcattagttgttcttttttccaatatattttttttggttaatatatgcattagttgttcttttttccaatatatttctccaacaaaaaggttcttacttcttagaaatgcctacaataattagctaaaccttttatcaaagtaaaataaaataactaacctgtttatcgaaattaaattgtgggtattaattagtatatgtaaacaaattgggtttgaaaagtcaaagaatgcggaaaatgtgggaaaggacagagaggtacttactacattgtcattgactggccttttttgacaataccgttaaacagtgataacgactttaaccgtgaatgtaattcttctgttcatcctctttctctttctttttttttttcattaatactttttacttttgtgtttttgatattatttatattctcttttatcaagacgagaaacacaaaaaaaggaaacaaatgagaaatttagatgtttcctttgtccaacggtgtgaacaattatgtcggtagttataacaaaattgtagggtagagcaacattcactattttatgacccatcaattacattttttttaaaaaattttatagccgatattttatttttctttcgaattccacattatattagtatatatattctataattttgttttcatgtctttctatactgtcttcttctaatattcaaattttgcagtcgctattataacttaaatatgtgtcaccatctatattcaaattcgacataatacatattattgataaaaaatgatgtaaaaattgtgatggttcacagttgctacttgctagtaagaaatatcttctataccctaaaatattcataatatttagaaatagattagaaaatatttagtgtatttgcataactactaacaaaacttcagtttgagtagaaaaataataatctaaaacatcaattcagtttagcgtatatggataacatatagtaattaaaatatcataactgtaactaaaatattgcaatatatataccctaaataatataggtatccaatttaatgtaggtttcagttgaaagggaccatatatggatccctacttagtacttaccaccaactttactgtgggaatttataattttgatgcgaataagagtgccactctataaaataacaattactagtaaactatatatattcacagccttttacatgcatatgtaccaaacataatataactatctagtagttaatacatacaaataaagagaaatcgatagtggtcgttgtgaacaatatatagaaacccattctaggtttagttagttcagttattggttggaaatactgttacatttttattcgagtacatttgctaacgacaaaaaaaacacaaaaacaaaaatcatcatgctatatatatgaccagtggttagtgccctgaagtttaggtcgaaaattcaaatcttttcagatcatggaaatggaaatttatgtcctctaaataaaactacactatagcaaattacttaatcaattagggtcttacgcgcgtaaccaaaaaagtcaaaggttttatgttaaaaagtccacatttactaaaatttcctagccaaaaaattcacgttagttgttattataagctaaaaactattatatccattctcaacgactcaaccgatttaactactttaccgttgcatcctgtaaatgtatattttagtggtttattataaacaacttatttatataaatatttaaatacaaaaaaaaataaaaaaattggacagtgtatctatggaagagagaagtccacaaattcttaaaacaaccggtaagtaacaaatcatgaaagatctccatgactccatattaaaaaaaaaaaaaaggtcacatccctgtctcatatttatatatatatatttgtataaaatgtgagaagttaacttaagtactacgctaatttatgcaaaatttgtggctcatgatcccagttctccgacaaatataagtattaacgtcatctatatttcacatctgctaacaaaagacgacaaactcctttttagaatgtgatttaatttatggtgaactttgtactaattatatatacttcttttttttgttgccaaaaatcgtgttactttattgtgtccttcttgcaacattaataagcaagattcgtgtgatatatcagccgaagagttttctaaaaactgctcactcatcttacttttcatcgcggggttcatacattttgactgtaaatacttacactaactagattgtatgatacgcatgtttaaacttcatatacctgttttctaaaccttcaaatattttagggaattttatacagatatatatatatatatatatgtaaaattattgtaggtaattaaatactaaattttatagcaaactagtgtaaatgttatctttattatcaaatataatgcacgatgggtctgttttcaaaaacatttgttggattttttattttttttaatatgtgagaagctaataaatatagattttgtttcattctgtagtttgtaatttgtaacaatgtatagtggtataatggttgagatattattttttatgtgagtctggtaggtttgagtcatcctattacgttttcatgcaaaattgataatcatgtacgctttaaatgatagtattaatcaacttttctatctatttcgaagataagtctaaattaactttgaaattaattaacctcttgggtgccatatatacttatatagtatatccatttgtataacgcattaacacacatacaaatggacacacttacaatataatataaaaggatttaaattaaataattactcgaaatcttatttattataatttttaagcttaatggaattgcatgcatgacgttaaaccaaaaaagggtcaaaatatgaaccctaactagataggattgtaaataatatataagaaacataaaatagatatataattatgcaacaccctgatggatcaacctcccaacgagattttaagcttatatatataaagcacaactaatcaatttatatcttaattatccattaatcaagctcctaataactgcggcttgtgggctattaggatcaatggattccagaagctgagtcaatcgatcactgaggtcatcggcttccttgttcaagtttcttatgtagttgcaagtctcttgtaacactttcgacgctgatacctacaaacaattttcacaattgtacattttatagtaaggattcaatataaatattcaaacaagtcttagcttgctttaacaacaacagaaacaagtcttagcttgaagttatgatgcgtgttaataatgtaagaaaatatattgacgctagttgcttgacatactacactatgcataggttaaaagttaaacctaaagcttaagataaaatgcccatactttatcaaaaaaataaaaatgctcataacttaaccaacacattgttttgaaattgagaacaaatctgattggttgtgtgtactataagaaaacgatgcttccatttatagaaaccagctttttcttatttttctagagttcgtacttttcttgttatatagaaactaagaaaaccaaatataaaaattagtcggtgctgtacataaatgtattgaattgatggtccgtgaagcaatatagtcgtctcacattcaatgtagttaatcaataataaaagtaaaattaactagaagcttaatgctgaagttagggaaaatatgttcccctctcctcaaagtccggttaatggtcaaaagtaattttagaaacttcaaaatgcagtctcccacacgtacttctatgactataatgcactattctaacatgttgtatacttgtatatgcgtgattctctattaaacataatagctaaccctaaataaatatcatcaaagtaaaacttatgtgactatgccaaaaccttggtacatagaagaaacacagtaacttttgaaaagatttaccgtgttggaacgacggttctggcgaatctccggaatggactgtcggagctttgagatgagatcagtgatctggtcatcgctaattcttgatgatgagcttgcttgtctcgaccttctgctagaagacatgtttgatttgaaaaaatattcttatatatatgtgaatccaagaaaaggctttcttctcttgatggctttgtttgtgcttgtcgaaagaaagggagaagaaagaaggagaagaaatggtgttatatagagagctaggaccacttctagatagagagagagagagagagcgagagtaatacaaataatcttaaataggggtgttggatatgccgatgacaagtgcacaagagagaacagtggtttagaattggagtcttggatacatgacacgtgaatttacaaatttatcagatcgtgatgtatatatgtgtctaatattactattatttgatgattaatttaaagttgatttataaaaaactagagaaaaagatacataagacaaaaaaaaagtctgtctaacttttatctatttactttaaaaaaagacagcatatttatcaacaataaatacaccgaagatagatatatatcttctattttcttatattcagaaaaaaaaaaaccatcttcttctcttttgaaaattacattaatccaaagtctccaacaaaatcttgcttttcctaaaaagtttcaaaaactttagtagaacttagtatctattactggaaatctttttgcaataatttgtattatgtacatttaaaatcttcttattatattattatatgagtattataagtattgtcgatattataatgctattatatttttaatattgtagtatttcaatgatgtaaatcttttcaaagatttattttttgttaattagtaacattataatatctgttatttttcgtcaattaggaattcgcaaatgaatatctagattgacagaaaataccaaacaatactttcacttggatacattgataatttatctcaaaacttataattattctagtcattaaaatctttatatatattgaggtgagactttgtgataatcagctatagtagttacagttccttaatagcatgtcctagctttgcttgagccttgaggtacggtgagagtttgtgagaatgtatcattattttttaagaccaaacgacaactatccaaaagctcgactaatatgtcttgttagatatgctatgatcaaagagaaactaatttttcaagtgggaaacgattctgatttcaagtactgaaacaatgcaacattaaaatatcaccactctatttatcttattatacaagctagtgtaaagcttgtctatatactcaagatatacctatatgagtatatcattattttatgatcgttgtgatgcgtaaaaccaagaagattttgtggttcagttatatagatacgggtaaacaaaaacaatggacttaggtcaatttgagggaacgtacggtatctatcctagccaatagggaggggctagtcttacacttttagtccaagctcgatcacgtgtacctcaattgatagtgtatatgcttacgatatttatttatatgtaatgcctaagtggaatttcatcaattgtcgaacccaatatctttgagcacttgttctaaaaaacttagacaggtgatttccaactaacattcgtcaatatgtaattttgtacaaatactttaattttaattgtatcagtgagtttcaatttttatttaggatttatataaatactacatggtaatgttgttttggtcataaataacaacaaaccatttgctagatctaaacacgtgatgatgatgatgaagatgatgatatatgcaaaagatatgaatgaatgatgattagtagatgtatgatatgtattagaaaacaaggagatggtgtgataaattggacattaaagaaaaatgtttgctgatgagcacacaaaggtgggactatttatgttttaatattttgaagttataaataagaaccagtttaacctcccatgtgatgataggacactctttcccccctctaatcagggagcatccccatccttcacgccctctcccacatgacctctcgcttttcttatctccatcgttttactacggtagtgagataacaattttcaaagaaaaatgtttttatagttagaacatttgcaaaaaccagtgagtttaatttatatcataattgttcatactagtgtcgtcgatgtaccagtaccaccgttcaaaattgatacattagaatgcatctttcaataggtgaaatatgtggaactaattacccataatccacaactctgcagacaaattttatttttttattttttttttaaaacaaaattttatccaaagtctatatagtcaaactaaatgatgcatgcatgtaagaaatatcatataacaaataagacaaaataaaatttaatacacaaggacatagtcaatcgacccattttatctatttgttttgaagtgaaaatttgataaataaaaaactgaaaatttcatcatctcaagatacttgaaatcttatatctgagataagacgagacctaaaaaaatactcaaagaacctttttttccaaagaacttacttgagccaatacattcattgtcaaatattttcaaatctcatgaaaattaacagtatccaaaataatgatatgatttaattctgcggcatctttaatcacaactaatcaggcacttgtctgcagagagtaaaaaatcattaatcttccctcgttccataaaagaatataaacgagcatgttgatactatatcaattgtcaagacactactactgcatactatcctaagtctcaaggcactggataaaattatccaaacttttgagtactgacgtggcaagttgtgaatggtcagaagaaagatcgttcttaatcaatatcataattgtgattggctcttctcaagattcgaggactaaattgcatatcaaaaactagtagcaaataacttatgaatgttattatcttaaaataattgatagatatgataaaaggccaaatcatcaaagagagggacgggtgttcttggcaatgtagacattgattgtgaatccttgtctgcatctgtttgtattctaaatgtctatcgaatataaaccaccaaaatttcttcttcatttttgttttcgttcttgattttctgtctcgaattaaaatcgtaggtttctcactttcttgtaaccaacgacacacttctgtcataataatatgaaaaaataccttatgtctccaatttctatgtctattgttttgtgtttgtggttcgtacttatcacttatgctaattatgtttggactttacactatgctcttcaacacatgtgatagcttaatcaaattcaatttcctcggacaaaagtaaaatgccaacaagcaaaagaattacaaatttttaacatatatatgagccacttgcctaattaaaccacttgcctaatatgacttcacatatatacaaaattaaaaatgagccaacccgtaaaattctctatttggcccacgagatttttaacctttcaacctcgttggtacggcagactgaagccgacaggtcaattttctttcacatactaaaaattaaaagaactttatcaatactaatcctatccattggtggactaatccggattaatccacagacttcaatcagtttcacactaatttttgtttatccgtctggttgttcatcgcttagcattaaattaaagattataaagtcttcaatatctgagtgagtaaaacccataaagccactctctcaagtctcaagtcatagagctactaaagctatcatcaactatcttggccagacttgtccatacacatctttcttcgagtagcctcggtcccatgaccatggaacatctgaaaatcacaatgccagtaaaaacgttaataacttgagaaagaaagaagttatatttgctggataatgaatagggaaaataccttcgggtgagtatggcttaggaggtagttgataaggaactggtaatgagattatctcaggcaaatctcggtctccttgccaggtcattgtcactagcttactcctcttctctacctcgtctttcgtctcttgttttgcctgttgacaaagcacaattaagagggaaagatcacagtttgtgtccgggtttacaggttttggaattttagatcttcttaccttcataacactcgggttgctctcagtgcacgaaaatacacaaccctgtgtttttattggagatggtaaaaacaagacgcccaactaacaatattacagtcaatggaatgtagttagtggttacaaagatcagactttgatacatgaaaacacaggttttggaattttacctcgtaggaacgaatcatcaactgtgaattgttcttctgaagtgctccccaggccgctttgctaagattcgatgaggttagtaagaaccatctgtggaagcaaaacaagaacattaatcacaaaaggtactaacagagcaactacagattgagacttgatgaactttacgcaatcttctggtcgttgtaacgtgtgaacgtctttatatgtggcatggcacgactgttacattaaaaaggatcagaattgagtagtactcataagttggatttgtaaaggtttggtttttctaaattacccgcgagcgctatgatccgctttccatctagcccaatactttttcaagaatggtttctccacgttcttcaatgggctcggaattgcattgccagcagcataaccctttggtttgaagatttcacggttcagaagaaaaatcaataatctatataagaaaagatgtaatcattgtgcggataacctctaaagaacatctgacgtcttctactgtaggccatattatcaacgaatccccgggaccgagaggagttttgtcctctgttataccagaagacaaagaatttccaaactcagccaaccacttctcgtctaaagaaccaagtgaagaaaactgcaatacggaataattatagaagaagacttttttacaagtaatacaattgcaaaaagagaacttggaatggaacattacctgatagattagcggggatctgcggaactctctatcgaaaatgcattcttgaagaatagtccgtagcttcatgtgtccccatttgttcaagttaaaaccagtgtggtatccagggactgaagcaattagtcgaaccttaaaatttgttgcatattattagtacacaaataagtatataaatcaaccaaaagagtttagagaaatagaaagtaccgtagcatcagaataatcaaactttttgaagaaggctgcattgatcttgacattaccacggccaggtaagtttgcagtaaactcaggccacttaagaacattgaggtaatcaatgagatcaccttcgaatccacaacctttaggtggatctttgtcatcatctttccaaggaaaatcttgcatccacaaaccttggcttttgttattccaatcaacatggatcagattcgcggtgtgtactacaactctcacccctcgaggatagacaagaaatatagccttcgaatggtgtgtcccgaatgaaataggtaaccgaggcttatgaagaatccaattagctggcttcttcctctgttaaacaaaacaaatattggagatttttagtctaccataaacatcaatcaaaagaaatgagcaaaaactgtcataacaaacctgaatatactcttgcctaccatcaccttctccatgaataaccataacctggggaatgttggccagttttgggcaagctacaaaaggatatatgcaaattaccaacttcagctaacagactcgagaaaatcgaaaaacaacacccccatgaatgtaaacaaaagaactaatcatttggacaaactcaacacagaagattatgagaaaactcacctgacatcaaccagtctatatcaaccatataattcgataagatcgcagcaacaacgtctccctgtcatttacaaatacaatctttagcaatgatatctgaacaaaacaaatgaaataatatgcttagcatgagactaacctcaatgacatcattaatggaaacacaagaagtattagcccaatcaggcaatgcatcaacactcaaaagccgaaatgttgaaggtagtttctcattaggtggacaaaaacgacgaatggcctctacatcgtcttcagcctaaaacagttccatcacatcaaacaaagcctcaaagaaacaacaaaaaaagcaacattctttggttaagccaaataagttacctttcgagctttcttagcagctcttccattgagcaaaactagcttgaagaaatggtgaccagggatcaattcaataagatcatcattacatactgaaacctcttcactaggtttcactttctttctctctccgtcaccggaagacctaataacaaccggatttgttccgtcctacccaaaagacacaaacttgacatgattcaattcgataagaagccaaagttataatttttaatgttgttatagttattaccactgacaacgaagctgagccagaagtggaaacgataatggtgatgtgtttgcgactgagacgcttatcgacgattgaaacgttgccacggccaatgatgtttggaccttcggataaagttatccttggagatgaattgtcttcctttaaatctgctttcaatggaatcaaataagcaacctgcaacagatacataaatcagagcaagacatcgaattttctgtaattggaagaaacggaaattagggttttgttttgaattacctgagagtgagccattaaggaagacaagtgtctgaggttgaattgaaccaaggaagaagaagaagatgcaaaacgctgcgtttcagtgaactaactagcgaaaattttgggatgtttcaatggagaataatgggcaagaaattcatagtaacggtaacggttctccacgccggcggcgacaatcagacaaccgcatcatcatcagccgatgggtctttggcttgtgaagttgtacaatatattaatttaagaaacattgtcatcaaagtctgggtggtgtagtcggttatcacgctagtctcacacactagaggtccccggttcgaacccgggctcagacatttttttttcttcatttttttcaattgacacgtgtccgaaccttgcccaaaaataatagtatgattaacatattttatcttcccattacgttgaaatgttacaatcgaatattcgaatgagtgtgattggaattggatgaacatgcagattgttacgtggacaaaataattgtgatcaagtccaaagattaaacaatgtagtttaactccaaagagtttgtaagataaaggatattgattatattatgttaatcaaatttttaagatgtattattttgttctcctaccgtattattgtcacttttcagttgcgaagtcaaatgtcacaagcaatattgttcattgttaatcctcctacctaccagtcattgtctacgtgtaaattagatagctatggacggcttgtgttccattctaattgttatacgtataatatagttttttcttgtggtttacttgtcgatttcaagttagttatcgacaaattaccattattcgttatcaagtgttttcttattcgttacaacacctagttgacgaaaagatctgaatattgccaaatttcaaaaacttattaagtttgtgttggttatttttttcattgtttaaaatcattggcaccctttttctggtgtaaatagtaataaacatcaacgaagacgataagccataaacaaaggacagctatatatattccacaaacaacaatataaaattcaacaaatttacaaaaaattcctatatctttgtctttaaaattcaatgatgtaaccacgaacactttgtatttttgtatttcaaccttaaactatagtactaacaagttccgtgacattattacataagcacgttagtataaataacaacaacaatattaactcaattagtatcatcgatcatctgtcaaaaagaggagctaataataatatggctgctttgaagatgactatctcttgtttcttgtttcttcaagtaatatattgcttgctctcttcatttgctccaacaaatgtgcaaggattgaaagttggattctacgacaaggcatgccccaaagccgagcttattgtcaaaaagtctgtcttcgaggctgtgaagaatgatcggacaattgcagctcctttgctcaggatgttcttccacgattgcttcgttagggtaatgtcctttcttgacatcctgaattttccttttagtctttttgacaccttgtgatctaatgattgaatcatgatgttttagggatgcgaagggtcggtattgctagagctaaagaacaaaaaagatgagaaaaactcaattcctaacctcacccttcgaggatttgagatcatagacaatgtcaaggcagctctagaaaaggagtgtccgggcattgtttcttgctctgatgtattggctcttgtcgctagagacgcaatggttgcggtaagtataaattcttactatcatgtgatctaatatttggtcagagctcacggtgtctttattacacgctccttgtatttattactacaaagttcacatggcgattatagacatcataaatagggttgggcgtattcttctatttttttgatgctacaaaatgcacttgacttaaattttcaagagactagttcagctttctatctgagattttctgactaatatattaaagaaaatatatccataaaaaaaattatgtattatatgttgtgttgaacttttaacatcatgtattttatgataaccaatcaatatatgttcagctcaatggaccgtcgtgggaggttgaaacgggacgaagagacggtctggttacaaacatcactgaggccttattaaacttaccatcaccatttaataatatcagtagccttatcactcaattccagtccaaaggcctcgacaagaaagacctcgttgtgctttcaggtatgttatggaatcagaaaattctttaaattatacttgaacgatgcatcaaataattaaagggcagtgttctttgaacaaatgtttttctcttttttccaagcattgtttggctattttggactagcaactaacaataatactctttcttctacatattttctatattactctctggcttcggatcactagttgtaaaataataaaaataaaatcattctcatataatttgtatattatttacattttgataggtgggcacacaattgggaatggacattgtccacagatcacaaaccgtctctacaacttcaccggaaaaggagatagtgacccgaacttagacacggaatacgcagtcaaactcagaggaaaatgcaagccaactgataccacaacggctctagaaatggatccaggaagctttaaaacgttcgatgaaagttacttcaagcttgtgtctcaaagaagaggattgtttcaatctgatgcagctcttttagacaatcaagaaactaagtcttatgttctcaagagtttgaatagtgatgggtctactttctttaaagactttggtgtctccatggtaaaaatgggtcggattggagttttaacgggtcaggttggggaagttcgcaagaagtgcagaatggttaattaagtatattttatatagatatgtctgtgagattgttttatgattatgtatgtgtttttccctaagaatattgtgtggagttatatgtattgtacaatggaatgttaaattgtaaaatatgtcatgttttatttatcacaaaagaaaaaattcgattacgattttatttcttaatatatagtttatattttgctttaatatatatttcttttttgttttgggcttatctgatctacactcactatatacattaaatatatcaagattaaaaattgtagtttttggaaattcaatagattttaaaaagcatcctaaattacctttccattttgtagtaaacaattttgttggcttatatcatttagtggcaaaccatcagtaaagtttaaactttacaaggactatgatatttttgactcgtaaattagtttttattagtcgatcttatcttcaatgtcacaagtatttattaagaattaaaactctaatgaggtggcaataattatggatttttaatgttatgagtctacatcatttcaaatttgtgccatatacaaatacacatgtgtatgtatgtagtttgctaaatgatacatagagagtggtcatataaggtaaacaaaaagtggagcataaagtttcataagctcatatatacagattcacggtttatatacacatgacttttatcaccataaaaaacaaaaaaagctttctctcactctctaaacaaggatcttccaaaaacaaaacgaaacgaaacaacaataaaaaaaagttcaaagcaaccaaaaaaaaacagagaaattgaaagaagacatatcacctgcacaaactagtgtaaatgagatcaaattcatataagtttagtgtaatttgttggatcgatatatacatcgagaaacaaaccttgatcgattttggatctgtgaatcatcatcactgagtctgaacaacgttaacggatctcccttttccactaagtggcgaacaaggcaaattctgacgcgagatcaggaacagattaaaacgacgtggacgaagatatcgtcgatcctctggattcgtcactttgtcttcaacaagaacacagagatcctcttccctaatcttcaatacctggttatgtactttctctttagccgtgatccaacgtccgacggatctcggagactctgtctcagcttccgatgatccgctactctctgtttcaacttcctcaaccatcttcctagctatcgcttccatctccggccacgattcagcttctcttccacccatcgtcatcatcgtttatataaagagagatttgtgagtaacaaaaattcgaatttcgaaatttgaaaagttattgtccagtgtgaaagacatgtgaaacggagcttacttatttatatatatatatatatatatatatatatatatataccagtgtggtggccatagagaagctaagtttaaaaaacggttactgtttgacgtgtcaaaagtttttgtgaccatggagatattgccacgtggataatgagattgagctgttttgaagaaaaagtgtggagcggatctgtctctgtgtgttgtttgaccggtgagattgagatgagacgtgtggaagaagaggaatcggatctggaaaacgaccacatccggcgccgttttgttcggcatcttccaagtacttcaataagcttccaaaagattgttgccacgtcgttccctaaaaaatctctcttagattgtgtttttatgaaacagcattatcaagctccatgatattttgaacagatggaggttgtttcggatttttatttatttattgattgatatgagatattttgtaatagcatagtgtttaattgatttttatggatcataggctttcttataaaaagttgttagcagatctatgttgcataaattttataattgtatacatgtgaaatatattgttctttgcatggtgagtgaaacagagaaattcaaaatttcaccttaaggttatgaaaaagtttgtaccgatcaccgacgaaacgactacagaaatctaatactaattttttcaacttttacgtggagatgtaactaattaacacaaaaattaattcttgtaataataactgaattatgatggtcgaatgatttggtaatcttaaaatgtaaacattacaagatacacatctccatcagtagattttcaaaatcaatcataaaatgtagacgccaaaatataatcataaaaaatgtcaaaggctatttcaaaattttaatacgtgtgaaaatgggattgatctgtttgtctctcatgtctcacatcgagggattaatgaataatgataccactatattcatttacgtgtcggaatagccgaccgtgcttgaatcttttatgtataaacaaaatataaatggtacttataaaactgttttaccatggtaagatggtttccacgtagtttgcatgtaccacgtgtgaaaaccgagtgttggggaaccaaatggcagtgagagtatatttgtataatcgcggacggtgatatcactaatattatttcaatagttgcaaatcataatgaaaataggccagacacagcaaagtttatgggccaaagatttcaatttggacctaacaaatgtatgtaacaaaggctataaaattgaagtgccatacgaaactagacaatcaatttcgcttagtataattatcttttttagcataaatataaagataactagagagataaggcaaaactttaaaagataattgtgagaaatagatgataacccaaaggtttagcaatctcgagagtaaaagaaagaaaccataaaacaatcctctgaaaacgaacaacaaagttgcttactacaaaatatcaaaaagcagattgattcatagctaaaacggtgcgacttcagatttactcttcgtcatcaccgtctgcatcaccgccacctgaggctttcttggaggcagacttctcgttccttctcttcactcttcctggacggccaccaccgaagggactggtgagggcaaagtcaatgtgcttctgtgaatcaagtctcaccatgaatgatggaatgttcaccaattgctttccaaccctacaacaacacccgaaacaaatatgagtacccaatttttaagatcatatcaaaacacacttcatattaagccactcaagaggcacaagttatcaagacttgcgtgaacttaagagcaaccaataaaacgtttgaagaaagatcaaaccaaaagacagtacaaactcatgaaagactacaatctgttagaccaaagagacagtgtttaaagaagtgtaacacaaagccgaatcattcaaagataatcatgaaatggaaacagagaaaatgttaatttcatttcagatcctatcaattgatataacaaagataattcatacacaagcacaaataaatcgaagagatgcaatacctgatatgcctctgcctgatgaggacacgagagtgatggatagacttagccataccagacttgaacacaatagtctgaagacgacgctcaagaaagttctcaacagtcaaagccaagacgtaatcgagcttgttctggctctcatcaagaagcccgtaacggttcatcctacggagcaaagcctcaccttcaaagatccttcttggactcttctcatcaagagtcaaaagatctctagcagcattacggatacggctaagagagtactgcactctccagagctcacgcttgttacgcagaccatactcaccaaccagcttcaattcagaatcaagacgctccttctcgtaaggacgacgtggtcccttgaaggtctttccatctattcaacaacaaacacacacattcatacaaaattatcagcataaaggttagatctttgaggctcgtatctaagattgattcatttcagaaactaaaacctcaaaagttacaacaacccagattcacaatctatatatataacacaatcaaaaacctcagataatccctaatctatcatttgatattgagagaaatcactacgtagatcgaatcgaaaatgagctgtgatataaacgacgaaaaggagagaagaagcttacagttgcggtagtagcaaacgtgcaccatattttcgtctccttactgcaaattcggcgatctgaataactagggcacgcagagaggaacgaaagagacgaatgaactaatttataggatttcttaaaaccctaacgctacactctcactttctttattgggcctttacgaattaaggctttatattgggcctttacgaattatggctttatattgggcccgttttgagatgtcgatttatttttgagtcttgcgcttgggctcgaatttattttcttaatcataaaattatttttatgcactgaatagtggtacctagaaatgtcatttgaacaaaaaaaaaaatgtcattttacatgtcttttggcatttagattatatcattaaaaaagttgatgaaaaaaaaaagattatatcgtaaaaacaaataattgcaatattttgttgagatgttttaccagtcttgccttaatagaacagcaagaatatattataagtgagtggtgtctccaatcatattaacctaacgtagtgcctaatcttaccaactcttagttgtatcttttaccatttcaacaaataaacaaacaggtgttaactactagcatcgaaaataaacacacaaaatagtaactgtgttttcatgtttttgagttatctacatatacatttttgcagccactatatgaaataaatcttcaagttgagacttatttacagtggttgtcactggcatttaataattatttttgataattagaaagtaaattttcgaattaaatatttgacatttaactatcttctcaaaatctctctacaataactacacgattagttactaaaataaaacttctaaaatatttaacatcatttaaaaattacaaaattatcatttttgatattgctttttttgcatgactataacaattccattatacgcatcaacccacatagatattttatagcagttaattattacaaaattacaaaatatttagacaatgatttataaacatatcataaataagatcaacattaataaaataaatagttttttttacttaataacaattgtaaactataaaataaaaatattttatagatagatacaatttgtaaacttttatatatactaacttaaaaaaaaaaaaattgtccttgcggtataccgcgggttaaaaatctagtaatgtcacataattgcaacaaattccctcatttctttcataaatttctatataaagaaaaaaagtaaaaataaaaaagcaaactgatatagaatttagaaaacaattggattaattgactttgttattcggttttaggaggttactcatttatctttcttctcacatttggtcgaaagatacaactcaaatcacctctctaacaaagataaactactaacaagagtacaaactacaagacataacaaaacaaagtggaatagaaaaaagattttgacccgttgactaaaaataaaaaatcttcaaaacacagagaagaaaaaccaaaaaagaattagcctctaaaacgacgacgctttttcaacgctttccattcttttcctcacgtcgaagaaaacgacccatttgtcggaacaacactctgacgactatctcctactcctcctactactactccgccgttagctcttctagcgccgctgcgtcctgaaatcttgttgttatgcatccacactttgaaaacgcttttatcaactccaatctcccgacaaaactccttaaccaccacgtcatcagctttcggcatcctccacccaactctctccgagaactcgaacatcttctccttctgatactgactaaacttcgtcctaaaacgtttcctagacattggaaccgccgtgttagctcctcctcttcctccagagagtgcgagaagcatgtaagaagacgagatcggcggtggagaagctgaatcatcgtcgtctggactacgaatccccgccagatgaggaggaggcggtggaggaagctggtgacggttgtgaggtcgaaattcgatcgcagggacgatggcagagagagaagatggatcctcctcacggcggtggaagttacggtggcaaccacaagcagcgcacgttagtgaagcggggtcattggagttaaacgacggtgacggcataaactcgccgcatccgtctaaagcgtgaccgccgatacctgctgcgtgattctttagacattctttataagtcgcaaccgcaaccgcttcagatgcaagatgatggtggtggcagcgtttgccgtttgagaaagaaataggcttcgcgggctggatccggatcggagcttcgatttcgggttgtcgtgaatccaagtcggatactatagtagttgtagtagctattacatccatgacaactcaaaacatttagggtttcgaaaaacaagaagaagaaatgttttgtaaacttgggttttggttattgtaatacaaataagatttaagaaacaagaagtattataattttctagagatggaggaagaagaagaatagatgatagaagtaaagataaggtaaagattgcactaaacaaaactgtttttaaattgtaaactcgaaatctttgggatgggtttatgtatttgggagagataagattagaaaaggggaaatttaaaactatgtattatttactcaagtctctcatggaggaagaaagagatgagaagttgaagactgttgataatgagaaatccaagttgtgtggttgagattcataatcattatgtgtttttttttttttggttgaatatttttttttaaccatggtttgttgaccccatctagggttaatgaaaaaagataagtgtaataaatataggctaataaatagagttcatagaacagcatctaatgtgagtcatgtctttttctttttgctaaatttgtatctccatgacgttgacaactttaataatatatactccaattttatatcaatattaatcttttttgctacctttcaaatttcaattattattatttctcgttatttttttttatttttttttctccttatttaagctgaaaatttcgtgtggaagtaaagcatgaatataattaaggttgattcgggttgttgattcaatgatgttaactaaagacaaaagttaatatttcgtattgttgatcaaaagcaatgtttatccaaaaatgttaaaatctcgaccttccctagttttatagttcatggtttgtcttcaatcttatgtcgaaaaaactatcaacttacaatcttaaaagttactctactaccaaatttttgcaaaaaaaactatgactagcttaatttatttacttctcaactactccactaattaactcaaaaatgtttattgactatacatgttgacggttaaagtggccttaagaaaaggagaccacaactaaaaaagctgacacgagcagtggtgaagaacgatgccgtttactccaaacttctttaaagctgtataaaaaagtctttaatcagagaggtgtagaccaaacctaagatcgtttgcaaatccattactaataataagtgataaactaacaattcaaagcaaaaactccataaataattgatagtataccaatttttttaggagatttgctaaaatatgaccgataaattttatcaaaaaattcagacaaattttatggaagttttaattttgatgctctaaatccaacggttgaattctccgtcaaaattttgaattttaacgggtttctaaaatgtcgtctgttttcttatagtagtaacgtaattgtaaatctcaactcttaaaactttttctttcttttgactaatgatgatatgaaattgtctaaataccaaaaacagctaacacgcgtacatatcttgcaacatggcgctacctaatcaaaccatgttcgtctgttatggaagacaattctcttcttctcaaatacattgaactttaacattatactttaattaatgtaggtatatattacgacttgcacgacttaccatagccaaaatagggaaccaccgtatcaacatttcaagcatttagatataacttgattgttgattggtcttattgttaccgcactacgattatctatagatttcatagacaacaaaataatataacacatatattattgttttagaaatagttataaggctttttactctttagttaggaagaataaggcaaaccgacattaaataagctttatgcccataacaaggataatattaattagtttttttttttcaggatatattatctgacgcaattatttgatgatctatctgtgattttttctttctttctaaaatctattatatgttatgcctgtatatgttttatatatacacatatcctactttatgtatgtgtgcaaatgcaattggaaggatttatcatatacgatgaatgtatcgcatgggtggttagtatgcattaatatggactgttcttaagatttgtgaataaagaaaaaaacaatgacatcttcttcttcctttttttgtgttataaacgaaatgattttattttaattgtattgtttttgaataggaatgtgtaaaattacaagaaaataataattcaaaaactaaatattgatgtgcatggcaacttgagaagtatttgaggaaactttaatggctaaaacaagttggctcttgatttcacattatgccaaaaacaaagctggttcgtccatatatgataatatgagagaaatttatgtttgaaattttaattgaaattttaaacccgataggataaatatgtttctgattcaatgaacggatctagccgcgttgacgggccagagcctgaggcttagaatgttggcccattattcgatgagtttataacgggccgggaaaacattatctcagactgttacttgtctgttttgcgtaacacatatgagagaaactcagacttgattaacatctatttccgaataaaacttgatttgttgaatccaaacaaagcccttcatcaaaatccagacaaagactagagggaaacaaaacagcagatgttattgaattgagtggttctgctctaagatagcatcatcttttactcgagagatcacatgatctaaaggaaatgaaaaccacgtttagattgttgcaatcagtattcacgactatgaagctgtcttcaacttagtcgattgagcagctgcagcttttgtgtagatagggtgaagaacatgaccacctgttggatcaacatgaatccatttgcgtcctgtaatcttgcttttctcgaacctgactcgtccttccttcaatgcaaacagagtatggtccttaccaatccccacatagtctccaggatgaaaccgagttccccgttgacgaactatgatgtttcctggtatcacactctgcaaaatcacacacacacacaggcaaacattattttcttcacacagaccaagactgatttgattatcaaaatcttatctcgcttgttatttattttcttacctctcctccgaatttcttaacaccgagaaacttgggattagagtcacgaccgttctttgtagaaccagcagttttcttagtagcccaacgcttgaagaccaaactcaagccacttgaagaaccatctttaacatccccaaaacaagaacaacagcaacaattacacaaatgagttaactagttaagatcatcaaaatatagattttgaaaagcgcaaatctataccggaaatgctactgccactataagcaggaacctcagtgatcagttccctcaaactaactcttctgcaaatggatgctgctgagtttaagaaattcatttttttcaggaatctgcaagcaacaaagagcaattcaaacattaatcattcaagtagaatcaaatcaatactatacaaaccatttcatcaaatcttctcgagcaaatggagttttttcattcacactcgaaactccaccattgtcacaaacgtattaacctattgacctcaaaaccaattacatttccgatccgattccaactctcgaatgatacggtaataagaaaggaggatacttaccggaaaatttcgatttcgattaattgcgaacgatgacaagcgtggccggagatgacgacggcgagtaaaatggcgtcggcgacggaagcgcgattaggatggaagggcctaactccaaaacccctatttgtcaagtgtgaactatacacgcccggagggtcctcatgttttcatttgtttacataacgacccctacattttcatttggatcaaaattgatatattactaaagagaaatttgcatagtcttttgtgattttttagacagtcaattttatttaatttttgaaaattttgacacaaaaaaaagttgatagttcggtttttggaaaagaaacctaatctaaccaaactagaaaaatgtcttgtatataacttattaggtttgtgcaagtgtgaacaagatgacatcatgaatgatggatgatcattatcttttatttcttgtaacattaataacaaaatgttatacattttctatacgcatgtgtttgaagaacaactggacacgatctacaagtttattttgttagacagtaataatcaatatccatgtgatggatcacatgctttcaaatctttttatttgaaatcgcatttcaatggtcctacggtccgtgctttgccgtgccgtaccccgaccctacaagtttcttatactaaccccttgtaataaattttgtgtcacaccaattattttataaatctaactacaaagattcctataaattagtaccatacagtttcaactagattaggggaatcagtagctacaaatgtcttctacattagtaggtttgtctagcctggtttagcaaattcagacttattataaataaaattaagttgtagtctctcataaaccgaatttaaaacttaaacttaaacaagacatcatccttggcttgaatcaaacataatctgaagataatgaaatgatccaactggattatacaccaacactcttatatataatcttcaccttggagttaagcttattcattgtcatttcttacaagttatcatgatcttcttatacatttgtatatatcctatacataatataataacgaaggtaaatcttgttttccgccaattgatctggctaaatatattttctcatttacttttttttttttttttgtgacgtctcattacatacatattattgttatttttgggtataaaacaactttaatcgttactagaaaagataacatttcttatgaaaaccaaaaaatatcccaatgttccctccttttctccgagcagatcgactcaaaacaataattgggtgagcatgtgaaactggctaaaactgcacatgccttctctttttcttttctttttttcaaccttttatttagttttcttttacttaaaacaacaactttatatgatctgatattcaagttgggatgtgaatgcgcatttatgtttgggtgtgcgcatatatacgtttttagtttgttgcatatatatgtgtgtgtttcaagttgcttattctttcgttaatcgtgatttttctttcatttcccaacttgagatgctagtggtgagttacctgtgttttaaggttcacagcacttttgtaatatctcaaatcaggtgtaacaaaaatgttgtatatatatctagaattctagatcgtaactctaaaacagtattcttctgttagctactagtatttcatttgccctcgaattataacagtggatctagatctggtttttctctggaaacatatcagaagaattagagtaattaatgaatttatcttgactatctaaagaaattatcttgactatatgttcatgatccgtcaacaaataatggtatttgaatgaataatagtatagtaagagtgtgattataatttacagttgggaccgttggtcagatctaactcccgtctccttcttcaatgcaccgtcccacctttttttgttcattgttaaaatacaatttcaattatcttttataaactctgataatatatttgtggttaaaaaaacccgttcaatattgtcttcccaccaagcaagcacccaatttaaagccacaaaataaaccctttttcattttccttctataaaatcgtagttagatggatattgagttttagtttggcatttcttagttaaaatattcaccctaaaatgaatctaaaaatgtacaaaatcacaggaaaataaaactaagcagaaatgtcctaagaaaactaaagtttttaaaaaataatcttcaaagagatactccaactggtgttataagcaaaacttgatttatcaaaaacaggttcatagtattttatatttagtactataagctttccttaaaccatgtgcaaaaccatctaccgcagtctaattaccaatagcaagtaataaaatgggactaacattggaggcatacgtggaataatataattggaggaatacagtaataatgatatgtgttgccacagggaataattgatacgagcaaatgtgtgtatatatagcttatatgcaacatcattgggtcctcaaccaaaaactcctctctcagtacacttcttttcatacctcaagagactaaaactagtttgaggagatttagaggagtgtttggttctttggataacaatatcccaaactgaaaatggctaagtcatatggagctatcttcctcttgaccctcattgtcctcttcatgcttcaaaccatggtaacacctctattatttttttcttctttcaatgtttgaaaatattgaagataatatatttgattgttttccttattgacgaacgatatgagacaaatgtgggttctattattgtacttttagttggaatatatttaatttagcctttttaatgaaattaattttacttgtttttcctctctctttttttcgttttttaggttatggcctcaagtggatctaatgtgaagtggagccaggtcagttttattattgaatcgactagtaattaccttttaaactatattttatacctattgttatctcgtaacttaacgaaaagtgattaattagttaccttttttggttaattttcagaaacgttatggaccaggaagcctgaaacgtacccgtaagttttttcttcacagctattcttaaacaatttttttttaatctcataatcgacgaaaaataaacaattcaagaaatcttttattgtgttataataaaaaaaaataagcatttcagttgcagaaaataagttgaaagtgaagtgttaagtggactgtttggtcagatccgtagactcaaaatatattagatattgacgaaattgccccttaatatggtcatacagtcaaagcaacccactatcttgagacccacaaaacagtaaaaaaaaaagctaatgaatttccactagattctgttgtttttattagtaataaaaaatttttgagtgttaacattttgatattgtttgtatttgaaacaaccagaatgcccatcggaatgtgataggaggtgtaaaaagacacagtaccacaaggcttgcattacgttctgcaacaaatgctgcaggaagtgtctctgtgtgcctccgggttactatgggaacaaacaagtttgctcctgctacaacaactggaaaactcaagagggtggaccaaaatgcccttgaaaaaatctcccttcgttccctttttataataaaaattttcaactataactaaatttcctttgatcaatgttttatctactttattcctaatgttgtaatgttatgtcactccttttcggattttgttctaaatcctaaaaaaaatgagagtggccctatgaatgatatttttcatgaatacttgtgtttctaaagatattttcccattcatccaccaaaaaaaaagatattttccatttcgaaaatagtaatactataaagggtaaggcaaaccaaataatacaatttaaaaaattcctgcgaaagaagtatgcatatgtagaaaagagtgacattgggtctctcggcccagtactaaaaagcccattattgatttttccaagctttttacaaaatcacgtgttctaacgcgattgctttttgccgcaatcttcttttatacaagacttgggctttgggcagttggaaataaataacgacaacgatattttacaatcggtgcaatgatatgaaccacaaacttataaacgttttacccgttcattaccctacgtatcaataaatactcttaataatgccttatatattgacattaatcgacaagaaatatgaggtttggagtacaactatagttattagcattaacaacaaagctcaatttagctctctttgttagacatctcacatgcattttgaatggtgatcttgaagaagatactttttttttttatcaacatgtgcatgctattttttcacaagcacaacatggggaaatggccggcaatgagtattcttcttttctaaagaactcattttgtaacctataaaagtttttggtttcgatttctgaatgaaaacatattggataactgtaaaaaatttgcagtatggttttaatagtaacgaaaatatatagatatatatgtcgatattttcattattgttagaactactcggcaccttgtagaacataactgtaaactagcgtcaagatattgatttacgtcagatcaaggctattcatacttatctactctttaggtctggggattcacttgtcaactatttttaacaaacgacaacaaaaaaatatgtgacgatttttcaagtgctccagtctcgtccaacagattattgacatgatatactactttggaccatgtatttttatgaaaatttgatccctcttcagtcttcaccgaaagaggatttggtacttgcattctctctatcacctaagttaaacgccctaacattaaagtggaaaacttcgtggagttttattttctctcttcctaccaattttcttatacaactaacattaaattctagaaccacacaaatcgcaaattatggtagatttgtgtgtaagtggttataatttttttctatataaagagttgcacttaaatttcaattagtttctaaaaaccccatccacgaatatttaattggtcaataaacattaaatagaattccactgccacgctaatatcgtgtagatatcatatgtgcatggatactgcataaaaatcagctctaataattgatgtaatttaaaaacattgaccctagtaaatgtattaacactatatatattgccttttgagggtttctttattgtttacttccaagttccaacttctctctatctatttccttcgtctctcgatctctccgtctctctctctttgtctcttcgatatccaaagagcagagtcaaagactaaacaagtatgagcgaggacaaagattacatgtcggagccatttatcgttaagaagattgatgatgaagaatcattgcttgatgattataatccacagggcaatacttctttctccaagacttgtttccatggcattaacgccttatcaggtttaatttcctcttcttcttctttttttttttttctattttcattttcgtgattgattttttctttttgatttattcaccacttcttcttatctccaaactccataactcacggggaaagatccaactcttagcatgtccacatatatggataggatatatcttaattttcaaaataatctagaaaaaactataattagctttattgtacttaatttctatagatgcatgtttttaactcaagcttttgactttatcttgtatcatctagattggtgtgtatttcaatcctacattttgtttctttacctcctagtcttgcctcagtttttttagttatttaatttttctgttgataatttatcataaccaagttaaaaccagttctacttagactgaattgtgtttttcttcgtctagattcagtttcatagtctttgataaacaatagtgctaaataaccaaatcatttttgttctgactattaaaggttaggatggttccgtttaactgaatttaacactatagtattaacaattcggcaaagttttcaatgactattgctattatttattcgctaaatgtggtaatggcctaataatgggtttatcaaactggccgctatcgttgtacttaattgtttatataccaaactagatacttagtttatactaaaaaaactaattatatactggaaacacgtctgaccaaactagaccaaactagaccatatacgaacaaaaaacagtccatataattaaatagaaagaaaccagcaattccaattatctttcagatataaatacaacgtgtcactgaacaaaaccttaacacattaacaacacgtcttcccttttcaatttgtgttcttcttcttctacaagactacaaaccactttgataaaatcaaatcatattatcttattggtaacgagaccacgaatatttctttgcgtttgtgttttcaattaaaaactgcgtttgcgttttcatatatacaaaaagaacgtttgtaaatagttaacacaaaaaacgttaattagcatatgcgttaggcttggacattcttctgatcaactcttttttttttaggtgtgggtatattatcggtcccttatgccttagcatccggaggatggctaagtttgatcatacttttcaccgtagcgatcacaactttctactgtgccattctcattaagagatgtatggaaatggatccacttcttagatcatacccggacattggctacaaagcctttggaaacacaggacgtgttatcgtctccatcttcatgaacctcgagctttacctagttgcaactagtttcttgatcctagaaggtgacaaccttaacaaactcttctcaaacgttggactcaacttcatggggcttgaattccaaggcaagcaaatgttcatcatcatggtggctctcattattcttccttcggtttggttagacaatatgaggattctttcttatgtttccgcgagtggtgtctttgcttccggggttattcttgcttctatcttttcggttggagcttttgaaggcgtagggttcaagaacaatgactcagaggtctttcgacttaatggagtcgctacttcggtgagcttatacgcgttttgttattgcgctcatccagttttcccaactctatacacttccatgaagaacaaacgccaattctcaaacgtaagttttttacataacggatcattaggttattcttgaccaaaactcacactaataattttgcatattttttttaacattttcaggttatgattatatgtttcacaatatgcaccttcatatatgcatcagtggcggtattgggttacttaatgtatggatcagatgttgaatcacagatcactttgaatcttcctactgataagcttagttcaaaagtggcgatatggactacattggtcaacccaatagctaagtttgctctcatggttacacctattattgacgcaatgagaagccggttttctcgagttttgcctaataaaagagcttctggatttttgctaagtacaatactagttactagcaatgtgattgtggcattgcttcttccgttttttggtgatcttatgagtcttgtgggagcattcttgagcgcatccgcatcggttatattgccatgtttatgttacttaaagatctctgggaaatatcaaagactcggattcgaaacattggtgctcatcggaatcactctaaccggtatcgtggttgtgataaccggaacttaccaagcggtcaaggacatttttggtcgattttgaaatcccaataggtgaagtttagcttatagagtatttgtttaggaagatatttgtactaccaacagtccaataccataatttgttttatttgattttttgtgactttcgttaacgaagtttttttgagttatgtaataatttggaatgagaaaaatgtgaatacgttaaatgaagacatgagttgatctaggtgtctgtattagacactaatcaagtcattgattcgaattcttacatcgccatcggtatttaacggttgatcagtatactcagacagaattgctcgaaactcgtctcccgttaaggtttctttctccaacaaaacatcaacaagcttgtctatagcttctctattattcctcacgtgctttttcgcaacctcgtaagcgtcaccgattattttcttcacgcaagaatcaatatcctccgcaagtttctcggacattgagttcctcgctagcatccgtagaaccacatcgttttgcttaaccgctgggtcggttagtgcccatggaccgatttccgacataccaaacatcgtcaccatctgaaccataagaataattagaaaatccaccgtttttttccggtttatgaaaattttgtttcaattactgtacctgtcttgctatctcagtgacttgctggagatcaccggcagcgccggtggttatctccggttctccaaaaattacatcttcggcggctctgcctccgagtcctccgacgattctagcgaacaattgctgtttagacaccaatgtcggatcttctcccggtaagaaccacgtgagaccacgtgcttgacctctaggaaccaacgtaactttctgaaccggatcatgaccctccgtcaaagtcctaaaccgaagcagaaacggttcaattcgacttaaattgaccaaaccggagacatgaaatataagtaattgaaattgaaccggacttacgcacaaattgcatgtcctacttcatggtacgctacaatcgctttacttttaccgtcgatcatctttgtcccttccattccggcgactatccgatcgatagagtcgtcgatctctgtaagggtaatcttgtcttttcctcttcttccggcgagaatcgctgcttcgttcataagattggccaagtcagctccactaaaacctggagttctcatggcaattacgctcaaagatacatctttgtcgagtttcttgcttctgctgtgaacttttaatatctcctctcttcctcttatatccggtaaaccaacagaaacctgtttaaaacatgttgacattataccaaacctgttcgatttattcggtttaaggattaaccaacatacctgcctatcgaatcttcctggtcggagcaaagcagagtctagaatctctggccggttcgttgcagcgatcacaattactccggtattccccgcaaacccatccatttcggttaatatctggtttagcgtctgctcacgttcgtcgtttcctcctcctataccggttcctctcattctcccaacagcatcaatctcatcaatgaacactatacaaggtgaattagcctttgccttgttaaacaagtctctagctctagatgctcctacaccaacaaacatctctatgaactccgaaccagacaatgaaaaaaaaggaacaccggcttctccggctatagccttggccaagagtgtctttccggttcctggcggtccggtcaacaagacgccttttgggattttagcccccaaagctgagaatttctctggggttttcaaaaattcaacgatctcttcaaagtcttgcttggcttcgtctactcctgctacatcctcgaacgttatccctgtgttaggctccatctgaaacttagctttgcttctgttacaagaaaacatacttgtaaaactcaatcttgggttgatatatattcaaaattgatccttttaccttccaagaccaaaaggcaagttaggtccagcagggtttcttcttgaagaagatgttaaaagcagagagacaagcaagatcaaaggaaaccctaaattccccaagaagttgagcaagaaagctccccagttcacattcatgggatgagcagcgaaatcgacgttcttctccttcatctccctcaccagatcgactggtaaaccgggaaggttaaccctaaccctctggatctttcctactactggattagagatctctacgatcgcaaccgttccgttctcgatcaagtcaactttcttcacttcattctctttcagatgctgcaggaatctcgaatacgacattctattggaagtggcttcgatgggagcttctggttcagcttttgcggggtgagcaagaacagttcctagcgctgacgtaaatcccaaggcagtcgtcaaactcagtaaatttctcttagtgaatttgtggtgtaaaatttgggttttgagactaggtttatgtgtgtgactggatttggataaagaagccggtttttgaaattgttgagacttcttactacaggttgggatgttggagagagggaaagacaaagctgatgatgatgatgccattttcatcaaagttaagatatttgttcttcttcgagattatgcgtcaaatgctattaatttcttagaataagttttggtcttttaatgttttattcgatgggtgtgtacaagattgttttataaaccaaaaagatgatgatgagtcatgactaaaacaaagaggatgtttctagtttcttttgtcttctctggaatatataactgtcttcttgaatgatccagagattgtactgtactactgtagaacaaaaaaatctataacataaacacatagtccatgaaaaaatctcaaccttcgaatttctacactctcctttttcagattactttttcaacttaaatttaaccatacacttggaagctaaaatgacatatagagtttcataataatctctgaggccccattgctccttagactcgagccaagtccatggaaaagactgcctacaagggttactatgtaattggttatcggtcctcactagacataacaattctaacatttatgataaaactgccaaccaggtcataaaccagaaacacataaacgccagaatccagagcatatacaagggtttggatcactaccataagaccatgagagccagaaaacagaatcaagaaatcaaagaacacattcaaaaacttaaaaaacaaaatcatttattcttcactgttaaccattttctgttgcaatatccttgtaaagcttttatttaaacacatggagatttaacatagtattagtttctgtaagaagttcttctgaaaataactaaacccaaaagaaaaaaaggttgtttataaactaatcaaagtaatcatcatcatcatcataataacctttacctcaaaaagattgaacctttatacttcatttcttaaccttcctttgctgcagttgctgcttcttaggtccaggaacctctaatctcccaaccgaacacccacatttagcccgaaaaacaagcacggctcgcccattaggtggagccatcttcttcaactccgcctctaactcacggtgatgatcacgaggcaactcaaacaaacccttcttactaacactcttgccactattagagctcttaacacaatcctcagtctctaactgaatatcaaactcagcattagctttcctaagccctttacagttcggtttcccacatcgatgacgactacacagtagtataacaatcatccaagcagataacgcagtacacgagatactcaaagctattaaaccgtagacaattggatcagggttacgcaaaatctcttctttcactaaacaagagagctcagagaagatttcaacagatttgatagtgatgaatttgatgtaagggaagattaaaaacccggaggatgtgatcacagcgattaagatcacaacatcgatagcagctgatctagatccgtcacagcaaacagagaaatttgaagaacagcttgacgatgatgactttctgttgctgctgctggttcttgattgttttgaatgatgatgaaaatctggtgagtgagccatgattggagattggtctacgagggagattgagttctggaaatataccatctcagagaaagtcgaatccttttttgaggaaacagatcaaatcgaagtagccctagaatcaaaaacataaaaatcgaaactttataatcatgatcgatcaaacacataaaaatcgaaactttataaatcagatcgagtttaagagagattctggaatgaacctgattggatttggattgggttcaatctgatcgaaatcaattgaacccgaaacgggaaaatgaaaattgcgaaatcagatcaatccatcaaatgagaaatcttcaaacttgtcagcttcccaattcaaaatctaatcgaatttggacgaaggagaagctgaatcgagatgtggagaagtcgaaaacgttagcgagggttgaaagtagagaacatgaaccgtagaaatgaaacaggacgaataaggaagaaatctggagtttgggaattgtatatgtaaaaggaaaaattagatcgtgttcgtcaacatgatgataatgatgatggtttgattatgaagctgcttgtctcttttacggtccaaattcgatgatctcgtgtcgtgtaagaaggaagagagcaagtcacacgcgtttagattatgtgttgagcagagttaataaaactcaatgaatggttcgtgcataggtgtatgtatctccatgaccctaatttttttattaacattaatacactttagatactttggtgatttcgtgggtcactactactctagtcactagacttctctttctctaggcttcattacattattatattattttatttttagcttttggctcttttctgacaaagtaattacgagtaagcaacaagaaaaggcccaagcctatgaatgaagcccaatttcaatctttgcattgcttctttgtttgtgtcggcccaagctaagagcctaagaggaaacacctagagtctttagttctaaagagccgtagttgggaaagaagaaaaacctcatttttagtttgcttgcactgcgatcatccgttcaaagccggtcctaatgatttactggactacatagtacatacaagcccatagcttcattttggaatctcaccaagaaaagtaaaaaatgaggttttgagtcgagacaccatttagtccacaaagtacataggtcaaccaatataattgctgccgtatttgcgctattattagctcccaaagtttgatacattcttaagacttgcgcaagtctttaagtttcttttgtttgggagacttaaagttgacttatcatcgatcggtttcatttgaacagtgggaaaatcgaactgccaatgttacttttttgcttatcttggcgaggcactgattttcataaaactcacatgcgtcaacattattttaggcttaactttatatttttaattacacaaattattgattcatttgtcttgttatgtgtttaaatgttaatggacggctataatagtaagatgacaacatggtattctattaaagctaagtcaaaccttgtccctaactacatataaacacagtaatcgatagttttctggattaaaaaagttcactaaaatgtgtaaaattttctacttttatttttattgataaagtgtgtttccattctaaagattatcacagtccaaagtccctacttgccaacctcggggacatctggacgatagcctaattataaatggaggaagttttgctttttaaaaatctggtatgttcataatattattttggaagtttttgactatatagcatttaccagataaaattagtgatacgctttggtagtggcagacatgaggagcttgactccagttcaacatcacgtggactcattggagttacacgtgcgactttgcttctcaataatcaactggcagcaatttaaaccataattaagttttattactactagttcttaatataactcacttatatatgtaaattgagttttctaatcaattaattaccatatttcttcattggatctgaagctgaagcaatttccaggaaaagtggaaaaccttgaaactaaaggttcccttttctctttattaaagttttgactatataatagaaaatggattaataactaacaaaatttactaattaaaataataatataaaggttaatatatataaattcttcagaagttcaaagagacaacaatgggtcaatcttgtttcttcaaagctcttcttgtttcctctctgatactactgatcttcttctccactggtaatagctaattgccatcttcttcttcttcttactcaaactgttacaaatatttttcagagtttatgtttttggccatatgtttattgagattctgaatttatgcctaatgattttcgtttgtgaatttgtaagccttggggagagacttgcgaactgcaaagttgtcaggagtttacagtactgctgagctatttccttccacggtacttacttgttctctacttctccttaattaaggtcttctaatcacataatgatacaaaaagaaaaacactaattaggaacctgcatatattgtagtttttaaaaaggaaaattgatcttcttttgttagttatgatatatatatattcataaatattcctgaaaaatactcactataatctaatttctaggtgtatatatttttgttcattaacaatgtaaacaagatgtgtaacaaaacaatttttccttgcaaaaatacatgcatgtttggaaattgtaattagacataaaagaatccaaagaaatttttgaaccactggctttagattttgaactccatattttgtaactgcgttttgtggtcgataaatggttcaaaggagaaataacacaattcgttatctcatctctagtatgattatattgcaatattgaataagaaatggaaaaatacaggaaggaattgtgaggaagacaatggagctgatggattacgagccggcggggtctaacaccaattggaatggtttcgtcgcctctcctcctcccgagtctccactttcataacttcagaaaatataaactcgtttaaagttttctctttcgaaacagaatggtttggcttcggataatactgcaataataacacaatatgtaaaagtttaagctctactatctcaattgtggaaaatactcgttcaaattgtaacaatatttgtttgatatcattggtggaaatgacttttgttaacctcccacacatcaatttttggatatgttgttctctttttaaaagtttgcacttgggggaaaaatctgccgctatttcaaagtaaataaatgtatctgcatatattttttgtttgtttgttatataacatattactccacaaaacaaacaccaacataatttttctattatcaaaatatatgtaacgaagctagttaatcttataaaagtatttaaactgagtagagacagtagacacaaatgttagaagatagtaaaaaaaaaaactgattgagttttaatattgtttctatatccaaactgaacaaagaaacaagacaaaatcaaaacaaaagatggacacaaatatcaaacatgaaccggtgacattgtaaaatgtaggttattttatttataaaagatggtagacattttacaatgtcaccagctctaagaaaacaaggttattttttttaaaaagaaaaagaaaaagaaaaacaaagttatttgattaaataatttaatttacataaacataaaataatatgattaacagaaaaattcacaactaatattttttttgaattatttaaattaatttatgttaaatatatatgatttagatattacaatataatgaataatatttttttaaagaaataacgattaatttaaagtgatttgaatcatatttttttttgggacatcaagtgatttgatcttaacccaatataatttatctttgatatcgaaaccatattttaaatatgttaaaataatattctataattaatttcattcatagccaatagaagttagaacaacaacagattaagctcagggcaaaccctagaaatactgattacccccaaatccgaagaaacgatttcgtctggagatatcaaaggttcctacttttctcttttcctaaatccaacgtctctgagattgttgttatcggaatctctaatcgttcctatattgttgttctcagttttagctactcgatagtttcgttgcttgttcgtttgatagactagagttcccagagttctaatttgatatgtctcctggatcttcttagaaaatttgattgatttagatttatgcttagctgaatctttgtgagctgctacatttctgctttaattggttaaaagaactcagatgtggagttctgattgtttaattttatattttcattgcaagctacagatttgacaatgtcaccggatcatagaatgtcaccggatcatagagatagccatagaaagaggtctcgtcctcagtctgactacgatgataacggtggaagcaaacggagatatcgtggtgacgatagagattcacttgtgattgatcgcgatgacactgtattccgatacctgtgcccggtaaaaaagattgggagtgttattggtagaggaggtgatattgtcaagcaattgaggaatgatactagatcgaaaattagaataggcgaagcaattccgggatgtgatgaacgtgttattactatctatagccctagtgatgagaccaatgcctttggagatggagagaaagttctttctcctgcgcaggatgctttgtttaggattcatgatagagtagttgctgatgatgcgagaagtgaagatagccctgaaggagagaagcaagttactgctaagctgcttgtaccttcggatcagattggttgtattcttgggagaggtggccaaattgttcagaacattcggagtgaaactggtgctcagattcgtatcgtcaaggacagaaacatgcctctatgtgccttgaattcagatgagctcattcaggtatctgggaaggaatatgtgtttctttgtgttatgtgttttactttaattgccttttcctatgtgtaacatttatgtttcacttagccttttattttcatctctttttctttctagatatctggagaagtgctcattgttaagaaggcactgcttcagattgcttctcgccttcatgaaaatccctcacgtagtcagaatctactttcttcttccggtggatatcctgctggctcactcatgagccatgcgggtggtcctcgacttgtaggtttagcaccactgatgggttcctatggacgtgatgcaggagattggtcacgccctttataccaacctccaagaaatgacccaccggcaacagagttctttattcggctagtttccccagttgaaaacattgcaagtgttataggaaaaggtggtgctctaatcaatcagcttcgacaggaaaccagagcaaccattaaagttgatagctctagaactgaaggaaacgattgtttgataactatatcagcaagagaggtttgactttctttcattggtcgtctgtcttttagttaagaatattttttccagcttttcttccttgacagtgtctaatctgttttaggtttttgaggatgcgtattccccaaccattgaagcagtaatgcggctgcaaccaaaatgcagcgacaaggtggaaagagattctggacttgtttcattcaccactcgtcttcttgtgccaagttctaggattggttgtatccttggtaaaggaggagccatcataactgagatgagaagaatgaccaaagctaacatccgcatacttgggaaggaaaatcttccaaaagttgcatctgacgatgatgagatggttcaggtaaacttcatggtgctactcctcaaattttcattgcagtttctcctctcacgcttaaggtacttcacatggagcgttaacagcaatagcaattttgatgttcagatttctggagaacttgacgttgccaaggaagctctcatacaaattacatcaagattaagagccaatgtttttgaccgagaaggtgctgtttctgcacttatgccggtcttgccttatgttcccgttgcaccagatgctggtgatagatttgactatgatagtagagatagcagaagacttgaacgcgggaatccttatcctggtggttatggctcaagtggtgtgtctgctgaagggtactcgccttatggtgcgccggtatgtcttctaaaaggttcttttatgtgtaacgtgtttttgaacatattaattctctgttaatgactcttgggacatgtttttgtaggttggtggtagtagtagtactccatatggagtgtatggaggttatgcatctggacgcagtagcagttctgggtgagattatttcttacctgatgtatttgtgacattatacaaagtatttacccgtcagattgcggttatcaagtgtttcgaatgtcaacatactgcataaccttttgcttttcatttgcctaacaactcctggtggttgatccttatcatgtgttttgtcatcaggttatcaagtcattcttcaacctatcgacgcagaaactatgattactagaagctattggtggaggtgattaaaaaggttagattataatattgtttgtttaagtccttttaaactttagtatacctagctatataccccaagttcatgagataatctgatctgatctgtcccagtgtcagaatctgattcactgcttttttccctttgtgaccttttccccatcccactaaaacagtgtgagatcctgaagcctgaagccaacccacagcccacagttgaagccttttcaccaaacaagatgacaaagctgaaccaccaaactctacctaggagaactgattacatgtggatgagatatttaagtttgtttcaaaactttccatgtcctcttgtaaccaaaatactgccaagttcctacccattaaaccttatccagttggccttggctgtaatgctgtctatctttcagtttacctttgtctttccttggattagattcagaaaaccttagtttggttgtgcgtagttccgttttgtatgaattatatatgttaaaagctctcatgtactggttaagcttacagcacgcttaagcctctctccctgacaggtttcggaatcacaaactattttaccttataataatctctcagatttttaaaagatcgtatgcagggaaagagataagtgagaatctcttggttcttgtcgacattgttcaggttaatcaaccacttgggcatatcaatctgttgtgcccatttggtccacatgaaaggtatatacaattcttcttctctctttgttgtttctttgcacatatgcttctctgctagcagttcaaagacaggttgctatttctggaagattgtcgtttttggaaaccaatcttttgaccattagattgtcgatagctccatctcgccatcagtttgcgcggtgaacactccgaaagattacgatccggttttctcgactcagccaccccggttttttgctgcctaaattaaagaaatctcttgatttctacaatgtttaatgatgagttaaattggtagcaagaactatattttgtttcaacttcaagcagttaaaacttaaaactactgaaacagtttttttttttttttttttttttgtaaaattatgtagatcaaacaatatttgtataaattttccatctttccattttaatccaaaggcttgtaacattaggcctgtttatgaataagtcaagcagtcacttcgcttacactgaaacggtgacgttttccaattgtttcgatcttttagtttagttttctcgttcgtcgtcggtgacagtgagagctcgaatgcagtagcagatgaataagaagaaggccaagagagttccattagtttctgcattcgcatgcttaatcttctctccatcagtagctcttctcggcttcgttttcttaacaaggtttcttcactcacatatcattactctttcgcgtttttctctactagctcacctgcttcgtcctcttcttcttccttgggaaatgattcagcgatcccaagaaattatgagtcttcctcgtttaatttactttcgaggtcgaaggagaagcgtgaccttactggttcctctctaaaagacttgctttttgatttgtcagatgtagttcccaatattacccgtaggtttagaagatttccgggcttgaaacccgaagatgtgcttgaattatcattgggttttgaatctgagcttcagagaggtggaattggaaatataaaggttcaagctttatgggagattttcagatgggctagtgtgcaataccaagggtttaagcatttacctcaggcttgtgaaattatggcgtcgatgcttatcagggaaggaatggttaaggaagttgaattgttgcttatggagatggagagacatggagacacaatggttaacgaggggattttctgtgatttgattggtaaatatgttgatgatttcgattccaggaaagcagttatgctgtttgattggatgaggcgtaagggtttagtacctctaacttcgtgttatcagattctaattgatcaattggttagagttcatagaacagaatcagcttatagaatttgtttggattgggtggagacaagggctgaattaaatcacatgaacatagatagcatcgggaaagttatagagttgctttgtttggaccagaaggttcaggaggctagagttctggcaagaaagcttgtggctttaggttgtatcctgaatagctcaatatatagtaagattactataggatacaacgagaagcaagactttgaggatttgttgagtttcattggtgaagttaaatatgaacctgatgtgtttgttggcaataggattctgcattctctctgcaggaggtttggctcagagagagcttatgtatatatggaggaactcgaacacttgggttttaaacaagatgaagttacctttggtatcttgattggttggtgttgctatgaaggagatattaaaagagcggttctttatttatccgagattatgtcaaagggttataaacccgatgtgtatagttataatgctatcctaagtgggctttttagaaaaggattgtggcaacatacccattgtattctggatgagatgaaggaaaatggaatgatgctcagcttgtctacttttaagataatggtaactggatactgcaaagctagacagtttgaagaagcgaagaggattgtcaacaagatgtttggttatgggttaatcgaagcatctaaagttgaggatccactttcagaagcttttagtttggtaggatttgatccgttagctgttagattgaaaagggacaatgattccacattttccaaagctgagttctttgatgatcttgggaatgggctatacttgcacactgatttggatgcttacgagcagagggtgaatatggtacttgacaggtccgtgctaccggagtttaattcgcttatcgttagagcatctgaggacggtgatttacaaacagcattgcggcttcttgatgaaatggctcgatggggtcagaaactatcgcgtcggagttttgctgttttaatgaggagtctctgtgcatcgcgtgcccatctcagagtaagtattagtttattggaaaaatggccaaagctggcttatcagttagatggagaaacccttaattttcttgtccaagaatattgcaagaagggatttagtcgccatagcaaactcattttccataaaatggttcaaatgcatcatcctatcgataacgtaacttacacatctttgatacgttgtttctgtaagaaagaaacactcaatgatcttctgaatgtctggggtgctgcccagaatgataactggttacctgatttgaacgattgcggagatctgtggaactgtcttgtccggaaaggattggtggaggaagtggttcaactctttgagcgtgtattcatatcttatcctctatctcagtcagaagcgtgtaggatttttgtcgagaagctgacagttcttgggttttcttgtatcgctcattctgttgttaaaaggcttgaaggagagggttgcattgtggaacaagaggtttacaatcatcttatcaaaggactctgcacggaaaagaaggattcagctgcatttgctatactcgatgaaatgctagacaagaaacacattccaagtttgggaagttgtttgatgttgattcctcggctttgtagagctaacaaagcaggaacagcatttaatttagcagagcaaatagattcatcctatgtacactatgctttgataaaaggattaagcttagctgggaaaatgctcgatgcagaaaatcagttacgtataatgttatcaaacgggctttcatcgtataacaaaatctacaatgtgatgtttcaaggttattgtaaaggtaacaactggatgaaagttgaggaagtactaggactcatggtgaggaagaacataatctgttcagttaagagttacagagaatatgttcgaaaaatgtgtttagagcctcagtctctctctgcaattagtctgaaggagtttctgttgctaggagaaagcaatcctggtggcgtaatcatctataatatgctgattttctatatgttcagggcaaagaatcacttggaggttaacaaagtcttgctcgaaatgcagggaagaggagtgttgcctgatgaaaccacatttaactttctcgttcacggatactcttcgtctgcagattattcgagttctctgcgatatctctcagctatgatctccaaggggatgaaaccgaataatcgaagcttaagagcggttacaagctctctgtgtgataatggagatgtgaagaaagctcttgacttgtggcaggtaatggaatcaaaaggctggaatttaggttcttcagttgtccaaaccaaaatcgtcgaaaccctgatttcgaaaggcgaaattccaaaagctgaagactttctgacccgtgtgacacgcaatggcatgatggctcccaactatgataatataatcaagaaactatctgatcgcgggaatcttgacattgcggttcatctcttgaacacaatgttaaagaaccaaagcattccgggttcttcaagctatgattcagtcatcaatggcttgctgagatacaatcaactggataaagctatggactttcatacagaaatggtggagttaggtttaagtccgagcataagtacatggagtggtcttgttcataagttctgtgaggcatgtcaagttttggaatcagaaagacttatcaaatcaatggttgggttaggcgaatcaccgagtcaagagatgtttaagactgtgattgatcggtttcgagtagagaagaatacagtgaaagcttcagagatgatggaaatgatgcaaaagtgtgggtatgaagttgattttgagactcattggtctttgattagtaacatgagctcttctaaagagaagaagacaacaacagctggtgaaggattcttatctaggcttctctctgggaatgggtttacttggaagcgatgactctatttttaagaagttttggggctaatttagaaatataagaagattgtgtgcttttatgtagttttacgattgtaacgcgctacgtggaacgccctaagagagccagagtgtttatttaacttttgttgttgtcaacttttgcgttattttgaccaaatattatctccaaatgactttcacttacgatttaatttctgtcatacaaagtgaaaatatacaccgtagatgacacataattataattagaagtagaataacaacagattttttccaactgttatttcagttttactatcatgagtgaatatttcacttatgagaaaaaaaaaagagtgaatattaattttgaacaatcaacatattgtgcatggaaagttggaaacacataaaaccaactcaaaagctgaagacataacttcgaattcaaaaagcttacatacttttgtaaatatttcaatattatcttttggtttaggtggtcctgctttagtttgatattgttggtttgatggataaataaaaaggtttatatttcattaataacttaagtaggctatgtgtttgacacagagaacacatttgggttcaacatctccaatcacttgggaactttaattccaatttccaaactatctagagatttcctatatttagataagtaataatcaaaagaacaagtgggtttgtttgttaatcatctgcgaacataataactaactccattattttaacttatcatcactatacatataacttgtaactactccacatgttccagctaaagatttgtacccaaatttggacagttagtttatgtttccaaatttgaaatgtttggaggtttggtggatcatgaaggttttaatatatgtaaagattcattaagcaaattctatatgctaggcttatggaattatattactaaaaaggggatacctttagcaagtacaatagcgataaggaccttatcttaaccactatatgtcccaaagcatgcactatttatacactcccactcattgctcttaaccatcatcaaactatcacaacatctatttcttacctaacttccttcccaagaaacctagcaaaccttaaagagtaaagagagaaaatgaagtccggtcaggctgaaatcatggaaacaagcaaaggtatccaaaagagcggtctgatgagcagaaggatcgcgattcttgagtttatcctcaggattgttgcattcttcaacactataggtagtgcaatcctcatgggaaccacacacgaaactctgcctttctttactcaattcatacggttccaagcagaatacaacgaccttccagccttaacgtatgtattttgattctttaagattctctttaacctgtttttcactatcagggaataacctggattcattcttgaagagtttttgccttacgtttgtttgatcaatcaggtttttcgtggttgcaaatgctgttgtgagtggttacctcatcttgtctctaactttggcctttgtacacatcgtcaagagaaagactcagaacactagaattcttcttatcatccttgatgtggtaagtcatcagcaaattaaaacatgttctgtttacagtctgatattactgcttacaattgattcatcctcatgtgttaggcaatgttgggtcttctaacttctggagcatcctcagcagcagccattgtctacttggcacacaatgggaacaataaaacaaactggtttgctatttgtcaacagttcaactccttctgtgagcgtatctccggttctttgattggatctttcattgccattgtcctcctcattcttcttattctcctatcagccattgctctttctcgacgccattgaagatctggtgttagcctgaaatatgagttttcttttccactgctttaagaaatgcatggtttggtgtgtaaaaatgttcacttaagcttttcttttcatttgtgctttttcttttctcatctccattgatattttgtgtgtgatatgtaacgggctattctatcaaaaattgtgttttgaccatctgttaccacaatctcttatatcctctctcctttttggtgttctataatctatgctaaatccagattcatgaaaacaacatacagtaatagatgacaggaaaatgctaggtttataacattaacaggttacctatatgttacacaatgattctgtgaaggatcatctcgaaggttaagagcataaacatcgatgtcgaaacttcctataaaatgtggtgctcagagttctaagttaagaactcaaaaactcaagagaacaaaaaaggaatgaatctatcaaagttatcatcattgcattgagttatgcaatcttactgtccatagttcgccaatgaagcgttggtttttcaccttaattaatccgacctcttgatcttgactcaggttctgacgaaagtaaatatctcatcatcaatttgtcgtcatcttcctcgatcaagctaacgccagtcggttttttcactcttgtatcatcaaacatcttccttactttctgcaccccgtcccactgacctgtggaagcatatatgttggatagcaacacataatcaccactctcgtcctttctcatactgagcagtttctcatttgcatacttccctaactcgacattcccataaatcttacatgcacctaatagcgttcgccatacaatagcgttaggctcaatcttcatagactccacaaacatgaatgcttcctctaattgccctgctcgtcccaacatgtctaccatacaaccataatgctttatgtttggttcaatattatacatatccctcataaggctgaaatacttacgcccttcatcaactctccccgaatggctgcaagctaatataactccaatgaaagtcacctcatttggccagactttcaatctttgcatttcttcgaacatttcaattgatccctctgcatgatgcaaagccaaaccaactatcaaagtattccatgttgacaagtcccgatctttcactcctctgaacacttcaattgctctatctatgcttccacactttgcatacatgtcaattagagcattccaaataggagtgcccacatatatggaactcgaaacagaagccgtttccaagatatagatatgaagtctcttcccagtttccaaatctcctaagactgcacaagcagataacaaactcagtattgtcacaacatctgggtgttcaccagcatccctcatctccttgaatatacctagcgcttctttagggtacccgcaatttacatatccagagatcatcgcattccaagtaacaacatctttctctgtaaacctatcaaagagctctcttgctgaatccatctccttacatttcaaacaaccagtaatcatcacattccaagctacctgatctttgtaaggcatttcatcaaaaagcctcatcgcctcatcaatcttccctctcttagcatacccagaagtcatagaagaccaagcaaccttatgagctttcgcagaatcatcaaaaagctcacttgcaattcccaaatctccacaattagcatgaaaaaggatcaaagcattcttaacatactcattcaacacaaacccatgtctcaccactttcccatgaaacgcaaaaccattacttctccactcaagcttcgaacacgccttgagaacaaacgtaaacgtatacctatcaggcgacacacctcgtttctccatctcagtatacaaagaaaccgttttttcaggtttcatgctctgagcagagccacgcaaaacatggttacaaatagatacgtctggtttaggaatttcgtcgaacaacttgtgtgcatacttaagcgcaccaggaaccgacaaagaagctgagtaaattagctcaccaacaacagaaagattagacatgagtccattaacaaccatagaagcatgaatttgcttcaaagttcggatatttttgcagttttgccatagtttcggacgacggcgattggtggttcggtcgtttgtttgtctcctgatcatcgcgttttctttcttctccaattggttaattacgacggttcggtactcataagtgatttccggtttaggcaaaccaaaccggtatccaaaattcaattaaggtaattccattcggttttaaccaaataaatgagattacaatctttttttattcgatagatgtctattacaaatttacaataacagaagatacgaaattagagtgaaaacgaagataaaatcaacttcatctatatatacatttttgcagtcattttatgaaataaatcctgcagttggaacttatttacaatggctggcactggcttattaaagcgaaaattaactaccaaatcaaagcaaatcttattcaaaagaatatgcttttattccatagcctaattatttttgccaaaatggttaaaatatttaaaaattaaataatcatttgaaagaaaactttaaattgatttaaattataaatcttttaataaaaatattattaaaaaaaatagaaaaataatttcaccgaacatgattagatagtaggactagatggtaggacgtgtttataatattataatatataaactttataacaattaaataaccatttgaaaaaaacttttaaattgatttgaattaaatattttttaaattaaagtattattaaaacaaaaataacaaaataatgtctaattttactgaacggggttagtggtaggacgggtttggtcgatagtattacgagacggtataccacaagtgaaatctattagatatgtttaatttcactgtgcaggattagatggtatgacgagttttgatcgataataatacgaaacgatatactacggatgaaatcctagatataacaactaaaatctatatatacattatcttaaacactaaagaaagcaaacaatattaataaaacaaatatttacatatacattttatataacaaattttattaaaaacctagccccgcggtataccgcgggtcaaaatctagttgtacatatttgagtaacaaaatatatatttagttagagatccatgtatactctaactttggtacctttttaccatgtgtgaagtaaatcccgtcttctttagcatcccaaaagtttttcttaccatgatcaaatacgccactgccactttcaaatgccctaatctttgcataaaaggattccctccgaaagatacaatcaattttgtttttgaaatcgaatttaccatgaaaactataatcgtaagtttctccagggtttaaatcaatgctgcctagagtttctttgttaaaagtacaataaaccgagagatcttttcctggacctggactcagagaattcttgaaatgtagagagtttttctttccaaactgcgcattacacaacccaacatataataccataacaaacaaaaagcacaaaagacgattcattctttttttaaaagtgatatatatgtatctaaaagataaagatatctatttatagaaacttttttaaatacaaaaagcaagttgctctataacccatcatcatgttttcattgtgatcctccgtaaagacatagaaatgacagaattggggatttaatggcatgcatgttacttaaatcaaggccagaatcaataaaggcaagctttgtgtggtgtgttgtgaaaacatttgaaagtcttcatttagttggttttgttcttaagaagaagaaaaaaaacatttctaaacgcaccaatagtcacatagatgataaatgtgattgcaatatcttactcgataagtttctattccaataacagaatataggaaattagtaaattacaatgaaaacgaagatgaaataaactccacctctcttgagcaacaaaatatttttaatttgagacacataaacatctaagcagagaagagcaatttcttaatcacaagtaaacagagaactggggagaacaatgagaggtgagttaaatctagtacagtagctgctgctcttgttggtgtggtgggtttcttcctttcttggtcgtcctcaataatttatgtactctccttttgaaggtgactttgcgaggaagtgatccctcactagtcagcattttattaacttagtcggccctttgacaattgactcatgttgttgtactaaattattacttttgcttaattaattgagattttctttgttggttgtgtgttgccaatcttatgaattaactcactagtaatgtcttatgtttcgccttttgtggttaacacgttttcttatgttgtttggcctttttttttctttgttgacttgtaggttgatgattgattaattgatcatatcttttggattgtattatgtttgaagaaacctgattttttttatttttttacaaatatcaaatttgaaatatttgggagaaatggatataggtatcattaattttagctttagacatgaaaatttgttatcagattcctttccactgaaagagttgtttaagatgtgattaaagacttttgttccacgccttaattgctattatttgtcaagttgatgcataaactctcaaaaggtaacaaaaagagatttggctaatctaatgtcttttcctgaaattaagtcaatagtgatccttgttgtttttttccccttctttatatccaagttttgtattgtatgatagtttattgatacaaaacatttcttatgtacgtaccagctaaaacaaagtaactaccgaaccaaactacaagtgttgaatcttttcagtctgaatgttgcagattgagcatgctacttctcacatggcatgtatttaggctcggtgtttttgatttcataagtgtgacttcttgctttttgcaatgtctgatcaagtacacttatgcaggagatttgtagcatcaaatgtgggaagtctttttatcggaatcgtggatcgatagaatatcgacaagtggcgtcatttatgaaggctaacttgaagtatgtaaggaccatacagagtgtaggagctggcaatatggtatcagcaagacatttaaagaggtttgtccccattgtcctttacatcatttgcagccaatatgattttcttctttgatccatgagctctcttcctctctcttcttcttcaactttcatattcacatttattcattttattaaaaactgatttctttttgtgtttatttgtacaattctttatgattttgtcttatcgttctctgattcgatgaagatacttcttacttaccccacaaagcttggaggcccacctcaataaatccatcttttgccttcatggaacacatttagctactctaccttgtttaatttggtcttgtaaaatctctttaatgtcaccgtttgccttcataaatcatctacctttcttggcaggataatttaccttgatgataacatttgtacacctgcaaggtaccacaaccatataagatcacaagatgaggttaaaccggtttccgtaccattgatttaaacatcaatctaagtagatttgggttctggtgactgagtataagctcattgttctcatatattctagtttttttaaaaatcaatttgaagatgtagatactcttggacttgacatcaaggacaatgtagcaaccaagtgattttctctacaactacacataagatatatatacacgcaacttattcaaacctagaaccctcactttgcaagactattattgtatataaagggtttatctggtgcctagtgcataactaatatagagttccgtgtgaattttgttgtagtcataaagtttctaatcgtttgcttacgcaagtttaaattttaccatttgaagagaattaatgaaaaaaaaaaactgaataaagaagaaattctatgcatatgcttacttaacttgcatccactaagttttttctcctactttatgctctctgtctcacttatttactattgtagtgtcagtttcctcttagtcaccgccatttcacagcatttactatctactctttttagtaaaggttgatgagagataagaaaatgtcaaagcagaaaaaagtcaatttataagattttgatgatgatgtagtgtaacttataaaagataactagttataggcttagcatttacatagagagaaaaacaacagtatggacttttaaagacttaaactaccaataatagtaatttgaagctagctaacaaaccaaaggcatctcttcttattttgaaccattgtataaaagtagattgttgaaattttagtatgtgttatattcttataacttttataggtaagtttgatgcggaagaacgatgatggcatttcggatgaagatattagagtgctagaagctgaacatgtaaaaataaatttgagatattgatcttaatataactaagatcatcaaagtgagggctataaggctattagggtagatagtgacctgaatttacttctagcacaagaaatataaccgctttaaatcttgtgatatggaaaagtaacagtggtaagtaataaaagatcaccgcttttatctctgtgtgagttatttaggggggacttgttccaggtcttcgagccacaaaggtaataacttctatagaccccattttgttaataaatgctcatccatgtgagtgagccggggaaaaagggattcatttgttgtgtgtgtctttctctttcctctatatatcatccttcttcactgagatatgcttcacttgtaacatttccacaactgtagccaaacttttgtgttctgatagtgatgatcatgatcatcacatgaataagtagaagatatctcttaccttctccttcttctaataagatcagagttttggttcttatttctttgctctcaaaacaatgggtagatcaccgtgttgtgacaaattgggtttgaagaaaggaccttggacaccagaggaggatcagaaacttttagcttatattgaagaacatggtcatggaagttggcgttcattgcctgagaaagctggttagtgaatctttccacattttgtgctctataatcaaaactttctctcatatttattcctttctcttctcaggtctccatcgatgcggaaagagttgtagactaagatggactaactacctaagacctgacatcaaaagaggcaaattcaacttacaagaagaacaaaccattatccaactccatgctctgttaggaaacaggtctggtccttcttgcaacaaaacaaaacaatcacaaatcttttcctaaagttttcatgattctttttttgtttgtatatagatggtcagcgattgctactcatttgccaaagagaacagacaacgagatcaagaactattggaacactcatttgaagaaacggttagtgaaaatggggattgatccagtgactcataaacccaaaaacgagactcctttatcttctcttggtctatccaagaacgcagctatacttagccacactgctcaatgggaaagtgcaaggcttgaagctgaagcaagactagctagagaatcaaagcttcttcatttacaacattaccaaaccaaaacatcatctcaacctcatcatcatcatggattcactcacaagtcattgttacctaattggacaacaaaaccacacgaaggtaaaccaaagaaacacactaagtctccgcaaaatttaaactttggaactttgtttgagttttgtaagacaatgcagatcaacaacagcttgaatctccgacatctacagtgtcattctctgagatgaaggaatcaatcccggcgaagatagagtttgtcggatcatcaactggtgtgactctgatgaaagaacctgaacacgattggatcaattcaacgatgcacgagtttgaaactacgcagatgggagaaggaatcgaagaagggttcacgggtctcttgctcggtggtgattcaatcgaccggagtttctccggcgataaaaacgagacggccggcgagagtagtggtggtgactgcaactactatgaggacaacaagaactacttggacagcatttttaactttgtagatccttcaccgtcggattcaccgatgttctgaatctaagggttgatatttgttgggaatgtttttgattcttttttagtttctagtttttgtgcttaaactctgattagacaatttttaaactaatccaatttttgcgctttcttttttctttaattactgtttcactaaattatgctatttggattaacattccaaaaaaaggacgtcgtagagagagagagaaaaaaaaaaagacaagcatgaagtttatgtttgttcaatttcttagaattttaaagatagtttatgcatggttcatagatttcaaggtccggagaccaaaactgttccatgcaaaatactttgatcccaatgtaattaatttttgttaactattaattagtgttttgcttgctatttgtttacgtagttttgtgctttaatgatgcaaaagataaaaagaaaattccaacaaaacttgtttagtcgtctatttctagagattcaaagtgtgtttctatatttcttgtagtattattttgctccgagatgctttaagttaaaataacataaaaacatgcatgagcacatcatttcatggacgtctttcgccatgaataggttgctgcaaagcattggtcttcggcaacttgaagacatttttggtcattcttgagtgaccgaatcgtatctttttgattcattaagatccaagatattgaatgttctctgacgaacacgattactacatatcaaccgtcccccggattaaaaaaatctatcttgaacacagtttttgtacgttaccacttctacaaattaaaccaaaatcactctactaattaaccagtaaccactacactagaaagtatacatatactgtggtcaattttattttattttattttgttaactacgtaagaaatgtgaaagattgagagttacatgatgataatgtggatgtgataaaaacaacacgttgacatgtcgattactatatgagaaaattaaatgttggttgtttcatgtccttttctgccttgggctttgcctctctctctcgaatccgatttttcatttttttcatattaattgtgaaaataatataagaaacacaaaagccgaaaaaaaagaccaagccaatatttcataatgaaataataaatatgaatcgtagtgataaataggatactatatttatttggatatgacccgttgcaagtggacccaaataatatcccaaaatttcagaaacgatattaatcattgagaaaattaaattattatagcaataaaatataggataaaatttggattttcttaaaagagtttttagagattaggctaaaaagtaattaggtttagatctatgttagtcctttatgtaatacgagaatataagaggcccatttaaagcccaataatcagtttactcgggttaaggaaaataaatattacgaaaaaggagcgaacaattccaccatcacgaatcgcgatttttttttgagattacggaagcttcgcttgatttgggatttttagggttttctttctccgaagacgactccgagagaccaacagtgatttgacaatgacgctacctccaggtctttactccggcaccagctctcttgctctggtaattcatctctctaatcggattctcgatctgtagcacagattcgttttttttcttttgtaaagagtttgtgtgattcaacgagtctattgcttcaatgatcaggtggctcgtgcttcggcttttgggttgggtctcgtctatgggaacatgaagctcaaggtccttaaggtcatattctatctcaattttgtcttgtttttatcgaaattgttgattatattgctcgtatctgctatgaatctgcaataatattgattaatgaattgttttcatcatctggtgattgtaacatttgaattgttggtgacatgttatctcgaaattggtggctacacaaattttatcatcagaaaatttatgattttgatcgtagttaagagtgagatagcaaatttttgtttgaatttacagtgctctcgagctatagatgtgaattgcagaatgctgctttactccttctgttagtttgttgtttctgctagtccactgattatgcctgagttttgatcttataatcccttttagattatcatatgctacttttctacaagtcgtcagcaatttttaaacgactttgttgaaacaccactttgtggtgtctttctctggtttttgcttctgaagttactagcttttaaatgtttttggttgttagtctcctctgttctctttgagtagctgagccagtgatgtgatgccttgagcaaaatctctggttcattcatcatgttgcaaactctaaaaaggtttacattgttcaatcttgttgtttgctcatcctggttcctccactgattatctctttgcaaaccggaaatgttttataacttagatgtctctatacctgaaatgttcttgaatattagtagtatatgctaagataagtaccaacaaattgctttttcacctgcagatcaaatcgatgtcacagaagaaggttgaagccaccgctcatcattaaaccactcttctttctttacaataagatgccaaaagctgggggtgatgtctccccggttagtttgatttcttctttcatgattcatcctttagcataagaaggaacaaatgtgtttttgaaaagcatattatacggttttaagacctttttggagccataattgccattggcttaaaacccgagtcaagaacatctttccatttgttgtcatccaataacaccgttcacattcacatacacctcacctcttaaccagattatctataacactaaggacctcagtgtcccggttttgcgttatatacttcgttttgcaagagtccttatattactctacttggtcccattggacacaatctaagaaagggagaaaaaaattggtcctaaaaagcatgttccaacttcttgtgtatctgagttaatcaaagaaaaattgctattgtcgtttctggtttgttgtctgattcaatccaagcaatcatgtagtttgaatttgatttcgggatctctcttacactttccaccacggcttaaaagttcaaacaactaccaatgtgtaaattaccattacttcagtggcgacatattcatttgtcgacctacgtttttgaattatgtgggtctatggataatatgaaaaaaactgagcttattgtagcccaatgggcaatataaaagtcagcccaaacgtaacacgcgtggttgtcgtcgaactgcgaaattcaagtttcttaccattcgcacaatgagcgcgtcgatttcggcttcagttttggactttttgtgttgaagactttgagcacttaaaggctgacattattcaggctcttgatagtaccatatgaagaagttgtcaacgtcccgtttgagctaaagcagtagttaaagtcgttcctcaccttttcattcccttcttttttcttcttcctactattaaaaacgaaactacagatgcctaaatgttggaggcatgaataaatatgtttaaatatataaaaacaaaccctggtcacacactttagccaataagaatttagagtcgtgactataacatcaacatttaattgtatagtttttagtgataagtactgtttaaagtgatatagtctatgaatataagtggatttaattctggatccgcttatagttatacgtaaaatataagggaatctcattatatgggaagacgaatctaatctattggaatataacgaatattattcaatagtttttttggttctttctattttattataggtgcatgcccgttcaagctcgtcagaggctcatctcaggttgacgatctggttaagagccactttagataaagctattataattctgtgatgttatttcatggaacttcatggacatattgtatatgcatataatcacaacttgctgatttttttaaaattaacataatcaaatgccgaagaaaaacgaacagaatcactttgtttagatgaattttaatgataattgattcgcttgtgccaatttatgtcgtccagctaacttttaatctaacctttttctattggagcatcttaatattttattattgaaacaaaacattattccacataattacatccgcaaattattcactacatttacataattacttcaagtaacaattttaccacattatttcaattagtacttaaccaccaatgcatatttgttccgaatttcttgatcgataaatatccaaattaacaagttaatgaagaaaaaaaacgaagaagatcaatggtcaatatttaatcagaagcatccacgtccacttcatcagattctatctctctctctctgtaagattccttgctctcgcgcttttctctctctctctcgcgttcgttcttatccacgagctctgcaccgtcgcaatctccgtcttctccatttagatccaacacagagccttttctacatgaaattcggcaaagagtttcgtactcacctcgaagaaactttaccagagtggagagacaagttcctttgctataaacctttaaaaaagcttctcaaatattatccttattactccgccgattttggacccgccaattccgatcacaacgattcgcgtccagtatttgctgatactactaacatctcttccgccgccgacgacggcggtgtggttcccggcgtcaggccatcggaagatctccagggttcgtttgtgaggatacttaacgatgaacttgagaagtttaacgatttttacgttgataaggaagaagatttcgttatcagattacaggtttttgcttccgaatttattctagcttcaggattttaggtcaagttagaacttggttcatgtgattactgattcagaagctaaacaagtttctagaattgaatcattccataggttatcttcgattggatgattaatctcgaatcctagaacaaaattgctagtagttgaaaccggaggtagttctagtgatgatctctaatcaaattggatctagtttctctgtgcttcaagtgagtttgtctgtattgatgtaatgatacagtggtttatttgctctgtggtatatcacaatcgagatcacattgcttagatattagtatggtttatgagccttggtcatcttcttgctctgcttgtttatagacatatgaagctctaattgattagtgtgtgttcatcattttgcaaacaggagctcaaggaaagaatcgagcaagttaaagaaaagaatggggaatttgcatcagaaagtgagttcagcgaagaaatgatggatattcggagagaccttgttaccattcatggcgagatggtgctcctgaaaaactacagctcccttaattttgcaggtaatcatatattttaactagaaaaccaatttttgtaacacattactactgtatgctaaaaacatcttccattctaggacttgtcaagattttgaagaagtacgataaaagaacaggtggacttttacgtttgcctttcacacagcttgttctccatcaacccttctttactacagagccacttactaggttagtccgtgaatgtgaggccaatcttgagcttctttttccttcagaagcggaagttgtagagtcttctagcgcagtgcaagcacactcaagctcacatcagcacaactccccaagaatctcagctgagacttcctcaactctcggcaatgaaaatcttgatatatataagagtacactcgctgcaatgagagctataagagggttacaaaaggctagctcgacgtacaaccctttatcattctcatcgcttcttcagaacgaggatgatgagacggtaacagctgaaaactctccaaactctgggaacaaagatgattcagagaaggaagatactggaccttcccactgatcagaagagaatgatgctctttttgatcaagattttgagaatttgcttcttgatttcaccctaacttttcataaaattaacacattttactttacttcttcaccttttgcaggacacaacttctgtatgcatttgaattgtagtacagtcgtttatagattttcaatgaaattttcctccattgtctcaaccttgtctcattttgcaaatttgtcattctcatatctgttcaccaataatcggaacaagaacaagaacctcccttgaactgatgaaatctatttctgtctctgatgatgatttctcggtcatagacctttgaaacaatcttcatagccgaatgacaatctcgacatatcctcagattcttgaagacaagaagaggtgtactcggttttgtttccagaagcccgaaacagacagccaatttctcgctgtgacagcacaaagcttgctctttttcctccaagtcaccctccgaatgtgaaaccaggccagagacatcagggacgtagccagctgatcttatccgttcaatcacttcattcaacttcaagtagatctctttcgttctcggatgtgatctatctcctgaactaaaccgatgtactgagtcattaacataaatggaactcaaaccaggtatttttctgatgcctcgctttctcagacttccccttaacccatcagcaatgtcactccttccttctgcaacatacatgttggacataagtatttgatactctgtgttgcctggactcatctgaataagctctcttttaattcgttcggctatctccacctttccatggacactgcacgagcctagaagcgaaccgaggacaacttcattcggaggcactggcatttccctcatcaagatctctgcttcttcaataagaccagctcggcccaaaagatctaccatacatgcataatggtcaaccttaggttccaaaccatagaaccggaggctgtggaaacatcgccacccttcatctactatccccgagtggctgcaagcacttaagacagcagtgaaggttaagtcatctggcttcacctctcttatcatctgtgggaacatgtcaatcaccattctacctttcccgtgcattgctaacccgctgaacaaagcattccatgtcaccacattcctcttacgcatcaatctgaagacgttcatggaagaatctatgtttccgcatttagcatacatatcaaccaatgccgttcccaccatcacatcatcataacttgcttcctcccccatcatcatttccttcttcaatgcatacacatgaacccatcttccaactaccagatttcccgattgagcacaagccgatagcatcgagcaaagagtgacaaagttcaaaccatgcccacatctaaacaccatttctgccagaagctccaatacttcccttgtaaacccagctcccaaatacccagcaaccataaccgtccaagcaacagcatttctctcaggcatttcgtgaaaaacctctcttcctctctctaacccctcccatttcacaaccgtgtccaaaaccaccgtccatgaaacaacgctcttctcctctaactcctcgaaaatacgtttgacttcactcacaagcccacatttcccatacatatccatcaaggcattacaaacctttacactagtcaaaacccccatctttacagcaaccccatgtccttgttgagcgaaacccaaatcctccagcttggcacacacgccaaacaaacaaactacagaaacatcatcaatctctactcttttccttctcatttccacgaagagcttcatcgaattaaccaacaatccataccgagaaaaagaggataacaaagtggtccaatccacattgtctttttctgaaagaggaatttcgtcgaacagtttctgggcagtaaccatttcaccagaggaagcataaaactgaaatagcgcattgctaagatacgacctgggagctttcttcaatccagaagtggttaaaacggcgtgcaattccttgccgggacggagaaacgaacggtgagcgcaatgtcggagaaggagacgaactttttggtaggataagcatttcataagattaagctcgtccctttagtcctataactgatagaatcttagagctatggcgttagatctctgccttcgacggttctaacttctcgtgagttcaattttcccgggaaacaaacagaaaatctgggctcttaaatacacttcacgcgccttgatgagaaatttagagcgcgtgggataatgtttttatcttttgtccagtacaacataagtgacataataaaagttttggttttgatctgcaaggatgcaatgattcaaatagaaactagattactcacaactacatatttttgattagaggacgtttctggtgatgaaacctgatgtcactaactatatccacatttggtaaaggtcgttaacatctaaattatcactgacaaagacaaataaataccaaaacaataaaagtaaaataggtttgtccagagtcttcatttcatcaatctacaattctccacgtccccaccgatcaatcaacatcatcattttagattcgtttaggggtccatattaaatttacgcgtattcttaaaaaccctcccaagcaaaattcaaacataaatacatacacgtatctaagtatttttcaaacataatttaatccaatttggtaagaagatttgacagctttatgaaaaggacatgtggtggttgctacaatacgaacaatcacagataaaatcacatggaacagatatgccaaaatacgtcaaagagaaattaatccacagataatccgaatacaatgactctcctatgttcaacaactgatccacagctcattcacttccaacaaagcaagaattttgagatttttttgcatcttaagaaaatttcagtaatttaatttctcaaataaatcaaatacaatctttctttaacaatcaattcaaaggcaaaagattaaaggaaaaccaacaatccaacattacaaagagaaaagagaaactcaactaaattaaaaaggtttccctgaaaagaatttttgaggtcggtttcgattcaactaaagaactttgaagactggtgactactaccacatccttgagatcacatcccacattgcagggaaagcgaatagagataccggaatcatgaattgagcgagacctgtgaccattgaaaccgatccaatgttcttgacaggtgcagattttggtggaggaggaagcttctctactttaacagatagcttcatgccaccgtaacatccaccctttccgtcgagaaggtagtaatgcttggtctggttgagagtgacaatgtctctcccagctccacgtgtccagttgcgtattgggtggtcggcgatacatccttcatagtcagtcttgttcacttcaagaatattgtgctggtttctgtcgaacacgaaatctgacaaaaagaagagaccataaaaacattagtccaaagatttgacacatttttgatttgaaacaagatctttcagctgaaacgagtaagagattgagctataatggaaatgtctaattcaagatttcagcttttaactcagtgggacactgtatattagcagacagaacaagagacagaggaatgttctcagagtctcattcaagacaaccttaagagtgtgttctaaccagatctggactaattaggaaacaattttaaaaacctgtctgtttaatttatgacctttaaagattttgaaggagcattgtagaagaaactaggaaagagaagagctttggtatgaaaaagatgaaaactttgaaacgattaccagattcaaaacgaagcccgtttgaaatcagatctaatataaacagatccgagaaagaagagataaagagagaacatacagagccagtctccgaggtagaaatgcttgccctgagcccagatggtgtagttaatgttggggttccaaaacttgttctcgccgactgtatacttcttggccgtcactcctggcatcggcgccgccattagaaaagctagcacaaccgccgtaatcagcaccgtgaatctcgccatttttttctctctaactaaactctctctctctctctctatagatgttgtaagttgcgcaatttgtgatttagagagatggactagtgggtttatttatgtttgtgaaaatattaatagcccatttttttatttcctttttcaacctctgtttagtgagagtactgaatatattaatcaataactttctaaaaatataacaaaactcaaaaattatgtttaaccgcgttttctttttccacggtggaaagacttttggtgcaaaacgtatttgaaaattaacacttatatatatttttcctattaacagagctatgtatgaatttgtatagcttagcttaaattaaataatttattttcaaacataataattctcagattatggaaaaatacagtcaaggttgagctgacaaaaaagcaatgctttagtttaaagaaatccagacatatccagaacatcacgctctctctctatgtctaataacattattttattctttttcaaaaaaactttgttatacacttaatatttttatttgaaaattatcaacagattatacgctttttgcatgtgatgatggatatatatggttttcaatgaacgttccacacttttgttctctgcctctcattggttccttgattttccgagtcacatttatgggtttaattttcttcacggaaaattggattattcttataacaattttgaactggattttgaagtgggctttaaattttttgttactaaaggtctatgagcctaaaggtctatgagcccatatgttacgtatatgaatatgatccttttggttatccaagctaacccgaggaaaccagtacccggttatttcggttagagaagaatcagaaaggctttgaaatatgaaatgatgatgatcaatagcaaatagctatcgtgttattgttgtcagtggagtaaatacaaaagctagtagtaggattcaacttcttagagctttgtcgagatggattaggcaaatataatagctcattgtaactttatttatatgcattaagggatagaagaagaaaaatcaaatgactctatatttttttttttttttttgctaagaatgtaaatattcatttcacaatgaaaattaaggttacacaagaaaacataaccaaatttatggtcccatgccaaaaaagtttaaaaaacatggaagcatacacattcttgatcaaaacttcgattcaatccgtaaacaaacaaatgcctttggaagaagaaagaattgaaacaagatctaaagaatccctaaagtgtagctgggaagagaaacaagagtgaaagagagaacaaggcagcgaagagcttgatgataagcgagtaggtcgtcctttcaacgacagcccgagccgagagatcaactgcggaactacacgagcaaaatgaggcaggcaatgcttaccactataccaagttcctcctgaagtcagtagcacgtgcatagcaacatcatattctcaaaatgccatactagcatcaccagtcgcaagatcaaacaccaagactacctaacctttttcgaagcttaacacgcagctaacactaatccgaagcagtgagcagaagcgcagacattaatgcaacaaggaagcaataaacttggatgccaaagcagaaaacaagtgcgacatgtcttggagatgcgaggagttactaaaggcgcaagcgatctgaggcagtccaaacctttgatcaagcgaagccttaaaactccatcctagacgaaactaacaagaaacaattgcagaagcaaaacaagtctcggacaatactcattcttcattgtctcgtccccacctttggcttgggagatgagctgaataaagtggtcaaaaggggactcgcaaaagtcagagaagccggctcgaacaacaagccacaccaacagacacacaatgaactgaacaagacccccagtgaagacaagagctagagaacgacacaaccagaggttgaaacctaagcacagacagtcgccgctaacacaacaacaagcgacagagaacaacacctacaggagcacgcgtttatccagggaaaccaacgactctttcaaagcggagggagaaaaaactaaccgagtgaagacatgaagcaggcacagaagagaggagagcaaagctttccaatgtcggacagagcataatacgccccaccgagccacaaccattggagatccgccgcacgccaaaggaaagagagactagatctgggagaccatactgctcaaaccacttgccagaacaggacctaaccaccacttgaaacgagacaagcagaaacgtcgtcgaaaacaacgcgtagagtaaaccaccgagaaccaccgtagggagcctcacaaaagctcagatgctgtccacgagcaatctagaggaagagcgagaccgccgggaaggtgacaatcaccgtcctcaccgataggaccaagacaagtcgacgccttatcaaccgcaggaagcaccaccgaagacctcaccacacaactcgatcgtcaaactcgtcaaatcgccgattggaaagggccaaaccggcgaacggagaaacacatgggccctctcacgaccacagcgaggagcgccggtggccggagaggcggaatcgataagaaactagggtttcaaagatgaaaatcgccttggttgagagagattgggggcgcgttgggtcacgcgcgggatcgattcgtgttccatatcaaaatgactctatattgatatcataaaaagtgagttgctcaatgataataacccaattacatgggttgtacaatgtcataagttatataatctaaggtttgttaattctcaatataatgtacatggaaaagaatgatacatattttgattacgcaattcattgtcgaataatggaaaccttttttgcatttgagaaatggtggacaaacatgtcgaagagaataagatctcccatttaaagtaggtttacaagctgcaaactcacttcaaaattccaactgatcatcctcaagtccatcttttacaattcatatccatttgagtggagctaggattagtatcacgtcaaggttggtttcgatgaagtgtcatggatcaattcgttctagtatttttttgaagtcaattttctcaatgtctcatatttaaggctatgattgcaaaacttaacagctcaattaggtgaactatatatcaatgagtcaattacttgaacgatattgattttcaaaagcagattttgtttttaataaaaaaaatcaatattacaatttaaatggtaacacctaagcttgcttctatataattattaatatttctatttttacgatgatatattattcaaaagcaatagataaattaaattttattagcatatactatttggaattttattattggactcgagatacttttaaagaatcaaagttgttgtagatgatgtaatcttggttttctagcataatcaagggacgtgatcctgtttcttatgagcttttcaatgcgtgttactagttgagagcttttggagactccattttgatgtatacgtccattttgatgtatacgattgttctttttacgtaagaaaaatgttacttgaaagcagagtttaaagaggatgtcattgaattggtggaattgatgtaatttttccatgttatatttatggtttattttcatcagttccaaaaagaaaaagaaaaaaaaacaatggatgccaacttttttacagttggcatctactatcaatataataaatataatttattgtaaactttttattaaaataaattattatgacaattgatatacacattttataatttctgaattttgttatgagtctgtgacaagctatttcccttgccaaagagactaataggtgattaaatctttggatttgaagtgctattaagaaaatgatactgaaagtttggtgttcatatgtttattatatcaacttgacaaaagaaataatatatgtaacggcctttgacttgcgcagggtacatatgtaaatttgaccgatcatatatccttcccattgtttttttaaaagttgttcctcacccaaagtttctcgtaattatatgaagaacccttttagtgttgaattattcacagttatgaccacaaacttctaaataatccatatttctcttacaaaattaattgtgaaattaaccacaaacgaaacgatctctttcattttagtgtagatggaagagtaaattattatgtttttaaacaagacgaaataaaatttgtataatgtatatgaaattgggttaattagagtaataacaaaaatatgagcttcaattgtaaaacaaaaattgggttttttcttgttttttttaagttttgagaaacaagaaaccttttgctcttcttcttctcggagaagttaaaacttaaaaaacataccatctatgtgactgtgaatgtgatcgactcctctcgtttcaattttgcggtaaggttcttcttcttcgtcagagtttttttttctcttatctctcaaaaaggcgttaactttctatagattcatgaacagagagcctctctgtatcgtctctcgtcactctcatgtttgctgctcaaatttctcagtctgtgttcctttttcttcgttttagggtttttattgatcggaacttgtttattttcagtcacatttgcctgctcagctgaaatatagccttagcacaacccacagaagcagcccaactctctctctctctgtgctgttttcttgcttgtgagtaactttttttgctttcctctgttacatttttatgcattttctccttcattctcttgtgaatttttggtttcttggacctgatgagtgaactcgcattaaagtttgaaacttttaatggttttgcacatttttcatggctttacatcgtttttgttcttagcattcgttgttgttggttaagacttacgacccaaaaagctgaaactttctcaagttattagcttgcactgaggaaatgatcttaactttgaaagctgaaacattctctaggtattagattggattttgttttagaaagcagctaatctctttctcgaaattgaaattgcattcatctaaagttgacacattgattatattggcaggtttgttgtttgaagagagtgttagatacataaactttactgcagaaatggtaatgtcacatatctttcttatctctcagatacaagaagttctggaaatgaatatgataagagtttgatttttctttgtgtgtgcaatgtttcgttaggtggaacatggtgatagtgatgatgtgaattggaatacagatgatgatgaacttgcgattgacaatttccaattttctccatctcctgtacatatatctgcaacctcgccaaactctattcaaaatagaatctccgatgagacggtggctagctttgtcgagatgggattttcaactcaaatgattgctagagcaattgaagaaaccgctggtgagtttatctatgatagtgttctttgagatatgcatttccgaattctgtcaatcaatcaaattctgttaataatttgcaggagcaaatatggaacctatgatgattcttgaaactctctttaactattcggtgagtttcctatttgctcaatctgtcatgttacttatggttttctattttttcgcttgtggttaaaatctcttgacactccattctctgtttctttgtataggcaagcactgaagctagttcttcgaaatcgaaagttatcaatcattttattgctatggggtttcctgaggaacatgtgataaaagctatgcaagaacacggtaattctctttgttctttttttctaggacttggaaactttaatgaggttttatgatctttccttgataatgtacaggagatgaagatgtgggagagatcacgaatgcacttctaacttatgcggtaagtaaaccctaaaattaaattgcatattgcataagaatataagatgtcgtttaatagaatgttgttactgtttttctaggaggttgacaaattacgtgaatcagaggacatgaacatcaacattaatgatgatgatgatgataatctctattccttgtcatcagatgatgaagaggtatataaattgttttttccaagtttcagacctttgctatgctaacattcctgcagattctcttacttccaatgcattgccatgtcttacattttaagaagtaggttgtgtacgttgtattcttatctgttttggaaatgacaggatgaactaaacaactcctccaatgaagatagaatcttgcaagcgttgatcaaaatgggctatttgagggaagatgctgctatagctatagagagatgtggtaaaacgtttacatgaagataatatatctcttatctttctgtttaaatctgcaagaagtttacatgcattcctctcgcatagatccaattagctagcgtccttgcaaagtattcatgtttcttctcaaacgtttcaggagaagatgcaagtatggaagaggtggtagacttcatttgtgcagctcagatggcacggcagttcgatgagatttatgcagaacctgacaagaaagaggtaataactctaagtctcttgtagaacctaagacacccatcaaatttattattgaattatccttctgcaattcttgtcagtttgatgagacggctccggttgtctactttaaaattgtgttattgattaacttcgtcatatacttggattaagtagggctgtgatcaatcgatgagaattagttttttgctcatatgtttgaaggatttagtctatccagacctctagggttttcctgtaacctgtatgttgttaactttattcagaacttcaatttttgatttcgtaatccattccattgttctgtgccagatgcattatttggattgttgtaggcttgtagctattaactatagttttcaaattagaaaagctctttggattgtgaatttgtgatctttgccatctttttaccttggtcagtctgattgatgatggatgatatacatgtctctggatttcattggtcttacctattattgaccgtttctgtttttgattggactagagatgctttggtttaagatggcactttgatttcttgtcgtagttctactcggtgtttcactaacttactgatgttactaatactgttctgtttctaatcatctttgcatttatacaattcttcctcaagcctctttaaatgttttttgcctgtgttgattgggattcagcctttctgtcagactattgtatctatcatgtcacttaacatgtttttacttcagtatgctgctcttgttcttggtagacttcatttgtgttttgttactgtgtgtggctaaatagaagaacttaccaaaaacgcactgaaccttgactttttgactggtgcagcttatgaataacaacaaaaaaaggcgaacatacactgagacaccaagaaagccgaacacggaccagctcatctctctaccaaaagagatgattgggtttggtgtccctaatcatcccggacttatgatgcacagaccagtcccaattccggatattgctcgtggcccgcccttcttttactatgagaacgttgctatgacaccaaaaggtgtttgggccaagatctccagccacttgtacgacatcgttcctgaattcgtggattcaaagcatttttgtgccgctgcaagaaagagggggtatatccataatctgccaatccagaataggtttcagattcaacctccacaacacaataccatccaagaagcctttccattgaccaagcgatggtggcctagttgggatgggagaacgaagttgaattgtctgttgacttgtattgccagttctagactcacagaaaaaatacgcgaagctcttgagagatatgatggagagacacctctagatgttcaaaaatgggttatgtatgaatgcaaaaagtggaatttggtttgggtaggtaaaaacaagcttgccccgctggacgcagatgagatggaaaagcttttaggcttcccgagagatcatactcgaggaggaggtatcagcacaactgatcgctacaagtctttagggaactcgtttcaggtatgttacttatatcagttcagcttttggtttgaaaggtgtttggggttctaaactcagttgtgtttttatatgcaaggttgatacagttgcttatcacttgtctgtgcttaagcctctgttcccaaatggaatcaacgtcctgtcactcttcacgggcattggtggtggagaagttgcactccatcgactccaaattaagatgaatgttgttgtgtctgtggagatttcagatgcgaacagaaacatattgagaagcttttgggagcagacgaatcaaaagggtatcctgagagagtttaaagatgttcaaaagctagacgacaatacgattgagcggcttatggacgagtacggaggattcgacttagtcataggaggaagtccgtgtaacaatcttgccggaggcaatcgccatcatcgggtcggtcttggaggagagcactcgtcactcttcttcgactattgtaggattctcgaggctgttcgtcgcaaagcacgacatatgaggagatgaaggatttgaagacccaagttgttctgttttgtaaggcactttttcacatgaatcgaacttgtattttgcagattcttgttgttcctttctgctagctagatatactaatccttgcaagaatattttcagattttagtttggcaagtcgtgtaactaagtttcttcctctgcaagaatattttcgataagtttctctccagtagaagcaaactattaaaccaaatcgaaccatattaaaccgaaaccatcacatcattttttgttttgtaatttagatcgaaccatactaaaccgaaattatttcgactttttgttcttgggttcgagacgacgacaagagacaagctctgtctgtggtcgggaaatcgaaaccagagccttggactgtgtctctgctctgtggagtatccattttcgatttcttgaaggtgaatccagcgaatccttaatctcaagctccgagactgtgcaataaacaaaacagtagctagcagcagcagcaacacatgaactcgtgcaaatcccttatccgtgcctcaatctcttcctttccatttgttcctcttccaaaccctaatttctctatcaccttcatctccgttcgcgccttttctcctctctctgtccttcatccaaattcatcatgtactctctctcactctttcgtctgaagtttcaagcttttattttgaatttcgttatctggattcgtttgattttgatgttgatgagatttcgcgcctaacaggtattgtaacagctcgacgcacatttcatggagctgtggctctttcaccggagagcttaacggaagagtctcccaaggatactgtgaaaggattgttaacaaccaatcgtggtgaggcctcaagcttgatgaagatggagcggaggtgtagcttaagcaatggtgagggtgattgtagaggatcttggtttccttacgaggataggttcaggtgtggtgaggtgcatcttagtagccgtgaggtgttggaggcggtgagtcctcatatgatggaagagaggacagataggttcaggcgtgtggtggagaatcgaagctactcggtgtgtcttgtggttgaaggtctctctgattttggaaacatctctgctgctttccgctcagctgatgcgttggggattcaatctgtacatgttgtttcctgtgacagctccaaaaggtgcccctttgaggttggcattttctgtttctttgttgattcataggatttgaggtgaaactagggattcttgcattttgaatttagacaatgtgcggtgacctgagatcataagctggtgattgaagtctgtagaacttttgattgcatcataagctaccaagatagatcatgagttggtagttatgtttcttggatcacaggatggggataagtgaggactcttaaatttccgtaaaacattgaatctacgctgattgtgagtcactactattacattttccttctgagtccaagattgatcataagttggctttcctttttcttagttcatacgagatagaatggagaattgttacggttttttgaactatgcagtgatacaagagtcataggtaatatctgaaaagattgatccattagttgttgactgaaatgtaaaaaaggtttgattgcattgtgtgaattcatttaccgtgctatgtgtgtgttaatgtatattatatatgtgtaggtataacggaaatcgccatgtgagtatgggagctgagaaatggctggacattgagttttgggacacacctaaagaatgtttcaaagttttgaagtctcgcggttacagaatagctacaactcatttgggaatggacacggtaaacctctaaagatttgtttgtatatatttgtcatcaccattatttatgaggcaaaatgaatgacattctcttggtggtaatatcttataggtttccatttacgatatggactggtcatgcccaacagcaatagttgttggaaacgagggcaggtaatgaatatcatctcttagtccaaatttgagggttcataatttcttaatggattgattggggaatatgcaggggaataagtgacgaagcgttggagttatcagatctgcgttgcagtattccgatgaatggaatggttgattcgtttaatgtctcagtggctgcagggattctgatgcaccacgcagtctctgatagaaccactcgtctggtaaacctattgacacagctagacaatcatttacgttagtttccagttcagtttatgctttaattacattttatgggtttgaaacagggaagccatggagatctgtcggaagcagagaaagagatattgatggctgagttctcacttcgtcacagtagaagctcaatttgcattgcttacgagttcgctaaacgtaaacaacaacactctacctcctcctaattttgaaaccgttgtcttattctctcgctgttttgcgtgttataggcttcgaatgacgcctataaaaactctttcgaactctttttttggtacgacgcttgcttcatgtacaactcttaaattctataaaagacatccttctgtcgaacgtattgccttttcaatcgagtgagtggtgttgatttcaccattcttctgcatcgacctcacgccatcaaagattaagttagaaatttcgcctttcaagaattggtcactcataactcttatgccaactagtaatccatgaacaaacgtcgaaatgcatagaaactcgtgaacacatcgaacttatgatagaaacagttctagacatgatatttataagtttttttcccgtggcatcaaataagtggaaagcaagccctaaaatagatagataaatcctaatagaaaagaaagcctagcaaaagtaaaaaaaaaaagtcctgaataattgttattattttgttacttttggaacacataattaatcaattaacatatcactgtttgtagtctgtatcctttccttgttgctgctatcttctccacttgtccgtttcttagactgatgcgacttcacaaactcatcgattttcgccttcaactcgatgtccggtatcaacatatccgatgtcaaatgtgctcggttaaatggatcatgctgcagcaaaagtaagaggatcatatacaaagccaaaatcttcagagaaagagagatgtgactgatcagtgatcatcattgtgttagataagcttacattgtcgctgagaagatgacgttgaatgatgggacgatcaactgtgattcttgagcttggaagtattactggatctctcattagcgtgtactgccaaaaaagaaaaggaaaagaaaaaaacaagaacagacattagtgcatggtaataagacaagatttaggtttaaattagtgtttctttcaacagataaagacctgaattgggtcaaggaactcgtctggtatttccccaagtgcagcttcagcatccagagcttcagaagcagcagctttggcttttgtgcctaactccataaactcttgaatgattcttccctcttcacctattctcctaagcacatctgctcctgcattgaatagctgcaaaaacgggcacttgtttagttcagtagagacgcatctattattatgaaagaggatttggtttagaaagaaggatctgacctgttcattatatgatcggccatcactggagatggcaccagggaatatgtttactgtgtctcctcttgcgagattaacatatatgcgaacgatcttcaaagttcacaatcatatcagtcagttttttctcacatactttgatcaggagaattgagtaattgtaatcactactaacctgtttaagtaactgttttggacggaattcatatttctcaggatctttcaggcttaaagatttacgctgtggacccacgagttgtagcaagaagtagttaagcatgttggcaaccctctcaacctaaataagtgcaaacaaacaaagaaactcatcagttgggtaatcatagggcaggttatcatttcaggaatatggtcaggtaccatctcagggagtaggaaaggggcagtgatctcctcggatgtaaatgcaagcatagtcacatcttcatttgccagcttcatgtcgattctaacaatctgcaaagaaaatcaaagttctttatgggatcgggattcgagtacgaaacaagatataagaagtgataatccaactaacattctcctgcgaatggaagagtcttgttctctcctgtctctcttgagttggtctctgctcccactctgcagtatttgacatgtctgcctcgatttgtttaatctcgagaattttgtttagactttcatccagaagatagatgctatcattgactaagaagtttaagaagttcaagtacacgcccttctcttcgtcttttgcaatctgtaacacatcaaatttggaaaaacattggaacatgatagttgaagttcaaagtcatggcaagctcactaagaatttacccgtctccatgcatttcggtgactaggcacctgccagagatactctaaaagctcggcaatgttgtggcgaatattgaacttgtcatagaactgcatttggataactagatttcagttccaataaaagcaagaacaaatggctattctggcttccagagctaacatattctcaagtacaatgcaatagagagaagttcattactccaggaatattatagccactaaacaaaatctcttgcaatcacctgagtgtgtgaacccgtgaactcaatgtcaacatatagtttcagtaaattcctgacaagatactcgagcgataactgatgtccctcaaagagagtagatgtagcagaagaagaactactgcaggaaaaaaaaaaaattagaatggtggaccacgttactgcagaacttgttgcattagcaacacaaattgacaaatgtacagctttctttcatgggaagaaaaacaccttgaacgaggcatccagcagttcagaacttcaaccatctttgctctgagatacgggtttctaacatattcaggacttgccatgaacataattatgaagttcataaagtcgtccttaagaaaagagaacaaccatcatcagtgcaaatacaaaaagagaatttctacagactgatgagagcaaactaagcataccagcggcaccccgtccaaagctttgggaattcttgaagcgaatatcagcaactccattgcatcttcaacaaaatgctcaggcatacaggagaattc

SEQ ID NO: 1435 - DNA, 90176 bp, Arabidopsis thaliana
aagcttttaggcttcccgagagatcatactcgaggaggaggtatcagcacaactgatcgctacaagtctttagggaactcgtttcaggtatgttacttatatcagttcagcttttggtttgaaaggtgtttggggttctaaactcagttgtgtttttatatgcaaggttgatacagttgcttatcacttgtctgtgcttaagcctctgttcccaaatggaatcaacgtcctgtcactcttcacgggcattggtggtggagaagttgcactccatcgactccaaattaagatgaatgttgttgtgtctgtggagatttcagatgcgaacagaaacatattgagaagcttttgggagcagacgaatcaaaagggtatcctgagagagtttaaagatgttcaaaagctagacgacaatacgattgagcggcttatggacgagtacggaggattcgacttagtcataggaggaagtccgtgtaacaatcttgccggaggcaatcgccatcatcgggtcggtcttggaggagagcactcgtcactcttcttcgactattgtaggattctcgaggctgttcgtcgcaaagcacgacatatgaggagatgaaggatttgaagacccaagttgttctgttttgtaaggcactttttcacatgaatcgaacttgtattttgcagattcttgttgttcctttctgctagctagatatactaatccttgcaagaatattttcagattttagtttggcaagtcgtgtaactaagtttcttcctctgcaagaatattttcgataagtttctctccagtagaagcaaactattaaaccaaatcgaaccatattaaaccgaaaccatcacatcattttttgttttgtaatttagatcgaaccatactaaaccgaaattatttcgactttttgttcttgggttcgagacgacgacaagagacaagctctgtctgtggtcgggaaatcgaaaccagagccttggactgtgtctctgctctgtggagtatccattttcgatttcttgaaggtgaatccagcgaatccttaatctcaagctccgagactgtgcaataaacaaaacagtagctagcagcagcagcaacacatgaactcgtgcaaatcccttatccgtgcctcaatctcttcctttccatttgttcctcttccaaaccctaatttctctatcaccttcatctccgttcgcgccttttctcctctctctgtccttcatccaaattcatcatgtactctctctcactctttcgtctgaagtttcaagcttttattttgaatttcgttatctggattcgtttgattttgatgttgatgagatttcgcgcctaacaggtattgtaacagctcgacgcacatttcatggagctgtggctctttcaccggagagcttaacggaagagtctcccaaggatactgtgaaaggattgttaacaaccaatcgtggtgaggcctcaagcttgatgaagatggagcggaggtgtagcttaagcaatggtgagggtgattgtagaggatcttggtttccttacgaggataggttcaggtgtggtgaggtgcatcttagtagccgtgaggtgttggaggcggtgagtcctcatatgatggaagagaggacagataggttcaggcgtgtggtggagaatcgaagctactcggtgtgtcttgtggttgaaggtctctctgattttggaaacatctctgctgctttccgctcagctgatgcgttggggattcaatctgtacatgttgtttcctgtgacagctccaaaaggtgcccctttgaggttggcattttctgtttctttgttgattcataggatttgaggtgaaactagggattcttgcattttgaatttagacaatgtgcggtgacctgagatcataagctggtgattgaagtctgtagaacttttgattgcatcataagctaccaagatagatcatgagttggtagttatgtttcttggatcacaggatggggataagtgaggactcttaaatttccgtaaaacattgaatctacgctgattgtgagtcactactattacattttccttctgagtccaagattgatcataagttggctttcctttttcttagttcatacgagatagaatggagaattgttacggttttttgaactatgcagtgatacaagagtcataggtaatatctgaaaagattgatccattagttgttgactgaaatgtaaaaaaggtttgattgcattgtgtgaattcatttaccgtgctatgtgtgtgttaatgtatattatatatgtgtaggtataacggaaatcgccatgtgagtatgggagctgagaaatggctggacattgagttttgggacacacctaaagaatgtttcaaagttttgaagtctcgcggttacagaatagctacaactcatttgggaatggacacggtaaacctctaaagatttgtttgtatatatttgtcatcaccattatttatgaggcaaaatgaatgacattctcttggtggtaatatcttataggtttccatttacgatatggactggtcatgcccaacagcaatagttgttggaaacgagggcaggtaatgaatatcatctcttagtccaaatttgagggttcataatttcttaatggattgattggggaatatgcaggggaataagtgacgaagcgttggagttatcagatctgcgttgcagtattccgatgaatggaatggttgattcgtttaatgtctcagtggctgcagggattctgatgcaccacgcagtctctgatagaaccactcgtctggtaaacctattgacacagctagacaatcatttacgttagtttccagttcagtttatgctttaattacattttatgggtttgaaacagggaagccatggagatctgtcggaagcagagaaagagatattgatggctgagttctcacttcgtcacagtagaagctcaatttgcattgcttacgagttcgctaaacgtaaacaacaacactctacctcctcctaattttgaaaccgttgtcttattctctcgctgttttgcgtgttataggcttcgaatgacgcctataaaaactctttcgaactctttttttggtacgacgcttgcttcatgtacaactcttaaattctataaaagacatccttctgtcgaacgtattgccttttcaatcgagtgagtggtgttgatttcaccattcttctgcatcgacctcacgccatcaaagattaagttagaaatttcgcctttcaagaattggtcactcataactcttatgccaactagtaatccatgaacaaacgtcgaaatgcatagaaactcgtgaacacatcgaacttatgatagaaacagttctagacatgatatttataagtttttttcccgtggcatcaaataagtggaaagcaagccctaaaatagatagataaatcctaatagaaaagaaagcctagcaaaagtaaaaaaaaaaagtcctgaataattgttattattttgttacttttggaacacataattaatcaattaacatatcactgtttgtagtctgtatcctttccttgttgctgctatcttctccacttgtccgtttcttagactgatgcgacttcacaaactcatcgattttcgccttcaactcgatgtccggtatcaacatatccgatgtcaaatgtgctcggttaaatggatcatgctgcagcaaaagtaagaggatcatatacaaagccaaaatcttcagagaaagagagatgtgactgatcagtgatcatcattgtgttagataagcttacattgtcgctgagaagatgacgttgaatgatgggacgatcaactgtgattcttgagcttggaagtattactggatctctcattagcgtgtactgccaaaaaagaaaaggaaaagaaaaaaacaagaacagacattagtgcatggtaataagacaagatttaggtttaaattagtgtttctttcaacagataaagacctgaattgggtcaaggaactcgtctggtatttccccaagtgcagcttcagcatccagagcttcagaagcagcagctttggcttttgtgcctaactccataaactcttgaatgattcttccctcttcacctattctcctaagcacatctgctcctgcattgaatagctgcaaaaacgggcacttgtttagttcagtagagacgcatctattattatgaaagaggatttggtttagaaagaaggatctgacctgttcattatatgatcggccatcactggagatggcaccagggaatatgtttactgtgtctcctcttgcgagattaacatatatgcgaacgatcttcaaagttcacaatcatatcagtcagttttttctcacatactttgatcaggagaattgagtaattgtaatcactactaacctgtttaagtaactgttttggacggaattcatatttctcaggatctttcaggcttaaagatttacgctgtggacccacgagttgtagcaagaagtagttaagcatgttggcaaccctctcaacctaaataagtgcaaacaaacaaagaaactcatcagttgggtaatcatagggcaggttatcatttcaggaatatggtcaggtaccatctcagggagtaggaaaggggcagtgatctcctcggatgtaaatgcaagcatagtcacatcttcatttgccagcttcatgtcgattctaacaatctgcaaagaaaatcaaagttctttatgggatcgggattcgagtacgaaacaagatataagaagtgataatccaactaacattctcctgcgaatggaagagtcttgttctctcctgtctctcttgagttggtctctgctcccactctgcagtatttgacatgtctgcctcgatttgtttaatctcgagaattttgtttagactttcatccagaagatagatgctatcattgactaagaagtttaagaagttcaagtacacgcccttctcttcgtcttttgcaatctgtaacacatcaaatttggaaaaacattggaacatgatagttgaagttcaaagtcatggcaagctcactaagaatttacccgtctccatgcatttcggtgactaggcacctgccagagatactctaaaagctcggcaatgttgtggcgaatattgaacttgtcatagaactgcatttggataactagatttcagttccaataaaagcaagaacaaatggctattctggcttccagagctaacatattctcaagtacaatgcaatagagagaagttcattactccaggaatattatagccactaaacaaaatctcttgcaatcacctgagtgtgtgaacccgtgaactcaatgtcaacatatagtttcagtaaattcctgacaagatactcgagcgataactgatgtccctcaaagagagtagatgtagcagaagaagaactactgcaggaaaaaaaaaaaattagaatggtggaccacgttactgcagaacttgttgcattagcaacacaaattgacaaatgtacagctttctttcatgggaagaaaaacaccttgaacgaggcatccagcagttcagaacttcaaccatctttgctctgagatacgggtttctaacatattcaggacttgccatgaacataattatgaagttcataaagtcgtccttaagaaaagagaacaaccatcatcagtgcaaatacaaaaagagaatttctacagactgatgagagcaaactaagcataccagcggcaccccgtccaaagctttgggaattcttgaagcgaatatcagcaactccattgcatcttcaacaaaatgctcaggcatacaggagaattccatagggcaagttgacggtagaggcatcttaaagccaccgactagtccaactaaccaaacaaccattaggcgatagaaagacagagctcgctgaataaaatctccatccttcaatacagtatagagataaggcagctattactatcatgttaccggtccagaggaaaagccgaagatgttatcagagcagagaatatgattacaaaccctcaatatttgggcctcatggcaaagcttttcctgcgaagacagctctagttctttttccattcgggatatatcaagttccaactgtggagaaggtgcttgatctctcatggcttttagcgttgcaagattatcttcacctctcgagatgtcctacgtcatgcggaaaagaaaaagtgaagaaccatacaataacaatcttctgcaaattcaggaatcaatgacactttcacaatgtaaacatgtgactaagttcaagtttttgctatagtcccttctcgttttaactaacaaacgccttaataagacaatatgtaaggaaccaaatcaaataagagctttctgcaagataatttatcacaagtcgtttttttttccaaaaaatcttcaatatttccaggacgggaaaactgtgatgatgattacctgagcaagatgtttaaagtcagagagtgcttttaggagacccaaattgaggaccctagcagtcataaagaagcattcacaaatgaaagtgtatttagttgctgactttgcattttgcccagaagcattactactagaacttgtggcttctttggattgtaacaagcgactttcgttcccattttctcgcccagcatcatttgcgtttgccatagcatctttgccaatccactcagtaacttcttcggatgatgcatggagagcggtcaagtcgctggtgtggatcataaataatattgctcatcatgaaactattaaaatcagtgaggaaatacaagtagaatcatcttgaggaccataccttaattttaagcgatggccacagaatgcgtattttggatcaatcttatcccttttcgttaaatgtgggtctaaaaatggttcacagagccggagcattactgcactaaggttaacaaacatgcctgagctagcacaagagactggatcaacctgtcatacaagataaacatattacagaatgctgatttgagcaaaaaagacaaataccaacttgataaaaccgagaggagacaatagcaattcatgaataaagatccgaagtatatatgcatcttataaacggatgattacctgtatatgggctctagacgcatttgcattgatcacctctgcaagaaactgtagaacacgctcacgggtatcagtacttttaagtaaaatcatcaatacatcatgcagcccgctgtacaaaatgttcatgaaatttttaatcgtggagaaggatgataataaatctgcgggacgacgttccgatgcttcagagaaacactgctgcctgatattcacaaaaacaatagacatatatcagcattttcataacaggtaaagtatatcctctgaggtggatcaggaaaactcttatgttcgcacaattaagccttgtcaaatactaaatggacaatcaagattcttcagtacagaccagaaaaaatgctcaaaataatggatttcatccacaatattctaacttaacatagtgcttactaatatttctgttggtttcgcctctactgatcatctaactatgctaaatttatataatcatgcttaaaatatgtatacaacctaacagtggcatcatatataagccaaatatatctgcttttttccttttttgatcaagtctctctactatgagtaaaagctaatcaataattcttactatccaaactttctcaataagaaaagagccccaaagactacatgattctcagtaatagaaacccataaataagttggaactcacccaacatcaggttgactcttgaatagtgtattatctggcagcgcactaatatggaagaaaggcccaagaatgctagtcaactccattgctcggccgttcatataggcaccccgtggaacccaccactcatgactaaccagagatttagctcctactggtaagctaacaagatacttgagtgccctcagtggtggctggaaatctccaagcactgatacatttataaccgtagacctcaaatcctcatacagctcctttagaatcgagtccaagctatcaaaatccgagtctttgaaaaactcatccaaaaacccaggaggagcttgaaccccactgctactagctccaaacatatccaacgaaccagaaccaacctcagcaaagatcaacggaagaaccggagagacattcctcttcttcaacctattatccaatccaccactaggtttatccgagttcccaaacatgtcaggattccccaagtgaatcctacagtaagaaacagcaagcttcttcgcttgtttagtgacaatctccatctccgatctcagattcttatccttcatcgactggattttcttcgattcgtcgtaagcacgacggtggcaaccgattaaatacgggaaaggcggttcggcgtcggaaaagtcgccggagagacgatctatgagaactctctccatcaaatcacgagaaagcaaaagctctttaccttcgctgagaatctcagcggccgtcatctccaagtaaacaatacgaggatcggaatcagttgattccgttagggttacataaaatatcttccggaggattatatcctcaatttcagccggcgatctttgaggtttgctcgtcgccattgattttacgaatcaaatcaaacactcgaaactcgatttgagagataaatataagaattttttttcttaaacttgtattaccgatgaatcaaaagcgaaagagtttggacttagcaatttaaagtataattaaatttagaaaaactaaaattcacgaaagaagagagaaaccatggcgagagatttggaagaactttctgggagtaggtttttgtttatgaactcttttggagtctctgaacgagctttagcaagtcctgagcttggacaaaaagtctatataggatatatgcaaacgtcgtacttactaacgacgtcgtttatacttattaagacaattacttttactgctaataaaaaataaaaaataaaaaattaccaagataaactcctccaagattttgttgctcaaaaaatctactttgaacttaaccgtaagaggttgaagtatcattccaagaaagattttttaaagaagtaaaggtaaacaattgaggaggaacaatgaacacacaattatttggaccgatataaaattggaactttttattattattcgagatgatcatgcggtcgaatggacatgaacatagctgcatactgaagtaaccggcgttcactgttaccttcaatgctattctccgacacaggactcatcgaaccgccgatgttttcaccacgggttcttttcctacgccggcgccacgccatctgaatatttaccgctgcccacgtcctccagtttgaggaatagtatcttgcggtccgcttaagccgctcgttcgcgaatttataacggaaatgatcggtaatgtacctaagatcttcggatccgagggagaatgcctcgatgttttctaggcagacaaatgttgctgaggaagggggaagacggtccagaaacgggcgacgtaggcaccatgagagtagctcgtcgcccaagtaaccgcctggttctagtgtactagtggctaggacgcctttgcttaggctctgtatacgtttgactcgtccacgcatgatgaatatcattctctgtacaggatctccttcacggatgatctgtgacaatcaacaaaatcgaagaacctcagattttactcttcaagtaaactcttaaaccgaaaccgaagcaaaatattggaaatataaatttttagaaatgatgggatgagtaccttttcgtctttagagaagactcgaggcttagcccgatcgcaaatgttgtcgaggatcaagtcgtccatgcccctgaacaatggcacctgagaaagatcaaacatgtcagagacttaacacttactgctttcacaagtcttaacaagattgtataaagtctgcttcctagtaccttgttaatgagatcaaagcaaagatatcgtttgatatctcttcgaagacccggaggcaaatcatgtataagttctagctcgtcttcaccacccaaggcattccatctctgccgctcaaatcgcctaaccctctgtcttaaccgggaaggtaactgcctacgtttcatccaccattccatatccctacaccgtatctgcattttcctttttttcgccattaccgcatgcaaaaacaccttcaaaatattgtaaagtaaaaagctttttaaaatcttacattccatgaaaacacaatatcatagaaaagacatattcttgcatagtttacctgaatgtttcctatcaacagcgtgaaaagtaacaagccacttagaaccataactatactgaaaataacctcgagccagttgcttgtgggctcaagatcattcgcaaatgtgctgtaaaacgcgacccccaaaacagattcagtatgtcaatcagagaatttttttatatccaagatgtaaaccttaagctcagaaacaaagcaattacctgagagtcattaggccccagaagatggggtaaaggatcttaaccgcaagagagttgctggagatgactggaagtgcccaacggtagataccatatcggaatggtccgttagagtctaagcacataggcttattgaccacactggtaaggtttccagataagcatggatatccaactgtgcttgtcggtgacacaaattggtaacagacctcttctttgcaagccagactcagattgcagttcccggttctcatacattgttgtcttatgcaagaagcaacacgctgtattgcgagaacataccaacatcccccagcaacctgaaaccaccagaatttccataaacaacaaactttaatttcatatcttaggacagaccttagtagtactatatatatacacatgggatttgttatattgcatttgttttaggacctgaatataacctattgttgcaggacattatattcaggcagaaatacaatatctagcttgagaggacttacatgagaagcgatgaaatatgcgatgagattaagagcaaaaccccaccaaatagttccaaaaatgtaaccagtgaccttctgcatccttctcatcaaacagatgcagtgataaatcttggggaggaactggaacaagaatattagcagcagaatcgtcattatcagcttaaccttctcttctcttatcagtttcggcacaactaaccaaaacactgcctgcaaacaagcaaaaacacaaagttcacatcttatctgcatctcaaatcatgattcatcaacaggtaacactttcaaatgtaaatatgggctttattgatagtaataaaaagtttagggttaatttcataatattggaatagttggaaggttgttctgaaaattcacctgagggacagggaggatgacgataacatcaaaccagaagccagtgagagagcgtgcgtagtgagacgcgatggcgcgtggatcccaaacgagcttcccacaaccaacgacaagcgactctctcgagacgtaggccagtctgaattgaagccacacgtgccaaagatgaacagcatcgagacacgtgcggagcaccgtgaccaccgcggcgaacgcaccatccatgtaaagacacgccggtccggtagttcggccgatggaaagcgcgtagaagaagagcggatccaccgctaaagccatcccacgagctaaaagcaacgcgcggttccatctctgcacgcgcttgctcctaggatcgagaacttcaccaaacggacctttgagacgtcggaatctggttcgggctgggttagggacagatccttcctggatcggaactagagaagagccggcggaggcacgccactccggcgcgtgagcttgatcgcagctagttgaatggaaagctgggacgcctacttgtgtgcaagcgtaacactcgacggagcttagcaccggcgtctcatcgctgccgctgctgctcgaatctccaccgttgatttggaggttactgttttcatcgatcccagtcgtttgtcgacggaacttatcggaaaacagtccaatccacctgaaatattcaaattgtaatcaggaattagcaatctatcgccaaaaatcattcagaatcatctcacattcgttatatagtacacaattatgaaaatcgatttcgttgctagatgaacgatttcgcatactcaagcgagattataaggaattgcatggtgacttgttagctatagaacagttcaaaaaacgagtgaattttccgggaaaagtgtttctcggggaaaaataatcaatctcaggtaaagcttgtaacctctgggtaaacagcaaaagacacaaaatacatattcagaattcgggagtgttttagcgtgaaagcaccattaatgaacgaatatagatatgaaaaaaaatgggaattgtgtggtataaaaacctgaagatgaagttggggtgagagggcatgattgaaatagaggaaccaccatgggagagggagagaagaaaatttgcagggagtgattgggagagagaagagtgatttgtatagagaggcaaagccgcaagatttgtgtgtgatacgtacgtctcttagtaggattcggtttatttgttaggggagattccggtttaataactaaaatcgaagatcgaactaaatcagaaaccgaaccgggattgacaagggggagatgatgagctgtcaagtgtctgagagatgtggtggcttgcttagcaaaacggcccacaaatagacattgaacaaattggattccgtacagatcatgaggattgctacgttaaaatggacccatcattttaaatgtaatttctttacgtttaatcattgaacttttagataagtttacaaatttacttgctttatataggaagatgtcataattctaactctataaatacagtagaagatattttagtgaatgtacgatttaagcatattatcatttgatattattcattaattatacttttttttgtcaaacattcattaattatacaaataacagattttcatgataatgatttttgtcgttgtcattaacatttactgatagatgtatttgactcaattattgatatatatgtttgttatatactatattttgtttgccgtcaattgatacttgttatatatgtgtttttattacggattgaatacatgttgacgtacgccatatccctatgatataacaacggagacatacgaccagcctaatctcgtaattaagcctttgttgattgcagatacagagatactccagttactataatgtttttttgcagcataatactctcattttttcaattttcattattgcttacactttttaaaataaaaaaattacctacagttagtttactaatatatatgataaaatgcacttttgtggtcatatatagtacacacgtacctgacagtgaagtttccaaaaatttgacagtcatacaaatccatatcatgcattaataattcgagtgacgaccaatatcagcggaccacacacatcgaacacaaatttctatttatttatttttgggttggataaaattcagcgtttattggaataaataactaaggatacagtgcagatgaataaatgggtatggtagatgaataactttgttcaaactcattctaatattgcatgtagtagaggactgttaatgcacgaattaaacaagtacgggtgagtctctggggaaggtgaagaatcaatctctaatccacgagctgaacttgaagccggacaatcgacgggctgaaaggcttgttgcgaactgagagcatagttgagggcgctacgaggcgatgctgtttcgagctggtggttctggtgagctggctcttctgggcgagctggatgatcttcgatgagcggacttctctcgacgagccgacttgtatcgatgagctgactcttctgggcgagctggatgatcttgacgaggcgacttctctcgacgagctgtcttctatcgatgagctggctcttctgggcgaactggatgatctgggcgagctgacttgtgctatcctctctccaggtcccgaaaaacgtcccctttttcccgagactttctattccttatttatacccgtccgtatagtagggtacgcaaggcgaattcccgagaatgccccttttctacgcagccgaactcacatcccgactaggccgggcttcggcctgctgggccgttattccttgaaatgggccggttgattactgaggcccaattgatgtatcaacaaggactaaatataaaatactccgaatggtggatttgtagaggaacgtatacgcatgataaaatacataacatttttaaaaaataatagcgaaattttggaatattattttatgtacttacttatcgaacataatgaaaaagacaaaaatcccatgtgcaataattcttttttcctttttttttttttggtgtccatgtatgcaaattggaaagcaggcgaagaagaaaaaccgtagggaccaaagttgcacaaaatggcaaagaaaacgtgacattgatttgtatctggttggtcgacattccttcgatagactctctcaattatcaataaatagaaaaccgatcaaataccgattttaaccaggcttggcttggagatttgaacacgacattttttttttttttttttttgagttcgacacgcaaagatgatcttaggcttatgtggaaccaactacaacttgtgtatttcacccataaatatttttaagaatattcagtttttgttaacgattcggttttttggttctcggattgtaaaataccaaactcagttcaaaccgatttattttggtttgaattcaattttggcacggttagtttaccataggcaaaaattctaaccataaaggaaatgtacatgcatgattggagaacaattttctattcatccactaatttcctacaaacttgacaatttcttttaaattttcatcagaaaaacggttttgttatgtaattaactaaactactcacaatatttttgtttcttctgtttttattttcttaactatttattttctttaacacataatttctaaactaatttattttccgattttaaactcttctattttaatagttaaaaaacaaaaaatctagtcatcaacccaacttaattttgtaagttgctgcaattaaacacatacatgtctcgttggcagaactaatgtgaaggctgggccacgcaagcctactaaatctggcccatttaaaattaggtggtccacacagctagacatttccccacgtgtcagacttgtttttcattaaaaaaaaaattttaatctctcattcgaacaaaaaggatttatcgaaaaacaaataaacccttttttaagaaatctgcggaaaatgtggagaaaatccacaaaaatgaaaaaacccaacaaaaaaaaaaacgaacaaaactgatttcttctctgtttggtatcaaaagagaaacctcagaaacaatgaaaggcgtctcctccaaaaaccaaaaaggttaattttgttcttcatttacgtcgaatgctagaaatgatttgggtttatcttgaaacgaatagacattcaaagtttcatgaattggtaaacatacaaagctaaggtttttctatgcaaatggtgatggtggatagatatagggttcttgtttagtttgctttagtctgaaatgtgtttctatggtttgattgattaatgtgcatcatattcgtaatgtttagctacaatggtttttctcaaaaggatagagttttatgattcctgaatcaagcattctctaactttctttgttattaacatttttgtagttattgaatctctctctggctgattgattaatggctgaggagaccgtacgtttgcctaattcgccggatgtaaacatatcatggagaaggatttctactggaaaactgagttttttatacactcaagagaaagttgttcctaattatctcagatctcccactggttcttgtcatgatgcttgtaaatacggaaggaaagatgaatctgaagacaagccaagagttccacatcgcaaaagggttagcagaagcttttctggagctataaacttggattcaccactgaggaagaaggcattgacaaaaccgctgttgagtccttctcgtagatgtgattctgttggtggctttgatcatgcgaagagccaagttagaaacttttctagcggagtttgtgatgttaagaagagtcatgcagatggaacaaatgaaaaggtagtgtctgtttctgaatctaggttagctgattcgactaagcgaaagaagaagaagaagaagacggtctatgtgtctcgcggaagggctaaagagattgttgaacaaaagaggcgtgtcactgctttaaagctgaaagctgttgcacaaactgcagagattgctcttcggcgtagtactgtgaagagaaagaagatgaatggcggatcaaaagctgcagaacaaaagaaggcagttatggctttaagaagagcctcaatgtcctcaaaaggctgttctcgatgcttgaagacaaagaaggagagtaatagcttgagtgttcctctaaagaaaaccaggaaacatgtaggtgacaagtgtaaagacttggttgaagagaaaactctctatgttattaagatggaaacagtggatgagattgttgaatctgaactgaaccagaggtgtgtcatggattcacctattgatgatccaaagagcgaaaagagccaagacaaaggtgagtgtattgagactgaacatgaagatgagtcttctcaagaagaggaagacgaagaagaagaagatgagaatgtgtctgtctctgaagataagaacacaacaagggaaggaaaaagcaaagccttctcagcagaatccgctataactggcaatgcgatgaaactgagaatcagaagaggaaagattatagattttggatcagaaggaaacagtccaagaaagctcaagttcaagagaggaaaaatcatttccggagctgacacaacctcgaaatctggtggtaggagacgcttaaagaccaaaggaaccaacttaagcaacgacaaggaacaacaacgcaaacccagagttgttctgaaacaccaagacacagagaagaagagagaatcaagagtgttgttgttcaacaaagttattaaggaaacagctaataagctagtacagactcgcaagagcaaagttaaggctttagttggtgctttcgagtctgtcatatctctccaagaaaagacttcttctgcaacaacataaacacataaaaatgattatactcacaagaatctctaactaaataatcttttattttttcttcacttgtatttatgtatgtatgtaaacatatgtagagtttgtaagagtgcaatgactcacataagattctacaatttgtgggagttattatgtgttatcgaatttctaactgttgtctttccaagaattgactaagaaggttatgttttaaacttttgtaactatagttacaatctgtgagtaccaaacaaaactaggggctgaaaagaaatataaaaccagaccccacgctcacgccgtcctttaaatgccattgactatgtagattctttagccaacgtgtcatatctttagtggttattgtcgtttacctctatcacagactgtcactctaccattccttgacttaaattaattttcctttcttctctgctacatggagtagaaaaaattaaagctttgagatttctttccttatcgatttttctctccgcgaattgttcgttgttttcttctggcacctgattctcatcttctttcttgtggaatctgggttttgttgcggagttttcgaggttcctcattcgttgcttctgttgaaactctcttttttttttgggtggtttactttgtttttttgttgttgttgctttcaacctttaaatgccctaattttgaggttctagttgtggtttttaagattaggagcagaagccctttcgactaaagttcatgttagctgcaatttgctgaagtattcacagttttgttctggtaaagttcatctctttactcttttttaagatctttgtgtgttctagtttgtggcgtttttctgtatgtgatgactagagatgggttttcaggaaaaggatttagtgttcagatttcactggattttcaataagagtcttgttcgtgatgtcgttttatagatctgagttacattgtgggtgttgcctttgaaggtcttgagctactttgacttcattttgattgatcttagataatgatgatggaaagaaaatgaattcagagtcattactggtccctgcgttttgcttgataagaagtaatatcaagagatcattcaatcatctgaagtttctctttttctcttagcatcattttctgctgataagagacttcatagtagtgactgagactttgtgttttgtgaaatgtgggtaaaggatgctttttgtgttaatttcggtgcgtcttattgattgtttcgccatcaatctagctttgctcaattcttcttttcccacaagctctctctggttcagtttctctgtacgttttggatgttatggggcttgttttgaatatggtttagtgggttgtctcatttcttgtggagtctgtatcacgtcgtgatgcttattatgtttatgcccaataattctgtggatttagaaactgtttgcttatgaatctcaagtttagtgtggtattagggaactgatggatctcaatttctctctttttagttggaagctctatgtgtttccttctgtgattgaaacacagagagaatgattttaccaaagcagtattgttgcacacactcgccgagctgccaatgcaccaaaggccatttaaacgaagacgtgttgttattagtgttccaacatttgaattggaatccgaaattagttgcaacactttcctgtgtatgcagatggtttgatgatttcgccaaacgggtactatggaaagagttttgcaagactcgtgccccaaaaatgatgcttgatttgcagtctagcggtagtcactgcattgacggtaactggcgagcccttgggaagcttctcatctactgctcaggatgtacacaaggtggtcttttcaatagctctgttcaaatcccaggccactttgtttatagaacccggttctcaagaacattaggaagaagcctccttccgcctcagtgtagaactgatgtactctatgtttgtgatccatgcgagcatcttgaccaaggagaagaaggcgacgtgggtttgttccgtgggattttcaagtcattcccaacatcgaaagttcggaaagtgatcattaacaaggcggttccttttcatccatccgaggtttgcccgtattgtaaagctaagctatggagcatgctacaagctaagataatacctcagagtgcctgcattcgtttggaagcttatgaagactgcattgagtattttgtttgccttaatggacatttgctgggtatctgcactctcgcgcctttgtctgattcagaggatgcaattccaagcgaagataacaatcacacagagaagaaacaaggtcttttatctttcctgtaaattacaaatcagctttttttgtctgacaacagcaaagttctaacttgttttttctgttgtttttttttgcagacaatggctttcctagagagaacgtattgaaaaggagaaattctttgttgggtggaagtgaaaatggacctccgccgcaaaaacgactgaccaatcctaatcagtgaaacatctgtaaatttgtgtactactgctaaatttattgtatctgcagagattcttcaacattcatatacagtcaaattatgatcaacaattttcataacctctggacctttgagacatcagtacaatgactcataagcttatgatttatataaactctcacattgagataaatattatcagtcttttgtgacaagtaactcactagaagttctgtactgaaaagtctgaatcttcttgggctccaaaaggttgcattttcaactactctattttgagaaagctgcttcttcttgttcagcatctgctgtttctgactcaatcttcttgaatgtgagcttttgctgaggtaactggccattggagaacgctgtgacctcggtatcgatcaaaatgccatcttcctccttgaaatctcctctcaagatacccttagcaagctcattctcaatgttttgctgtatcacacgcttaacaggtctagctccatagtttggatcataccctaggcttccaagaagatcgactgctgcatccgtgatgtttatcttcattttcctgtctgcaattcgcttctgcacacgtgccagctgtagaaagaaagattcaatcagggttttgaataacagttctttgtattgccatggaaaaaaacttcaactctgatcaaatccttttttaaaacagtcttatcttccttaattttgtgaagagatggccaagaagtaatctttcgaatgctattagaatcaaaagtatgttatacgttcaatggaaaagtagattgtattagatgttaaactattcactaacgagcattttaaagcaaaatccaatctaactatccaattgcctccagaagctaactcttttcgatatcagacttttaatgtcatcagcttaatcaattttgcaattttcaaatgaaagaaacatacctgtaaccggacaatgcggttgatctgctcgcggtcaagaggtttgaaaactatatactcatcaaccctattcatgaattcaggacgaaagattgaccttgcagcattcatcactctctctttaatcgtttcataagagagctcattagcatcatcatctgtgttgttcagaataaactgcgaaccaacatttgaggtcataataatgacggtattggtgaaactcactgtacgtccttgagaatctgtgactcgcccatcgtccaagatttggagaaacacattgaagacatctccatgagctttctcaatctcatcaaatagaatgaccgaataaggccttcttctaaccgtttctgttaactgtcctccttcttcgtaaccaacatatccaggtggagctccaatgagcctagacaccgcatgcttctccatgtattcactcatgtcaattctcactaaagcttcttcagtgttgaacatataagaagcaagtgctttggctagctctgttttaccaacaccagttggtcccataaacatgaaactagctataggacggcctggatccgaaagaccagctcttgatcgttggattgcttcagctaccgcagtcactgctgggttttgaccgactactcttttatgcaattcttcttccaaatgtagaagcttatctcgttcagactgttgaagttttgataccgggattccagtccatttactcacaatctcggcgatatcgctacccaaaacctcttctctgaacatagatttcccagagcttaagtactcgttcagctctttctctgcttcattaagctgtcgctgcaatgagtttaagcttccgtatttgagctcagctgcacggttgagatcgtattcacgttccgcctgctggatctcgaggtttactcgatcaatctcctctttaatcgactgaagacgggacataacagacctctcgtgctcccactgttcagttaactcagcttgtttctcctttaatagcactaactcagtttcaattcgattcaatctctctctagaagctttgtctgtatcattggtaagtgaaagcctctccatttcaagctttattaccgaacggtcaagctcgtcaagagctgtaggtttcgaagtgatttccattttcaatttggctgccgcttcatcgaccaagtcaattgctagaacaccaattaccaaatcagttagtaacactgtctattaatgaagataatataataaaatgggaatagcaaagtataaacctttatcgggtagaaaccggccactgatgtaacggtctgagaggatagcagcttccactagagcactatctgagatgcgaactccatgatgtagttcatacctttcccgcaaaccacggagaatagaaatcgtgtcttcaaccgtaggttgatcaacataaacctgttgaaacctacgctccaaggctggatctttctctatgtatttcctatattcatcaagcgtggttgcaccgatacaacgtaactcgcctcggcccagcatcggtttcagcagattaccagcatccatggccccattagtcgcacctgaaagcaaaagaatcaattacaaatcattgcaagaaaatgtataaaccgtttccaaacaatcaaaggaaatttgcatacctgcaccaacaactgtatggatctcatcgatgaacaaaatgatttggccttctgagtctgtgacttccttaagcacagcttttagtctgtcttcgaattctccccgatactttgctccagcaatgagagcacccatatcaagagatatcaactgaaaagaaaccaaagaacggttaaatcagtggttatccaaattgttaaaaacagaaaaagaaacagtttgataagtatttgaatacctttctgttcatcaatgcttgaggtacatctccttgcacaatcctctgagcaagtctgattcaaaagtggagatgcaatatcttagcattacatacacatatgtgcaacttctgaatcttttgatgataacttacccttctgaaattgcagttttaccaacacctggttcaccgatcaacacagggttgttctttgttctccttgagagaatctgaatgcatcttcggatctcgtcatctctacctatcacaggatctagttttccctctcttgccattgctgtcaagtcttttccatacttctccaacgcctcatacttgccttccggatctgtcaaacatgatcattaactctcttatccactaaattatgcaatcaaattataaactatcaacctcaaatgtggttactaaccttggtcaatgactgattgtttccctctaatggattcaattgcagatttcaagctcctctctgatatctgaaaatccttaaacaactgtttcccaaaccgcttatcatcagcaaaagcaagaaccaaatgctccactgacacataagagtcctttaaatctttcttaaactgtcttgctctctggaacagagcttccaaatcacgccccaacatcgaaccagcagcatctccatacacctgaaatcacaaacttaattttcattagcctcacaaacaaagaaacaacaaatatcaaacccttaaagacattacattacctttggttggcgttgaatgaacttctctgttgcttctagaacctttgtgttatccacaccgatcttagagaaaatcctacgagctaaaccattcttctgctccaaaagagctttcattagatgctctgtctccacaatctgttgcttattctcttttgcaacatctggtgacgaaactatcgattgccacgccatttctgtgaattcttgctgtgtaagctatacaaacatcaaacccaaattagcaatccagtacagtaaaatccttccagtgtcaattccagatttgtgattacttaaaaatcctaaagtttcagactttacccttccattagaagaagaagcttcacatcggacaacgaacggccgatgatcaagccgccgtgtgagcctcgcgctctgctttaatttgagagatttgaaggaactaggcttcgccggaaaagccgcagaaggttgaagatgagaaaacgaataaatccttcgagtctccgttcctacactgactacaccactaaacgccgccgtagcagtcgtcgtagccgtcgccattagctcggaaatttaagaacagcaagcaattgaaaaaggaagatcaaatacaacaggtagtttagcacaaatccaccaaaacggcgagatgtttacttaagaaatcagcaaagagaaacgcttttgctttctcgtgtagttttagcgagaaccaagagaaaaggtgaagtagaaaactaataaagaagaagaagaagttgctaaacgacgccggagtcttcgtgaaccatcgggatgtacttactactgagaccttcttctgacacgtgttcactctcagaaaacttaggatttttcgaagtagaattaatatgaaccgtccaaaaatatagcagaaaataataattaatatatagtttcccgaattttgggccgttgataacgagattggcccactacgactgttaacagaaaccaaacattgttaaccacggaaattatgtcaagttatatttcgtgatgattcactttattccgtgcaaatttgtttgttacctaataatttccacggtgttgcgaatccgaaatacaatagaaaccaaacctcaagcgatcaaaaagccaatcatgtcatgtcatgtcagaaaaaagaattacaaggaacaagagcaaaaggtattgaagaaggctcaagaacagaatgtgaatctcccaagcttttttaactctctctacttgtcttgcacaattgttaacaacgagctccaaaacataaacagacacatttgttctgtttcagatcacctttaggcttcttcttcttcttttctgttttaaaccattagcaaagcaaatgatcttcagattctcatacaaatgcataaccttaacagatgaggttttcaaacagtatatactatgaacaatgcttaagaatctaaagattacctttttcagtaacttgatgttgaattataacatgcattgtggtgacagcacctgagaaattgccgacgggactcctgcaatctccaaccgttttgttgttctccaatattctacccgcgcttatcagtttaacatctttcactgtctttggcccgttctccttatctgctcacattcatacaaacaagcaaaaccataaagggttaatcaatttcatatctttcagtgtctttgccacattctccttagctgctcaaaattatacaaacaagcaaaaccataacaccaatgactcacaatcaggttttgatattatcacagatataggcgaaaaaccaatgcaggtcctcatggagaagcgagaaggcgttcttgttaagtccagtgcagtgcaggactaatgtaactagcctaggggtgatgcagggaagtgtagctttgccagctcagtaatagacctcatcggttagttgagagctgaaggtttaagaagctgattggtctagataatttgggggcattggggagaaagaagagttgtacagaaattactctctcgtttgctctaattctgtttcagtctcttcttacgtttggtcattgatttatctttgtaaccagtttctcaaggatcaataaagagggcaatgagtttctgaacctaacaaaaggctaaatatgaaagtttctttacaatgcaattctaaagtctaaaccattctagtcatggagaaatcgccagaccgataaagcttaacgcggctttatctcattgcataaatgaatatcatcaatacatgtaaagcagagtaagagcatagacactgacctcttggccactgagcaacaacggtttctttcaatgtagcaacggtagtagcatcaggaaacaatttaggaccgatatcagaaccatcgttaagccggaacttaatctctaattgatccttcacctctgccatatatctctctaaaggaatgacctaacaagaactcaaaacgagacagtgtatcaagaagttcaaccgaagcaaccgagatttgagctttaaaaaactctaaattgaaacctcgtttgctttgatcctatctgcaataaatcaaaaacaaggaaccaattgtttcacacaagaacaaattctcaagcagctacaaaaacatgttttctctagctcaagtctcaatgtgaaccctaatgaaacttatggattggtagatgatcctgaatggtgaaaatgaatataagaaacgcattgatcaaataatatgaatcctaagaatagcaaagatcattccttgaaaatatgatcgatcatgaatcgtattatctccgaaaggaacaacaaaagtaccaatggaactcaatctggtattagattaaccgatggaacacgaacaaaaagaaaccctaattaggtgttcttacttgggtccgctactgatctgagtttgatgaggaatcagagaaggatcttcgaaacctcacatcacagaggagagaagaaagagagaatgattaagagagatctcactcataaggtttgagaataaattgcagccaaaatgttccccaaatcctttttatgtccttgttcttcttcttcttcttcccatctctacgccaattaaaatgctctaccttttaaattccttttaaaaataataattatattaccaaatgctctctgtacattgatatgatctcatttttatttgtacattcaaaagctattggagatttttgtttgtttggttaatcatcaacgatctttgtagagattacattcaaaatcacagctcgaaaagattaggaactgaaatgatgatattaataagaaatgtggagcaaatagcaacaaaacaagtgtataagtgtgttcctcaatttatcaacaactggcttttctggtcataacctctccctctctctcttaataaccaaaaaagaattataaacccaatctttctttccccattcttataaaaagattcaagaattggattctccaaaagaatttcaaaaaaagggtaaccttctattttacagaaagaatgaatctttatctctctctctctctttctcttatgcaaccttcccttcgctgcaaccaagtttctcttatgtatgtggcaaactaaatttctgattcttccttctttagactgagtgtaatatctgcagactgccttgtcttttttactacttctcctcttttacacctgtaactaccttcatgatcatacacctgtaactcttaccttcatgatcatctcaaagtttcggttttcctactccaatatgtgacagttcttgatgaaatcatttgagtagttgacgtatttggtccagaatggccgcagatgctcgaaaccaatctccagccatggctttgactgcccattgtagtggatcactgctgctttcttcacattttctatgttggtcttgctctggtagcctaatcctagcatatgccatgacgagtctattatgtgtacgtgacccttgaacgcgataagagcaggaggcaaggttccaagtttccacattgtcagatttgactttagattctgttccaaagcaaaagtaaacagagtagattagagaggtaactttagattctgctaaagaaaaacaaaaaagtgtaagcttattcgatagagttacctctctaagccaagagtgatacgtttctctgatatttgttttcctccaagcttgtagatcgaagatattcataccatatgcccaagcacattcttcaggatctaaatgctttgcgatgagcgggtgagagaaattgaagtagttccttaaacgctttgacatcacccattcatcttcacccctgcaagtctctactgccccattgaccttaccaccgaggtcaacatcccaaagtggagttaagtctccctggacaactatatcatcgtctaagaaaaccaccttgtccaagttcgggaaaagctattccaaaaaaagagacgaaattggcaaatgatttagaatccccatgagttctattgcaagttcaaactaggggataaagatttacctctggtatatatattctaagatggttgagcaaagatatgtattttggacttctagactgcaattttgaagcaaatgttcgaggagttgtttcggtgaggtttgccccagcgacatgattcccatgataatagtccctgacaccattatggctttccacagcttccaaaaccggaacattctctctcgtcaaccagtcaaactgatgaacacctttaacctcaacaattgctggtgcaacagaattaagcgcaaaccatgaatgcatacccgcataggttttcttgtctgtaatgatgtgaaagacaattttctcgggttttgaagatgactgaacagcggatgagaccacaactgaggcagccaaaatattgtccgtggacaaaataaagtggtggtaagcattatctgaaagaacagggagaaactctggtgaaggaagctgtcttcgagcatgagcattggaggaatattcatctgtcagtcttagagagagacaatgaatgcctttgggaatggaacttgctgcaaagtgcttgttcataagttctgcaaatttcgattccctcatatcacgttcaaacttctccatctgttcaagacaagatagagatatatcacatatgataatcttcccattgatatggctcactttagagagcaacaagaattaacaaagatctcttccaaatgcaaataaaaaagaaaagaaaccaacttgacaattgcaagagccacagatagatgcaaaatattttctaactaaacaaaaacaaatgtccttttgatgcaagtatataatatgtaggatcagaaataatttcagattagacaaagcgtaccatggctcgcagcacaagagcaaatgtttttgcatcatagtggttattcttcatatcggaaacaagttgactaaaagaatttggaagcttcaaaccatctggaatttcttgagtgcttacttcgtttagaattttataaaagtctctagctagtctctgtagcaagagaaacatgagataaataaattcacaatatgaaaagatactgaaaattagccgacgaaagaaaccactcacctctgaatcatctaccctaccaagaagacgtggacctatccgcctccctaaacaatctgaaagtaagaagcaaagggggagaaactttaatgagagggtcacaagagcactggggagatacatggaagctgatcattcaattgaaattaacaccgatcttgaatggaaaacctcaacacatgaacacacagcataaagataaatgtagagggaaaaagaccctaaagacatataatttggttcaaatctagtaatgcagagaaatcttaacacacaaaaaaaaaaggaattcaacaaaatttgtcattcagctccacaatccaacaaaatgcattgatatggaaaagtgagaaatagatggtgaaaagtatatgtacacctaacaattaaggtagtacagctcaatgaaaaccaggatcttacaaaatcattagtggggacctaacaagaagaatccaaaatcaaccaaacgttgttgacttaagccaatccaagtacaatcctaagcatcacaaatggatacaacaaaaaactaacaagatgtttttgccaaggaacaacactaaagaagaaaacttgtaaaacgtttctatccacaacagagaatccttgaattaggcaacagaaaacttgagatccgaaccaattaagatgaaaaagagaacaaatgagattaccaatggaggagcatttgttgacaccctcaagggtaacaacagcggtgagaatgaaaacaaaaggcaacaagaaagcgaggattaagatggtgtggaagagagttcggtaagagatgtgacgagctgcgaccttgatcttcatcaagtcaataaactcattgctgctcgaaatcgtaatgcttctcatactcggcgatatgtgaagctgcatcctccttggtagtgcagccccaccacagtgacaacagaaaccgattccgaaaaaaacctaattcctgacaacaacaacaacaacaatcccaaacccaacatcagatccgatcagattccgcttctccgatcccgatttctctccgattctcgatctcaattccgtctctgtttcgttccttatagctattcttcttccttgtggtcttctcccagaccgcatttggatatcagaaccacccaatccgaattttgagattcccgccttactcctctgggagattgttgcttcaaacaattgaacacgagaatccaaaagggttcgcctcaaattcacgtcttgtgaagatatttcaaagagccttcctcacagatcaagattcaaaatcaaaggagctgaggaagaagaagaaacaaatgagaggaataacaacacaacgagctttttttttgttctcagtgattttgccggtggatctaagcaaaacaaataataaaactataagggaaaaaaataataataataaaatttcaagatctaaaattataattaaataaattggtgtcttgaccttgagtttagggattgttttatagagagctaattataacattgtctccacctattttcatggctaagcaagagttttgctttttcatctttcctcttaaatgattgatataaactaattttaatcatacttaattattaaaattgactattaaactgatcaattaattacataaagaataatatgttctgttcaagatcattagacaatgacaccctcttcctaacttcttactcatgttttatataacaaaatagaaaaattaattgtaattgtacaaatagaccaatctaaacctattgattagaagtttaaagaaaattatatttatatttagttgattaatttggccaaaatcaacttgtaatagttctgaaagttagacagacgtctaatatatatggtccgtataataacgctaatatgaaaagaagagaaaaatatcccatgtaaaaaaactttttttctaaaataatcattatagactacaagcgaataaaaaatgtaacatagtaaattgaggtcgtccacataacaaatgacgtgaattacaagtgatttgattttgtacgctagttcaacaatttaatgtgctcaagagaaaaataagcaactggatgatgatacctttctcttggaaaaaatggtagatcaaaatcccatattgatgtaaattaaaaatatagtcttaccgggtaggtccaatttcatcatagggaatttttttcagaattagttacgaaaataccgtaccactatgtcgttttcgtttaaacatataacaaagaaaaaaagtagttgttttggtcaggaaaagtagttatttaatttcatttatatgctcaaaagttttgttgaaataccatatagaccgaccgacacattcaattatgacttttcaaatcaacaaaacttgactcgaaccggattcaaacccgagttattccaaagaaacaaaaaaaagatgcaattgagaggaaaagttgctaaaacaacttcaagaaaaaaacagagcaaaaagtctcaaacttgactgtcaaattatgtacaacttcgattcagaaactgaagacatttctagaaaaaaaagaaagaaagaagtatgctttatatcttcaccatcctctgttttaaatcttcatgtgaccacctactaaatcctgaaccgagctgaaactctttggacggatgctacacttctcactgagcatctcacagagtcatcctgggttcaactgattcctctatgccattcttcttgttcttacatttgctcatccgatgaaacgtctgatgaccccctagagcttgataagacgagaatatcttgttgcacaacctgcatcgatgctcaacgttcttcttatcagattgcgtgagcatatcagtatctgaagaagtacactccatagctcctactccaagctcaattctgtaaaacctagattcaaagtcgccagcttctcgcattttccgctgatcaaattcatgcttatcttctaagaaactcactggttctttccatgtttcttccatcagtgtttgctcattactcaaaaactcaggaccaaattcacctccatttcgatccaaagcacacttgtgtctcaaggaactcgctggacctttgaatgtcacaggagtagtaatctcttcttctagcagtctttgctcattactcaaaagtccggattcaaattcaccatcttttctccgtttctgctgatccaatctgttttcgtctctcaagaagctagctggttctttcgatgttccataactactaaacccttcttccataagtctttgctcattacttaaaaccccagattccaattcaccaccttttctcggtttcttgttgagcaaacaacccaaatcatagctactttcaggtgtttcaggagtaacacgtactgcctcagaaagacttttcaattcgtctacaaccttgggagcactcttagacaatagaatcaaacaatccgccacttctaattcttcatcagtcgcatcaaaaatagaactcggttcaagaaacgtagtaaataaagtcttcccagacctaccaagtcttgatcttttcttcttcttcacaaacccaaggctacgagacagagtcatcaaggattcttcacaaaccttctcgttcggcgataaatgcatcatcgagcgatgattcttaaaatatttctcgtaccgaaacccttttccacattcttcgcatcgaaacaaaatcttcttcattggttccggagattcctgggttttcttcttcgagttttcccttagaccatagtaacaagtaacatcttgctgttggttcgtagacttttctgtttctttctgtgaccgagtaatcttgaggtctcgcaaagctccattaatgggtttatggagatcttgatgttcgtcttccatttaggcgcgaaatacacggggtttgttgataaagaagaagtcgatgaaggtaacgatgaggtagatgatgtagagacagataaggaagcaacaaacacaagccggactcattatcaaagaactatcagatgaattgaagaaaaagaaagtttatgctctgtttcttgtcacgtatccgagaaaaactgagaaagaaagcgtcggagaaacagtgaagctttagaaagaaaaaggtagatactatcgaatcaaacgaagaatacaaatcttttgagtttctgtgatttttcgggagaacaagtgagcgaagtaacgtcatgaagggggcattttagtaaatcgtcaagaaaagagggagcgaaaactttggttttaactagaagtttccatgtggcaatcacatgagccgcgagtaattggaaaaataatttaacagaacatcttttactctttttagtaactgcagtagaaatcaacttgggaaaacttttatattatgaaagtaatattcgaaaagcttacaatatttgataacccaaggtacataattaccaacaagaaccaaacctaaaatctctgtaggaattcataataggaagaacaaaagaaacaattattgatcaaacatactgtagttaaagatatatggaaaaactcatgagaattcggaaaaaatggagaaaaaagctaaggaagaggtttggttgttgtttaggcaagagcaggcatgtccttgagccactggtccaatggcttaccaatggagtaaacaataaacccaatctccctgagtttatcagcgtcgaccacgtttctaccgtcaaaaacaaaagccggtttctgcatattctcaaagatccgctggaaatcaagtttcttgaactcgtcccactcggttaaaatgcagataccgtgggcgtctttggttgcagtgtatgcgtcccaagcgactgagacttgcttcacagtggtggggctcatgggctggagatgaagtgggtggtcccagtcgaatttgttcatggttaagtctctttggatctgctcttcagtgacttgtgggtcgtagatgctgagacgagccttgtcacctaacagacctttgcagacatcaatggctggagtctctctagtgtctccagtgtctttcttgaaagcgaagccgagaaccgcaatctttttgttggagactgtgttaaacattgaagagacaatgcggttaacaaatcgggttttctggtagtcgttgatcttgatgacttgtttccagtactcagcaacttcgggtaagccgttgcattcgcagatgtagactaagttgagaatatctttctggaaacaagatcctccgaacccaacactagagttcaagaacttgggaccaatacgagagtctttgcccacagcataagagacctctgagacattggcgccagttgcctcacagagagcggacattgcattgactgatgagattctctgggctaggaaggcattagctgcaagcttggaaagctcggcagaccatagattggtggtgaggattctctcttcagggacccattgggcataaatgtctttcaaggctttgacggctgcaaagccttcagttgtttcacgaccaccgatgaggacacggtcaggcatgaaaaggtcttcaatagcggttccttcagcaaggaactcagggtttgacagaatctggaatttgattcctttgctgttgtgtgtaagaatcttctcaattgcctctgcggttttgacaggaacagttgatttctcaacaacaatcttgtcggaaaccgaaacatcggcaatcatacgagcagcgctctcccagtaagtcaaatccgcagctttgccagctccaagaccacgggtcttagtaggggtgttgacagacacaaaaacaatgtcagcctctctcacatgtttctcaacatcggtgctgaagaagagattctttccacggcactgcttaacgacatcatcaagaccaggctcatagatcggtaactgatcactgttccaggcattgatccttggcacagagatatcaacaacagctacttcaacagatggacactttagagcaatgacagccatggttggaccaccaacatatccagctccaatgcagcaaatcttcaccattttgcttgtaaactgaatcacctcctgtgaaaaaaaaaaaaaaaagtttaacgtcaaacttcaaatctctctgtaaccaataccataaatgagtgcacaaaagtttatgctttattttgaatcagaacaagagataggaattattgtatctagcagcaccgtagaaggaaattttttgactcaactcaacaaatcagatccaacaattcaagcattgtagagaagaaattgatatgcaaaataaagttaaaagcattcaaaaggagaatctacaataagcaaaaactaaactttaacaattttcaaaaactcagatccggtttcgtaagagtaaaaggatacacagagaatacgttaacgtaaacatgacccaaatgttaggtgaagcaaccaattcagagatcatatactcatgatcatgcttaacaatccgaaattcaacgaaaaatatacacatactgcaagaaattcaaatcaaaatctcagatctggtacatgcaacagaacccggttcaggaattgggaataacgtaaaatgagaaatgaaattacgtgaattttctacggatcaccgacacagatcgagcctgaatgcagaaaattgttaactctcaatataatcacagaagaaggttaataaacacacaaacattcaaaaaccaaatctatatgaaaattaaaccaaccaaagtagatccaaatcgaaacaggagataaagcccgagatcggatcgcgattaaacacaaaactggatcgtgacacggattaagaaagagagaagctagaatttgatgataccttaaggtgcgagctaggtaggctctggttctagcactgatcgaagaaaatggaggtgaaatcgctaaatctgacgatggagaagaatagcggggtgagtatggagtttatataggtcatgagattcctaaattgcccttgaaaccgtcaaagatattaaagtgtttttggttacttatttattattattgcttaattaaattaaacaaaacactttcagttaaaaattaaatgatgtacaggtagaaaaaacgatgggctcaaaatatttggcaggtttttgtttaaaagtcttagtatttattagtattgcttaattaaatttaacaaaacactatcagttaaaaattgaatgacataggtagaaaaaacgatgggctcacaatatttggcaggtttttgtaaaaagtcttcaagacacgttaaacatttgacatatttccattgattggatttcgaccaacttaaatacactttatcgtatttgccaaaaaaacatgaaaaatgtttgtatcagtcaacaaaataaactgtaaattatatataaatatatatttcttttatggattgttactattttgtatattaaaacatattcaaattttatattggaaactaaataaattcatttattgcctgtctattgtttactttcattgaagaaaatataactgacttaccaatctccacaatataaaaaaaggaagtacctttttaattgtttttttggacaatttgtatctctttagcgttttttccccaacctttacacttaatcacttatattatggattcatatttttctgactttttccacttattaaattttctcttgaggtaattgatgcttcaaaacaaaaatagctatgtatatattatttgttcacctactaaacaatattatatatatatatagacatatttcttaccagcaaaatatattatttaatttgagaaatattaacaaggaatatacattattggtttgaatccttttctgtgcgtcaatgtccattcatagtaataatatacttcccaaagtttggtgtttagtttcaataatgtacatgttaatctattattataaaaccattttgtatatatgagtacttaagtgattgtgtggtgaggtctgcaggacaaacttcagacaaaagactaactgcactttgcttaaaaactcagtcacactttttgaagtgcttctcaagctatatttgcataattatataaataactaataaaaagaagagtgcggttgaaattttaatattaaagctatatatagttttagaaaaatataaatcgaaaccaaatatattgaaaaagaattcaaatataacatggttcaatatttttttgattcgtatacaagtttgccatgttactttaactgtgaccataaaacctcaaaatcatgatttttgtagattcagtaattattttactaatttacattcgaattagaatgcgtcatacgacaccttccactttctagcaacgtatactcttgtcaatcatgtagtctttttatgcacatcatatcacgtagagtaaatattagaagcaaataataaacagatatttcatgtaaataggtttaccccgagtagagattttacacattatagaataaaaatacaaaagcaacaataaaataacaagaggaaattaagattacctaatcacataccgattaggcgcaacacctctagcttgatccaacgtagtgaaaccttcccaaaccaatccactcttgggtccacgttgcttggttctcttagactgcacccattcccaaaaccaaactaccaatccccaaattataagaaccacgatcgcacccacacctgcgatcgtgtacgctcttgcgttcggcttgatcacatcccctgcaacagagtaagccaagaccataggaacgaacagagggtaataccaaaacatactctcttgtcctaaactcaacaaacgtatcatcatctcaatcgcaaagcagaaccccgcactgttccacaaccataaccagataaagtagacctcgtccataaccactgaacccgctttcggaccgcttgttccactcttttgaccaccgccatcagacacgcctccgggaggttggagaaccgtctgatatgtagctgtgacgatgagagttgcgaccactaaaagagcgtttcttctctcttcagagatccaagaataaaaccgaatcttcttcgtccgtctcgattctctccaagaaagctgcgacgcgagtatatccgatgttgtcttaatcttgacaagagaaaccgaacgttttccaccatgtctcttaaccattctctctatctctctgttattgtgtaacacagcaatgtcgaacacggttaaaccgttcttgttctcaatgttgacgttaatcttggagctctctaacaacaatttcatagcttgacgattgatctcgtacgccgcgagatgtaaaggcgtgttaccgtctttgtctcttcggtttatgactcttgtctcgatccactctgcatctttttgacacaatcttaagatccatcccatgagaactttaagaacgcttaatccttctctttggtcgtagttattcacggcgatgtgaagagcgttttctccgttcacatttgcgtccacaatgctttcgggacaacccaagaagaattctgacatcagatcaatcttctttctacttaccgcaactagcaatggcgtcataccttttttggacaagaaaaatgaattaaacactcctggtataaccaatctagttcatgatctgaccatacaatatcgacataatgactagtcaaaagcaacaatagactgaattcaaactagtattcaatggactgttcgtcctacttcaatactatctccaagatttgaatttactagatacatattataacattagttcggattgattagagctaaagcttttggaaaaaactaagaaacataattaagggttcaacaaaataagtgagtgtacgtaccatgtctccctttaatacgaacaagacttggatcaaccttaactacttcaagtactaaccagaagtgaccgtgttccacggcgaggtgtaacggtgtaagtccgtcggcgttaagtttccgagcaaaagatggtttcaagttcatcatttccatggcaaactctgtttttccattgacggctgccacatggagaggagtattaacgaagggcacgtggtcggttttatcaagaacgtatggatcttcatggattagttcgtatagtagatcgatgtttccagatttagcagcagcttctaatgatctttggtccattagtgactcaagagaacagaacgacgatgcgaattatatttttggtgattaaatatgatgatgaaacttaattggctacgaaatgataactcgtttgtgaatgaaggaagttcccaaaaaaaggaaaagagtgggaaattataggtgacgtggcagtatacgtggacacgtcagtatctgatcatttaatccaacggttgatattagataaataagaattattgtctgaaaatttgatgtgacatggagtacaacgtggatcatatcggctccagcatctatttgatctaatggctaagattgtacaaaataactcgctgctaaagtgttgaaattcggatgtgacgtggcattaaacgtggattaaaatcatcataatcattaatttgacaatctaacggacaagattaggaaaataattatttattactaatctaagtttatttattaaaaaagcaccaaaaagactagccgttattagagagcgtccaaagagcgccgcaacggtcacatttttcccccaaatctatcttcttattcgatttacaatactccatagcaagaacaaaccctaattcttcacctccgatcaattttttttttgttggagagattctcaaatctagatcgattactgttcgtgttactctcttgattccagattctgttatcttcgatggagtcgttgacattgaagaatgggaaagcagggactccggtgaaggatcggagcaagtttcagtccaatcaaaagatttccagatcatcggagaatgcaaaccctaacatttcacaagcgagtccttctaaatcaccgctcatgaaatctgcgaagaaatcagcgcagaagaatccgagtccgagccctaaacctacccaggcggttttctctccccggaatcggatcagagagaggaagtttgttgtggtggcgaagaagaattcgaggaaagggaagaaggagccagcgattacagaatccaaggcagctgagatagattgtaaatgcggagagaggaagaaggggaacatgaagtgtgtttgtgttgcatatgaaactctgcgtgcttcgcaagaggagttcttcaaaaatcgaattgaatcagaggaggataaggaagctttggaggaatgctgtaatctcggaaatggcgatgaactagaaggaaaagaatctggagaaccggagaaaacaggcgtttccacaatgaagagatcaagagctaaggtggtggaagaagcacggcaaagtgtgcctgtatctggtaaagtgatgaatcttgtagaagcatttgagaaactcacttgctttagtaattcaaagactgccaacaagatagaagagaatcaaaccgaagaggatacgaagaaacctgtgaaattggaattcttggagggtgagaaagagaaaaacccatggagttcttcgttttgtccatctgaaatggtcttaacagctaagaatctgggtttagaccccaatgcttcgatttcttcgtcctgggacagcacccgtggcaggttagtttgttgttgactaagagatctcactgaaattatgaacttgtcttgttctgaatagtttgatattgtgatgtttcagtgttttgagtggaagttcaaatgctggcaggagaagtagaagaaatgtaagtgtcctgcatgcagcatctgaattttcttagctgtttaatggttgtctgtcttgcttagtatgtcagtatagtttaataatcattttgatatttctgtttatggcagagcatggagtcatcgactacaatgggaagtagaagatcaaagaagaagcaggttaaggtcacttcattgaagccgtttaagcttagaactgaggtatgagtttctttagattaaaactaaagaaaaatttcgaattttatggtggaaattgagtcatgacagttggttggtcttttgtctctctgcagcaaagaggtaaagtgaaagaggaagagttagcaaaaaagatacacgaaataacaatggaggaagaaaagatgagaatccccattgctcaaggtcttccatggacaaccgatgaacctgaggtaagcatgttctgctttcctattaacatctcaattgatcttgtaagctctagtagtaacaatagtgagagatgatgtcttgttgactatgaaaagttctaatgttgttttctgtttcagtgcctagtgaagcctcattggaaagacattacaagaccagtcgacttgacgctccactcagatgtccgggcagttgaacgcgcagaatttgattaccaggtaaccttgctaatgcaatgattaaatctacattttgttgggcttgaagttcaagataccttaaaacatagccgctgacatgatttggcttcagtaaccatttcattctgtcaaatcatttagagtatacttgttttcttatcagctggttgtgttaagacttgagacggaaaggaaaatagctgatagtgtcaaatagtgtgtattgtagtctgtagccaaggttgacttgtctatagtaactttgcattgttccataaatttcttcatgttaaagtctgaatttttgttgttctaggttgccgagaagatgagcttcattgagcaatacaaaatggaaagagaaagacaacagaaggtaaactttaatatgagatgttgtggccatatccgataatagagttttgctttaactgattttgataaatccaatattgtttttagttggcagaggaagaagagataagaaggctgaggaaagaattggtcccaaaagcacaaccaatgccatactttgatcgaccattcattccaagaaggtaaaagactggtacataaatactatcctcttgaatctttcttattatgagagcatgataggtaatatagatattgttttcaagtgagaaatatgttttcaatatagttttcacagaccaactaatagagtaaactttcttataacaatgaacgtcattgcaaaagctgacacagttgcttcttgttgttttcttttaccattaaaaggtcgagcaaacatccaactgcaccacgagatcccaagtttcacataccgcaacacaagaagatcagatgctgcagttcatcttcttggagtgaaactggctcctgcatgagcgatttccaatatcagtttctctagaaagcttcttttggatttactactatatcatccttgttcatattctcattttcaaaactacattacctttctgtaaccaattagttgcagtttcatagatttgacaatcattcttgtttcacctttgtaataataatctggtcttcacccaagaaaatgagaaagattccatattgtttgcaaaatctggtttgatctggttcagaaagatataatacttatcctccagtttgaatttggatttaactgacttatcttatgattcaatccgtgttccacctctcatacatttgtttgcagaatccggtgtacattggtttagttctggtcaagaaacatatgtgagttttaaatcatcttccaatttaaatttgtatatgactgacataccagaagagttttcatagagaagagtaaattgtttcttgagatttctatgaagaagagtaaacttgggatacaaaatcactgtaaagaacaaaactttaatagcttcatcaaatatcaaattagttcgtcaaaatgaacagagcagaagagagtagagatctaaaatcacaaaagctaaaaagatctataacattcttgaggctcctccaaagcaagcataaggagaacaacagctcttcatgattcagctgcaatacgcccagcaacctgatccaaatcccgttgaccgctcgaagtgattcttctccctctgagacaaagaatgaacaaaggaggagagatgaaagtaagtcactaacaaggtcttcctacgaaaagtgcctttagaaagaaataagaattaccctttagtgtcaagctcgacaatgctcattgtctccaactgttggagaatatggcgagcaataccaccactgctcttacagaaatgtggtggtcgacttccatttcttttgctacctccataaattcttctgaaagcaccaacaccaagacctcctctcaagtaaatctttctggccatagaagctgcaccatacaagatatcaacaacgttcataacgactctataaaaacaaaaacaagcgaagagaaagctaagcttttttttaccagctctaatgtagtaccaatcagggtcatatggagcaagctccttcaaacgaccagtcttcacaatgtctgtccatagaggaagctcaatctaaatcagacaaaagagacaactattattacagtgaatttccaattagctgcctatgatcactaacatcaagaatctatcatttctatctctatttctctcttcctcagtcgttttatagtattcaatgcctcaaaatcacaccaacacattgaactacaatatcagaagctccctcaaactctcaattgtttcctctaaaactcattatcagatccttttgtgacgtctttcgattctcagctgaatcaatcaaacttgagagagaagcatcaaaacactaacctttccagatcgcttgaggtgagaagcgtaagccttcacgaaatcgtgaggagaaacatctttcacggttttaccagtcgccatttcacgaatcactccgttaagttaagccaagagctttcaattttcagtcacaaagtctatatatatctgagcaatcaattttcaattagggtttttttcggacacactgaacccgaatcgacccgcctaacccattatgggccattaaatctatttaagcggcttatacgctccgtttcagttaaaagtgtagttcagtcttaattattattttagctactgaaagttataaagataagatatgtttttgaccagaagccacagacaagtttagctgagtaaaaaacgcatggtcttgtcttcaataaaaccccacctatctgcatttactgaagtgaccaactataaaatatgttaagtgtcactggatattgttgagttttaaatcttgcagacattatgaccaaagattggatcaaaaagactgttggatttgtgaaacaaatgcagattacatggaggcaatctctgaaagactgttccggtgattagaccagtaacacatgtatagctgaacacacatatctatacatatctatatctatctatattggtgtattttgtgtatatactaaaaaataagacagagaaacaccgaggcactatgttatgacatggcacgattgaactgatagaagacaaaaggagcggtttggtgaagttagttaaaagagttgggtttcttcgtaagcatcgaaatcagatttctttaccaaagaaaaaataaagaaaagaaaaatatagcaagtacactgcatttcaacactctcatatctctccttcctacttcctcggtttcatcgtccactgtctcaacaatggcgtcattgtcggtaccttgcgtcaagatctgtgctctgaacaggcgggtcggatctctccctggaatctctactcaaagatggcagccgcaacccaatgggatctcctttccctccgatgtttctcaggtttcttctgctcctcttctttctctctctgcctctcttgcatatgatgattctataaaaaaggtgtgagcctttacgaaaagatttgccttttttctgtgtgtgttttccactgcaatggtgctcgagttggtgactgtttaaagttagtatgcattgattcataattctctgttctgttcttctcctgcagaatcattctgcattctggaggttgcgtgcaacaactaatgaggtagagattgcatgttttttttaccaacaatggtccattcaattaaacgttaattgtacgactgtgtaaccttcttaatcatttcgactttaccaaggttgtttctaactccactccaatgactaatggtgggtatatgaacggaaaagcgaaaaccaatgttcctgaacccgccgagctctctgaatttatggctaaagtctctggtcttcttaagtaagtccacaatccaatgaatcccttactatcctttagtttgctttctttcgatgaactagtcaagcactaaacattttgatcttattaaggcttgtggattcaaaagacatagtggaacttgaactaaagcagctcgactgtgagatcgttattcgaaagaaggaagctttacagcaagctgtaccaccagctccagtttatcactcaatgcctcctgtaatggcagacttttcaatgcctccagctcaaccagtggctcttcctccttctcctactcctacctcaacgcctgcaacagcaaaaccaacatccgccccatcctcgtctcatcctccactcaagagtcccatggctggtactttctatagatctcctggacccggtgaacccccttttgtaaaggtacgaaagaaaggaaacaaaaacctgcaaaatatttgttattggttgaagttgaatcaaagtcttgaaaattctctctatcgagatatgaacagttattacatttgaaatggatgtgggtttgttttctgtttgcaatttgcaggttggagataaggtacagaagggtcaaattgtttgtattatcgaagctatgaaactgatgaacgagattgaggtctgatattcttctttataacattgtgataacttacacttggaaatttgcgaatttgaggtttcagagtctttaacttgtgaaatcgtgtcttgaaaacaggctgagaagtcaggaaccatcatggaactactggctgaagatggaaaaccagtcagcgttgacacggtaccgatctctctcttcgttttttatttttttcacagttctttcagatctttgacttatggttacttatacaacaaattatgcagcctctttttgtcatcgcaccttgaaacgaagaaggatccttttagctgcttcaaaacatcttcaaagtctcggttaagctatagcaacgtgctaaaactcatcaagtaattatttcagcttaagttggttggtttcggatttctgcttgtcgcttcaataattgacccatcttttgggatttcacgtaacgtactacactttgctttttagttttctgcgaaactaatgtattttgtagcctctcaatcctggctctctgtcccatacttcagttttttacacaacgcactgcttataaaagcacagttaaaggtgtctaaaggagaatggtgtgtctttgactgaggcaacaaataaaacagtgaaaagttaaggttttacatgatgcattaccttaataaaacatgtttccatgttttcatctataaaaaaagaagggaaaaacagtagcataaaagcttcacttatcatgctatcgatggtcaaacgaacccactgcaagcaatcctcttttctagcgtttatgcatttgtattataaccagaagtagttgaggcctacagaagtatttgagcagttggtggctgctgataacttcctccggttacactttgggacctgagaccttgcagtagtttgagaaactcagagggttcgggtggatagggtcgtaaaactctaaacgccctcttgatcttgaggttcgcaaagtccctggagtagagtgtcaactcggtcggcataagtattatgagttgacgtgattttggagcaacttgcggtaagggctgcaagctgagtgttgcaacgctcctcaaacgaaatgaacttctttaacagttcactgatggtgcattgttgttgatcattcatcatcttcttgatttcgtcgagcgtagaggtttgatctccgttttttgccatagcgattcctattctagaggcccctccttttggcgccaaattatggatgtcagaatcctcccttaagaatttcttgaaagtgtttagtattaatcgtgatagagttttgttacaagattttttcgtccaccttacaatacaaacccttctctatgtatatgtgaaccttagactatatttcataaatgcagccattttcccgctgtgaatacacttaaacgtaacttgcaatccgcggaacgaactattaaatgcaagatccgaagaaccgaatctgaatggaaccgatccgagtaactaaatggccaagcttatccctaatcctatatatgtttatagcattgagagtgcttcctggaaaagttccaaggaatcaaagagaaaatgtgtgaatgaaagaaagctttttcactgctctgattccacgtcacaaattgagaaatgaagtcgtaccgactttgaagattatagaaatgaaaaaacttcttatataaactataaaccttagtaagtagtttcataaacttctgtttagcactcattcatcatacaatataaacaattgcatttagagtatgtgttcgtgttatgcatttatgtttgtattagtgtgagcacaaaagttacgtttgtgtgtatgtttacgtttagtgtatgtattcgtgttatgtgtatatttgtatcagtgtgctctaaagacgtgggtgcttaattgaggtttggtttataaaggaaaaattgatccacctaaaaaaaaacacatggaaatattaaatttgcagccaaaggagaaataagccaacaatactaaagtatctaaaaatattcatgcgtaaatgtattaagtaaacttcggaatctacttacttggaaataggagtgttgaagacgacgcacaccccaaaagctccaatcatgcctctgattaaagaataaaagagttatgctttgcttaaaaatacatccaaaggctcaaaactgtaccagatgtaagtagagacctcaaaactatacatttggtttcaaagatgagaatgaggttttagacgacaaatgggtggcaaaatcagaattgcgtggacttcgagagataataaccctttagttcctgcaagtttgatatatataaaccataaatgagtacaacaagacaaaaagaagtcactgaatgttgaaaaatcatgagatctcaactttgcagcaatataaacaatatataaatcacaaatttggttaatctgatcaaaacctgctgattttttcggtaaaaatcggcattgtccactataacaattaaaacgcaagcaacaacactataacactgaaaagagaattcatgtacacaacagacaacactaccaccaaagatgcctaatttgaaaaacatatcagatatacgattaagagtctttgacataaataaaacttgcaagaataattggatcaatacttacatcttactcatgtacacaatgccttctttatggttcctgcaaatagaatataaagattttttcaaattttgattctacaaatggtaactaagacatgtaagcgttaagtgcctttaaccgtgctttattttaagtacttacaagttcaatataaaaactaaaagagtattagtcacgaattcactgatgttaggccaaacattaactatatgatattgtacgtgatattgaacattcactacaacaattcaaacacaatgagtaacactataatatttcaaactgagagagagaagtcaaacctgagaaagatcacgtacacttactccattttcttggtcttctgaaactaaaaaaatagataaataatcattcatagataaatagttattaaagactatgtgatctaagcatgtaatcaattaacgaactaaaactccatcaaggaaaaatattatgaagatcataccttgttttgaaaggcggaagagacacttacctgattaaaagagggaaagatacagtctgcacgttggactttttgatgcagaatattgtaagttagaacaaaatgtctcactgaatatcatatctcagtgagatgtgtactgacttacgtttggtgcctcatctctctctccttttctcgccttgctcgagcctcgacccatcaagcattgcacaatgatgtgccttcgttaacaggaagagcttcaagagctaggcagagaggattaactacatgtttttatgcattttccaatcagtccattattagacaagtcttataaaagatcatttatctccattaataagcagatcattgagttctatatataaaagaacatttattctccatcaataaacagatcattgagttctattaaagaagatttattctccatcaatttgcagatcattgagtttatagcagaacatggaatttattctccatcaatttgcagatcattgagttttagaaaagccttaatgaaggcaaatccatgcagaaacttgaagttatgctgcccagctagcaatatatagaactgtgacaagtcttacagtgttaatcacagcttgcttgcttattcctccatccatgcaagagaattccccattcggacatcattagacaagtcttatcatatcattgaatttctccttcttacgaaatcattagaaatgccttaatgaaggcagttttgtgcagaaacttgaagttatgctgcccagccagcaataaatagacgattagatttatttatccaatctttgaacataattacgcaagtcttacagatgttaattacatcttgcttgtcttacataacttgacaagtcttacagacttcaatcaaaatttgcttggcttacataattacacaagacttacatatttcaattaaaatgatgcttgcataaaatatttcatgctgcccagccagcaatatatagaacataatttgacaagacttacagtgataataatcacagcttgattgatatttcgggctgcccagccagcattattgaatatcatatcttagtgagatgtataatgatgtgcctttggtgcgtcatctctatcttcctctttcgtgctttgctcgagcctcgacctatcaagcgttgcacaagaatgtaccttcgctaataggaagagcttcaagagctaggcacaaggattagctacattattcataaagtctcccatcattaagcagatcattgagttctatttaagaacatttattctccatcaatgtgcagatcctcggattttagagcagatcattgaactagaaacgccttaatgaaggcagttctatgcagagacttgaagtaatgctgccgaaccaacattatatagacgatcagattcaattatccaatcttttaacataacaagacttacagacttcaatcataatcttgcttgtcatttttaaagtcgtgggtaactgttgtctaaagaccaaaacaagaaaccaaacatgatccatatgtctgtctaactgatttcaaagccgtgggtactaagaaggatcaatgttcagtctcaagtctcagtctaaagactaaagtttgaagccgtgggtaccattttcattgcaccaaacataacccaatcaaatgttttgtccctcaagtctctgtctaaagacttgtcataacccaatccaatgttttgtccctcaagtctctgtctaaagacttgtcatttttaaagcccttagtaactattgtctaaagaccgaaacaagaaaccaaacatgatccatatgtctaagtggttttaaagtcgtgggtactaagaaggatcaatgttcagtctcaagtctcagtctaaagattaaagtttgaagccgtgggtaccattttcattgcaccaaacataacccaagccaatgttttgtccctcaagtctctgtttaaaggcttgtcataacccaatcaaatgttttgtccctcaagtctctgtctaaagacttgtcataacccaatccaatgttttgtccctcaagtctatatctaaagacttgtcatttttaaagccctgggtaactattgtctaaagaccgaaacaagaaaccaaacatgatccatatgtctaagtggttttaaagtcgagggtattaagaagggtcaatgttcagtctcaagtctcagtctaaagactaaagtttgaagccgtgggtaccattttcattgcaccaaacataacccaagccaatgttttgtccctcaagtctctgtttaaaggcttgtcataacccaatccaatgttttgtccctcaagtctctgtctaaagacttgtcataacccaatccaatgttttgtccctcaagtctctatctaaagacttgtcatttttaaagccctcagtaactattgtctaaagacccaaacaagaaaccaaacatgatccatatgtctaagtggttttaaagccgtgggtactaagaaggatcaatgttcagtctcaagtctcagtccaaagactaaagtttgaagccgtgggtaccattttcattgcaccaaacataacccaagccaatgttttgtccctcaagtctctgtctaaagacttgtcataacccaatccaatcttttgtccctcaagtctctgtctaaagacttgtcatttttaaagctgtgggtaattgttgtctaaagaccgaaacaagaaaccaaacatgatcaatatgtctctcttattttaaagccgcgggtaccaaaaaggatcaatgttcagtctcaagtttcagtctaaagaataaagtattaagtcgtgggtgcgtaacttgatatttgaccagaaaactgagaccaatcccaagtatatttgtctatataataagccgtgggtaaaggatcagtttcagtctcggatcaaatgtctcataagccaactcgacgggacaatgtcctcaagaaagaatctgacagaacactaatagttgagtgtttgcctttgatctctcttgggttcggaagaaaaccaaagcaatggaagaaatcaaacaaaaaaaaaagcaaaacgagagcaacaaaaccacaatcgatagcaacaattgaactctttagcaaactatccaaagcgctacaaaaacaaaacaaagaaaaaccattaccaaaaccccttaaacaaatcaattaacataacaaagaataagaaaaaaacttgtaattcacagaaactccaaaccaacaaacacaacgcgaattcgtttggttgtgccaatatcaaagcaacttcaaaacgaaaaaaaaaaaaaaaaaaaagaatagaacaaaaaaaactggtaaatattgaaatttagaaaccctagaaattaagagaattggaagaattcttacagtaattattgatacaaatcttctcggtcatgaatgatttcatcgagagaaacctgcgagccagagaaagaagattactttacagtgataaagttaactggttacaatttacaaatcggaagattaagaaaaccctagaaatcaagagaatcggaagattaagaaaaccttagaatcaagagaatcagaagtttacttacatagctggaaatcgtcttccgtcacgatactagcaatcgagagaaagaagaaagcaaaacaaattatgaaaaaattacgagtctctgagtctctctgcttaagcattcccctttttataaacacacttacgaattatgacggtgcctgatttcctttttttctaactcctagtttcctttttgcagttaacataacagctggctaatttcctttttctttttgtcgacgactatacttatttctagtttccatttatttaaaaatgggcctaaagttagcccagatcaaattagtggactgatgtttgccaaacagaagaagttatgggctgattaccctgcccataattttgcgatcgttttttattcagcttttgtattcggaattatatcaacccattagaaaaagtcaaatacaaaaacattccactagtcccaaacgcccaatcgatttatcacaactcacaacgtttttttaaaatctatgttaacaattttaataagaaaggataaacgagaaacaagaactttgctcaatttcgataatctttgtagacattggacgactttagaagcaaataaactctaaacaagataatctacatttgtaaacaagataatctacatttttataatatagatttgtagacgttgaaattcaaaattaacagatatataatcatttacttttattgtaaacgtggaaatacaaaaataaacaaagatataatcgtttactgaacaataggatcaagagagaataagagagcagataaacaaatacaataagaataagtcaaatttcatctaatagaccaaaatacacctccatccccaattcctcttctactactttgatttcttttcctttctaaacaaaaagattttaacgtttcaattcgttgtgtcttcctagtttagtaagacatcgtactgtacattggttacgagcctaaacaacagcggtttagatattcttttagtgccgctttatgtacagtaatctaataacaaaagcaaatggttcttttaccttctgttgctacttctggtgctgtaatttagtctccgagcagctcctcttcctcctcctccatgccatcctctgtcatcattgtcgtcatcatcatcatcttcgttgtaggccactgtttttttagcagatcttgaagttttccttggcgttgggcgttttctcttgacgtttgttgaatagatggtgaagtcaaccgtatcttctctcattgcgttcttaaactcctgcaaaaaaacaaaataggtgaagaaactgatgaattctttgcccagggatttaaattttactagtgaacaaaattaaaaggctttggggttttaacctgatatctctgaactaagtcttgatatgttgaaggtaagtcagtgcgagtttcgctgaggtcaaaggcaacgctttgtctggagagaggatctcctggcttcaatggttccgttggagaataggcctgagatattttgtttccaaacaccagtcatgtttttgtgaacaaagttaacgaaaaagaaaaagaaacggaaagaaagaatcgtacttggcaccggtcatcatttaagctgtacgtgacttttaggtatctcttgagcttcaaaagaagttgtatagctatagctgctaagcaatcaacctgaaatagtaccaaaagaaagactggcatgagaagaacaagctatatatataagaaacgatgatacaaagaatgcccaagtttgataaaccatatgtaaaactgaaccgatctgcccaaaccaaaccaaaagaaacacaattataacaccctaagcatcacaggggaaaaagccatgaagactacctgaattttctgcagatcatcagtggataattcaggaggatcagatgaggtcatcttgtgcacatctgctttcccattatggacttgatatgaagtgaactgatcccttgaatcttggtatactgatccattgaggtcaattagagttgcatggccataggaattccaatgtcttggttcttcttggattcttgtgtttagatccatcatgttcatatgtccgggaatcggatcttgttggtatgctccatttccatgctgagtctttgcggaatctttatgtaacaaagccttcaaatttgactcaactgctccagcccgaatctgcataactcggtttatggaatatacaagatagagtggttcatcaggtgatgtgaatggaagtaaagcaagggtttcagtgcaatacctgtaaagagaaacagtaaagtaagtctttattttaccagagagaatgtggaattttttgtataccgaatactcacttcagaaacgatattactgagccattccaggttggattatcaaacttgcgaacaatcgaagtcataaatttgtttcgagaaacccggtttccacggataagcttgtagatcctagagactccaagtctagcttgggtgagagtactactagcatgatcatttttgcccaacatgtttgttgaacccttttgctgaagactttgatttggttctgaagtgacctggctgatggattgcatgaagataaacgacatttgaagtccgtcaccaagacggctctcaaaaaaagccggatacctggtgaaaatgtcggagtgtgttagtgcgctaatacttgatcaccgaataatgtaaaatcatgtgaaatccaatcagaggattacttctcatgcatattcattagtaaatgatgggccagcttttggttggcctcttgaggatctgtctcgagggcaatcaaataaggaacacacgtaataggatgcactaggccttgacgtagtacaacttccactatctgcgaaacagaatacctctcaataattcagacaagtgaaaagatacagaagcaaaaattattaatgaaaaaaaaaaggcgaaccttgagagaggtctggcgaatttgatcatcaaagtccaagcatctacctaatattttatcccaaaacaactgcacaatgcctccgcaaatgttggtgtcacctgcaccagcggccacaggtacattatggccaccttgttcaactgagttaaccgtgttatcactggctttctctgatcccaattgtttttccgcatcaagaaggtattcatacatgttttgtaatgcttgcatctgaatcatgagcattaaaaaaaggatgcaaccatatgtaagcgtaaaacaaaaaaacatgtacaccatatatagaaaacatacatagatgggtaatattaccttcatacgcccatttgcttcatctgctaatgtagtctcgattatctttccaatgtcttcttccaacatgtactcaggtcgtgcaattaggatgaatcctaaagcctacgggaagtttggggacactgttattctaacatatcacaatatcgagaatgtgcaacagctagcactgtaagcaccatacctgcagcgacctgactttcaaagcaatatcttccgttcggagatgtcgtttaaacaaattaagacagccagagagattgaaattcttgccacctgaggtactaataagagagtttccatggcgaataagcaagccaagacaaaaaagggaccgcccagcaatctgaaatggaaagaatattttcaccaataagcttcaaactaatccgttgctggattcattttgtaaagaataacagttatcccaactcagtcagcactaactcgaatgagaaatgtgaatattgaatattactctcagtaggcagtaaaatcgcaatgaagagcagtgttagtagagaatactgaacttctaagcaaaagggaaatgggagtaacttgtgtctacttctagttaaacaaaatacagtccaacagttagaacaaacaccaaattaggtaataatgcaaccaaatttacactcacaaatgcaagccgcaacagtacactatatcaccgacccacagatactcatactacacttgtaaaatcatgtgcacgaaacaagactcaaagaccttaattgtgcttaaacatgaaacaatcctgatgcatgatcttttcaaagtaaacccacctgtgtgttatcggaaccttgggcctccagccgcttaaaaaagaactgaagaagatgctcaactatgctaacacctttccccgccaatttactcacagaacaaagacacctgagaattcaaaaggttgcattagtagtctcctgaaaaggatgagtgattttactcgactgcatcttctatgaagacatgcaatcgtcccaaaaacaatgaacatatgtgaaagagaatacgatgagtagagccaggagtgatggtagttgaaatatagagggtacctaacgcaagcatgcacaacagttagaaacgaatgccgaacaatcatatgctttagatcctgttccagatcttctgtgacacttagaggcagcttgcggatcaagggtaggacagaatcgataatgaaaataatactctccagtaactgtgctcctgttctactatcagcctgcaaaaaatacaggacgaaaggcaattagtaacacttaaaatttgagatcctatagtgcaaacgccttcacacagttgatttcttttctggatatcaccactatatttttaaggaaaacaaccataggtaagttcttaaatcttaacagactcattcctagaaacttaaaagaattttgaccaacctgactcttcagatatggctgtagggtgatgacaaacttagtagggtctgaagccggtgtacacagcccaggatccaccagacagaaagcatgcaaaacaagtacataaggaagtacttgcacctctccttcttcacggctcatttcttctacctgagggaataaaagatgtttgttattggttctcgaccaacccatcatcaatgcagtcgtgaagcattagtgttgacctgtaatattttttccagtaagcacttgcacatcagctcgcagcgcctgcgtactgatgcaagagcaactgggttaataccagcagctttagctgcttgaggaaaaaaatccagggccagggcacgcttaataattgttacaagcagctgttgatttggggtcctgcttaacaaccctaccatttgcttggttttcttctccagttccagtggaatggagctagcatcactagcaaactgagtatgatgccctggaggttcctcaaaccaaaattcatagaaagttttgcacacaagatcctgtagatgaagaaatctctattatagatcttgtgcgtaagcataatatcacactaaaaatgaagacaatgcatactggatacaacattacctgaacactagactcatcatcactgatacgagataatatctcagcgcacgcacttgtaaattcagagaagttgggatttgaagtacacatgtcacgtattatcttgatggctcgttttcgaacactcactccagtatccttaatcctctcagcgaccttctcaaagtactgcacaaaaatgccatgggtcagcaaagaaacagcaatagtgggtaatgtgttataacaatattgatacaggtcaattacctttataccaacatcaggatgtgatgcaatatgcctaccaacaagttccagtgctgcttctctaacagatattgcagaatcacaaaaccttccctcaacagccaactgaacacgcttatcacacagtacctctggatcagcttcaacaattatactaacctgtcatggccaatgatagaatgtattatcatcgctagaatagcacaactatattctgactttgcgcacaaacagaattaactatgtgtttatacacattgctcacttactgctcgcaaagctttagccctaatgttgggagcgttctctcttaaactagcctgaaaaatataacacagttagaaagataaaaactcagaaaaaagagatgcacacaaaacctttcactaaccaggagcatgttcagaatcttatcaaatcctctggaaaaggaactattcattccaagggctaaagtaatctgcttgatagcatctcttgtcaagaacgaagtagttgctccagagttacggattattgactttgctttcagtctggcaatgtaatatttgaatttattctgagattttgggacatctttataccaaaggcacagataaaacctgcacaaagtaccttccatataagactcacctatattgcaaaatccatgtaaaaagagtcaggaacaaaccagcaaatgaaagtatgcacatcatcagctgatcctacatcctgaaggtaattcaagagcatctgttgcacaacttcggtctttgtaatcatacttggattttcgatgctttcttctgattccaacttaccagtacccttggtgtcagtcttgcaataagactgtagtacaagaagttgcctcttgcatacacaaagcggacagtgccaatttcgacttgaaatgtctagttcctttaaacccaaacagtcaccatgaaaccgcctttgacaaatttgacagaccaataagttcccagcccttttacctaaacaaaatgtgcaatcttttgtgcaaacttgatcaacgctaatttcactatctgactctagtaacgtccagaatctgtctttactgcagaggacagcatcacgtttcaaccttgcagctattgtacctagcaactcaatggccattattcgagcagagacatcttttgatttcaaccctgcattatgtagcagtatgacacagagaacctgcaatagttgacctgtcagagtggaaaaaaacattgactcgtaattagaagaaaaaacacagtaacacaatacatttacctcaagaataggagacacagacggatattcaggaagatttaatgctgtcagtaagtccataacaagattctcaataatcaattttatctcagaagcgtcctgacccttaaaactggtaaatcgttcaaggacacgagtccagaagaggcaacatgtttctgtagccgcttcatgacacttagtaaggtagccaacatcaactgaggtctctagtatagagtttccactggcagcctgtctcgaggtttcaggaaggcttgtgctgttgtgaaccaactgaatgagcaaagcagtgaccatttgaatctgcctctgttcttcatcagggagaagatacgctctcaatgctcgtttcgaggaaggtaacttccagagcaattgagatatttcatctatcacatatgttcggtgttgagaatatgaattataaatctgcaattaagacatttacaatattaagaacattactgacgtgaagacattgatatttagaacagaaaacacagtaaagatatggattatggagttagtggaaagtcttacaccaccgattaagctaattgctttaagttgcagaatttggatattttccactagaaatgttgtaatacttgtcttcaacagttgtaaaatgcaactgtcagacaacctttctaccaacaacaggtccttgagtaagccaagaatagtgcaaagtttctgtagtgcagtatttactgctccagagatcctacagacagaaatagcagatgggaaaatgtgtgcaactaaaataacaaaagaatgggtattaattagtaaacctgtttactgacgccttctttactttgctgttttttactatgcgccgccttttgctggctgaccccatgtcatgatctggattatcatcatcatcatcacctataaaagcgtgtggcatatatctacatgtcagttttgtgtaagtggaacataaccttgtggaggagaaatgagaatattgaaaaacaacaaagcctgtcaaaaggcacaatttttgcgcttacatactaggataaaactcaagtttcaaatataggaaatgacatgccatacattggtacagaatatgaatagcaaatggaacttccaaagtaaataggaaaaccaaccttcaaatgccaaattttctgccggtttacttccagtgcggtatgatggatcataagcagacataacagccatcatttggtgcctagaaaactccagaattctctcaattatctaattataagaagtagaaaaaatatcaaaaaatgaatcatttaaatatggtggaacgatggcagtgagcagataaacagccttcagggaaaataacacttaagaagcactcacctcctccttgtagagctgctttggcatatcactgttggccatcactgctagcgatgcatggattgactcaagggcaccaagaaccaacaacactgaatctgaatctgactgaaatatttttcgcagaaaatgttaggtacaaaaagaaaaagaaaaaacgtatttgccacttttataatactaaacgtcataatttaacacacagtagaacgaaataaaccaataatgcatccttgcaagtccaagaaatatacttcaaacagagaaaaaaataactttgattgaaagctaaattgtacgttaaaatagtccttgcgtcgactgcaacatgaaagaatcctcacaactgtaaagcaagagaggagcaaatagagagagacaaacaaaaaactactcacatgttcactataaatggacaagccttctgccctgtgtatctgatgatccagagtgcgcagtaaccttgatagaatatcaacaggtaccatatgcagaagcatttttgaccgtatagtcatcaattcatttataagaacacgaacttcatcaacgggcactgatgaccactctgcttcatccctatcatcaccagggacttcagctctgccacagaagtcctccaacatctcacaaaagttttgtacgatggactctaaataggcattaaaaaaaactacaattactgagagggtagaggtacatgcatagaaaacaaggaaaagaggacaaacagaccttgcagcacagatggatctggttgaactgatgacaagtcatctttacgtttcttctttccctttggctttttggaagcagaaagttcctgcactttcatttggttatgtccatcacacagaagaaatccagatgaaaattatgataatgggcttacattcatggtgatcgtttcaggccgagagtcatatgcagtaacatctttcggtgactggtttgtcagagtttcgtgctgccaactatgatcttcaacatgatttggtcgtaatacccttttcacaggttcaggttcgatactcctagctaaatgagtatccgtctgtcgctgcatcttgacaggaacacttggttcagaaattatcttttgaggcccttcattggtaaagagtggatcgcaggtcggacctgataaacttgaaaattgtaataaataacaaacccaaacatattaaaatctagcatacactaacacaattacaagtttgcctggaacaaccaaacaactattaaagcttagcacaatggaacgtcgagtagaggttcactaccacctgactggataaacaaagaaggaagatactactaggatcaagcattaaaagaatcttaaatgcggaccaaatattcaaaaacctaggattcttttcaaaaagatgttcaatattttccccgaaatctgttactccacagattagccaaaaaaggaaaaaaaaatgagaaggcttcatttaccgggggtaacatactcaaatgctccaggattgcatcgtagaactaggtcatataactgaaaatgctccccagaattacaatcgggcgccctagcctcgtttctaagatccctgttagattaaatcagagaaaaataagttagtgcgctctacaatcatagtctcggcatgaacttcccagtgttacagaaaattcactctatcactaatttattcgatgttagctttgaaaataacccctataaccagcacagaacaaactgttactgatcacttcaccaacaaaactgccaaaacctgaagacgtaaacattatctaataatcaaacctcttttatatcagccagcaagacaacatattattcactgcagtcacagctcattttcataagttagctgattcgttagctgcttaaattcacatatgacacacgagataatcaacttaacaatactagcacgaggtagattcatacatgtataagatcatcaaccaaatagcaacgcatttcagcaatccaattgagaaaaaaaacactaactaactagtttctgatatccagaagcgaattatagttgccaaatataaaaacgatagatcgcttacaggtaagaaacgtcagtctcatgaagcatatttgcgattctactagattgcgcgagaatctcactgcgatccaacgacctgtagccactaccttggccaacctcatcgaacaacttgaactctccaggttcggccgcaccgcagaatataggtaacgacggtagcggcaagtaaggagtaacttccgactgaacagtattagccaaaccgatcccgaaatgagtcaaacctgaacttgaacccaagccggaactgcttggattgctcatatttggatcgaactgtagtcgtcacgaattcaaaaattagggtttccaggtatcagatttcgaagaacatcgaataatcaaaggggaatttgagaggattttgaagagagtttatcagtcatatagagaattgagccctagattggaattagggaagaatttagaggcaattaggattgatgcaattggcggggaaagtaatagaccaatcttcccctgaaattttcctcatttttagacattaaaatgattttgagttattttcccaagccaaaatacgtttctaccctcaactattaacttgatgacagttaacaatcgtgtaagtaaaacgggtactttcgggtagttattttattttcgtagtcagggtcgttttgatttttgaaacgcgatatttttaactcattaatgatactttgtaaaataaatattcattttctttttgttggaaaaccatatattcatttatatattatccttttgttaataaggaagttttgggctaggcctgtactctcccaggatccaggaccagttcatttttttgccaaacaagatatgcatcttaatttacaaagaaaatgttataactatattcttttgtacaatttatgaaatctaataaacttttgctagtcaaaaaaattatatacatatattatgtgtgtattcaacgaaatctcattcctccattaatcaatccttcgaaaatataagttttcatttagaaattagtatattgttgcatctttggaaaagcttagataattggtgtctaaaagctcttttgaaagaacctctattagctcattcaatattgggaccgatgagattgatccaaaccgagtcgagatcgagttcatcggtcccaatattcaaaacgcttaggaagatatatccttatttcttgatggtttttgtttacaacgttgaacatgttggtgatgtagcttaaggtggaaggttcgaagagaggtggttggtttcagatgcattggcattggggacaggattgggatactaatttgaagctaaccggagagagtttgtcctataatgtcactacaagtgataggaaatgtttgggctttcatgatgttgctccacctaattggcagttcaaacttcaaacaaccttacgatggcaagattaacttttgattgggaattatttaatatagtccttttttgccaatgtattcgataattttcagcacatggtttggaattgtattattggggaacgaagatagtagagttttgtagttgatgctattttatttttcggccaaagaaaagcaaactaatttagtatttagcacggcagacaacataagtaaatagctcttgattttaaatggtcgttatcagacaataaaaacaaaatttgcttcccaccaaaagtataattaagatttaacatttcggaatatgaagagtatacaaccttgaagacaataagctctattcagcagaacttacaacagtctcattccaggatcatgaatcgtttgtgtttctgagtaagaaaagaatcgaattttctcagacatcgtacggaactgagtaaatgtttcattgctccacatttcatgtaagaaaagaaatggtcaaaagatttcggatttcataccttttaagaaattgcgattccggaagaaattcgcaagttagagtctgctcctccgctgactacactctctcctttccaccagtcagcagataaaacctttaaaaccaagttgttttataccatttcagtaacaagaagaactaaaagagtagaagctggaagataacattgtgtttactttaccttgtcattgtgtgtatcaattactgacaaaggccactgcaaaaggaggaagaagattagtttttaaagatagaaaaccgtgggttataacggaaaggagtgtgtgtgctttgtcattacagcggttctgagatcccagagcatgattttgccgtcgtaggaagcggagagcaagtgaaaccaagagcttttgtgccacttacaggcggaaatccatgatgagtgtgaagagaactgaaacacgggagcggatgttcctacagagtaaatgaagacagtttatcaactgtgtaataaaaaaccggtctggttatattgacttggtgtgtgttcatatggatctatcacctggcttacgaggatcccatactctaaggattggatctgagccaccagcagctataagggcagaactttcaccaccaacatctaccgtgttgagagcttttccacagaactacaatttcacagaaacaaaccggctttaagtttccggcgaaaacaacttcaaaagcactgatttttcggcaacaacatgtctggtgtgtgccctaatatttacgaaagaaaaggagagagagaaggcataccaagttcaaagaatctttccctgtctcaacatcccatctcctaacggaatggtcccacgaagaggaataaattacatcatgctctggccaaacaactgatgatacacactgtgtgtgtccaaccaaagaagtcactgcctctccctgtaagaagttcaatatcgtaattgatatcagacacttggaactcagaaaaacacaactgggagtacatttctctattttgatttgaagagtagatagtacgtttcaaaagaatgcatattatccggtacctctgactgagattcctcggcctgattatttccttttcttttctttactgatactgactccccttctgaagtagattcatttgtgttccataaattgatggtgcaatcccatgaactcgagcaaacctaaattccattatacaacaaaaaaagggggtcagcttagctcgaagaaatatagcaacaaaattatacttgcaaaacacaagttaagtgaaaggagtaacagcaaaccatgtttccggatttctgagctgaaacactttgaactgacgccttgtgtccacgcaatatcttgtatgcccttactttcgtagtagagtcaacagactcagctggatcaaacttcagacagggagagatatctttacttagacgtaaaataaacctttggttttaagtatgatatctcatccgtgattaccttaaacaatctcaatgtccgatctttagaggcagtggctacagtaacagtttctgcatctggatgcacaaatcaacacaaagaaaaacaaagaattgatcaatgagccaaaaaagggaaaatttattcttgttagtatcatttgctagtacagaacaggcatagtatagatttctcatgcgatggtcataccgttggaattaactaaagcaacagaggagatagccccggagtggccttctaatatgtgtgaacacgatccagccgaactccataccctgatcagaagaaaaaccaagtaatctaagattcttgcaaattttgaaagcaatacaaaaggatagaaaataatcaaaagcatataagattaaataaataagtcaaatgatcaccttcctaatccgtcatagcacccagtcaaaatgaacctgcaaataacaacagcgagatcaagagaaccactaacacaatcattaaaaccaagaacaaatgactatattcatccttagatatcatccggatcactggatggccttgaattggaacaaatgaagactaattctaacaacatatgatatggcagtcgaatatattaaacaaagatacaggtctatgattttccatatggcaaggtggttgtgcgtaaaaatgaataagagtttttaattcaaattactggtgtcacagaagaaatagtaaaagacatctagcagcttaaaggaaattctacatcataaagtaatgcagtaggaaaaaatattacctgggagaagaaccattaaccgcactgacccaatcatcatgcaaggagggttcttcttccttccgtggtgtcacagcccttatgtattcgatttcaagagtacgctcctgtaagaaccaatgaacttaattaagtatatgtttccaagataaagcactatggactaattccaagtacactagctggtgtgaatagtggaagattaagatgaaacacattaccgccgatattccctttgcaagaagaaactcttcgagtgacatccgaataagctccccatcaataaggaaatcaaacggctcagttttccactctggattctctgttcatccaaaaagtctcagtgatgaatattgcataatcacaggtagaacaataatatatgcttttatgtaagctctctaattcataagtacaaacaagttcctaagcagacctaacaaactctcgtatgagaaagagaccactattccaagtaacacttaggatttgacaaatttaaagacaaagacgaataaatactagcattcgaaactgcagggagagatggagagaaaaggctaccggattcgataatagaattgacgatggaagagaggccgagacgagtgacattagaagggattgcgacggagttgaccggaactttgaagggagagtcaagcttcgtcacgaacttaacgtgaagtcttctagatacatcttctccgtcgatatccattttagcctcttaacttctccgatggcctgttactgagcaaaaagaagacgcggagataaattagggttctgccttgaggcgatgaagtgtggaaatttcacccaggcacagggtttaaggaaatttaaaattacggaattgacctccttttccggtttagatcataccgaggctactcaaaccagagaaatatgtggttcgacgagtgagaagagatcaattttgggcccaaagcatttggatctttaagatgggccggctcaggcctctgtttatacttttatataaaccaaaccaaaccaaaccaaagaaaattgaaataatcaaactgaaccgagtaaaatatttttcttatcttttatataaacactagataaggcccgcctatttaggcgggtgtaccgaaaattttcaaatacttgaacgggtctaaacttcaaaacccgaaaaactcgaacccgaacccgaatagatatccaaacatatttcaaatataagtatatattagttatatttatacttatatatagaaaatattaggattatttggatattttagttatttttgtgtcattttagatatattcaagcaaaactactcgtgttgttttgggaatttttgaaattttcaagtaatttaatagatttgcacacaaaatttgatatttcaatatataaataaactcgaatccgaacccgaacccgacccggaatcttaaattacccgaacgggtcctaaacttctaaacccgaaaaccctaacccgaaatacccgacctgaatacccaaacgcccagggctaataattaatagaaaaaagaaatccacaaaaaaatttagaaaccaaacattgttaaaaaatatattttctatatatggcgtaatctcgtaagttaattttacatcatgcaaattaatattaaatgagttaaagttaataaatgaaaataattgaaaagttaaatcctgtaagctaaactatttttctcaaaatgttttattttcacttatgattacatgagttaaagacaaatttgttaattttctttttgttgaataaatgtcccgaaaccttaaattacccgaacgggtcctaaacttctaaacccgaaaacccgaaccctaaatacccgacccgaaaacccaaacgcctagggctaataattaatataaaaaaaatccacaaaaatatttagaaaccaaacattgttgaaaatatattttctatatatgccgtaatctcgtaagttaattttacatcatgcaaattaatattaaatgagttaaaattaataaataaaaataattgaaaagttaagtcctgtaagctaagctatttttctcaaaatgttctattttcacttatgattacatgagttaaagacaaatttgttaattttccttttgttgaataaatgttaattgtttataaatatatagacatataaattagtatatgtaaatttgtttactttttaagattttctatttttttagagaattaaaaagttaaattttgaatgacacatgtaaacatctgatcgtttgacttgacacgtggcacaatcctatgagttagcaactttgaaaaccatactttatataataaaatcaccaaatttattttcttgttgattagtacatgtatttaagtttttaacccatactaatgacttttgtttttttccttctcgagattacttactttttgctaaaagtggtggagtggtcaattttgtttttttggtaaaagagtggtggtcaaactttgttaactacgaactatttttgcttacataaatcctaaatcgttcccgtgcacttaacaacagccattacaatggcttcaatagttaacaaacaacaacaaaacttttgttgagatttttcttgtgttcatatataatcaaacagcctttaagcgcaagacaaaacccttcttaaaaattcttttctaaaacttcttattttccagtttctcttcatcacaatatcaattttatttcagattcagcaatcaattacaccactctattcttacaacacaatggatgaaacacaaaaatcgaacaaattggttaaccatatagaaagaaacattctttctcttctttcggttaagaatgatgatgagagcaaaggagaagaatacaaacctttagttgcatctggtaaagaagatgaagaaaaacaagaagatgggaacaagactaaaagagaggatgatgagagcaatatagaagaatttatcaaattcaatagcaaagaacaagatatttcaaatgtaaccagtaaacaaaaagacaaggcaacaacagaagatgatgacgatgatgtgaaggagataatacaagacgatataagcatttgttgtcgttcagaggcgagcaacaacagcatctcttctttcacattccccatgtataagtttgctatgtttttttttagagaatgcttgcttgtgacacaagaacacatgagccctaattatgtttctctgaatcaaaaactcattcttgttttatatctttttttgccagactgcataacgaagaagatgaaagtgtcacaatgccgtcgttagaaaccatatggaacgtttacgataaccagctattttcagagttgtctcagccgcagaagcagccgcagccacgaccagaacaacaattttatttcatcccagcaactcacactctagctcagctaccaccacaaaggaagtcgttgttgtcaaagcaaacgtctgaaacgcaatcccaaaaggtttttataaaccgctggttctcttgctttaattttatcatccatttcgacgtgattgaatcaagaaatagaagaaggaagaaaaaaggaaagactagtagattatctttgtttgcatgatcaaactgtatcatatagtttgaatctttttgtactgatgttgtaacttgtaacggagggaactaatcttaagccgagattaatgctccaaactaccgaaccaattcaagattgccattaaaaatgttcaatcgggatattggctttggtttttgtgtgagttttccggtttaagaaagtagtataggtatgattgttagtgaatgtttaattctagtcaaatatatcattactttcctattttttcttagtaaatggtaaaaaggtgttgagttttttttttttgttcagagacattatttgacatatattcttggatttaaattgtatatagcaaacaaatttgtttcaatgaaaataaggagaacaaaaaaaaaactaaaagaaggacacatgtcaaaatttactaaaaatttaaaaataattttaatgtcgtacacaacacgggacataatctaattaaaaaggaagtaataacgtctaatatcatttatcataattcagattgaacttgtagctggattataaatctataaccaaagatatataaaactaccattaacaacaacaattattacttgcgacttcaattacatgagtaagatttaaataattgcttaacttggatttaaactgcacatagtaaaaatctataaccaaggaaagataaggagcgggaaaaaccttaaaagaccacatattagaatttacttgtaattttaataacgtatataacacgaaacataatctaattaaaaagaaaataataaaggttaatattagttattataatttagattgagcttatgaaataccataatcaaagagaagtagaattaccatgagtagcaacacttattccttttgactttgttactctgagtaagatttagtttgcacatagccaaaattgtttctaagggaaagtaaaatacacaaaaacaaaaataaaaaattagaaagacatggtaaaatttatttcaaatctaaaaataattttaatgtcgtatataacacggaaaatcatctagttaaaaaaagaaataatgttactggttattagaattcaaattgaacatttggcttgattaaaaaactataatcaaagtccaaagacatggaatcgttagcaacaaacttcattacacgagtaaatttctaaattgtttaaggaattgcttaactggaactaagtaaaacatcggacacgtgtcaggagagtacagcattgtcacgagatctctatctgctcggtcgtgaagttaccattccctctttcctttagtcatctgcttccgcttaaaagttggggacgaaaaactcactctttcaatatatctctctgtctctctctcgctggatcgagggggtttaagctggtttttttttttcgttgccctagaattcggcgcctttctacttcgatttggtttcttggtacctccgtaacccttaaattcctctcaaattttactcctttcgctagggttttcaattgggttcttcataagtacctgggagtttgtctggtccttcttcctagttgattccgctgctccgtgggttgttacaacggggaagtcttcttctccggtaagcttttcgtttctctttaaaggattcgtttttaatcggtccgttgtaatgcccgtgaattagacctcgctgagtttctagggttttgttgtggggaagaattgatatttattgaagttcaatttttcgttttcctaatttgggcaacttgggttttattcttcgttcttgtatgtcattcggttcaatttctgcttcagctcaatgtcgaatttgattgttttttctccgttttttaaggtacctagattagaattccgtgggagatgagttgaaacagtgtcaaaggaatgcactttacgttgtgttgattcaagaaatggttctacatttgacggtgtgtaaagttgtaataaagtttgaatatgatcaatggaggtggagagggtggaagtcagcggagagaactacaagggaaaagaagtatgtctcgtggcaatgattttgcgtacgccctagctagaatggccacggcgcagatatgcgagagcgttgagattaacagttaccaggaatcatcacagtcacgcgaaggtttgagattcagttcttttcaagagactgctcttgaaacactaaccgatgtagtgatccaatacattcagaacattgggaagactgcacagttttatgttaatatggctggtagagtagaaagtaatgctctggatattgttcaagcactggaggatttgggatctggattgggtttcgacggtgctcatgatgttgagcattgtcttgctgattctggtgtcgtcaaggatattattcgttatacaggagaagcggaggagattcctttcgtttattctcttccccgtttcccttttaacagaggaaaaagaccagctcctagcttttccgatattggagtagagccaccagatgagcatattcctgtttggcttcctgcgtttcctgaaaccaagatgtctaacgggtcagaggagattaatgttgacaaaatagaaagggatgtgcagagtagagataatggatcatctttgatgagtgtgcagcagtctgtcgatgttgataggttaaaagttcagaaatccatggatcaaaaggatgttcagaagccaatagaggaaccggaaggtaacccatttcttgctgcaccaatttgggttggagagaagaatgtgtcactgtcacgtgtggtttgcccgtcagagcttaggaaagaagaaattagtaccaaccaccttcctgagaaacatatgagcatgagccatcacattccagcacttgaggcatatgctctatctgataagatcaacgacaagaacagattagctggaatggaagatgaacagaaaagagatggtgcaagaacacaaggagctttgcttcgtttcaagattgggactcgaaaagcctctgaatgttggaagataaatcagtgcttagaggaaaagggttggtttaaagaggatggaaacaagagggagaagaaggtagaacgcgaagaaaagagcgaaagtattgacgcagatgtaaaataggtattttgtcatttagaatttgtagacggaatatctttgcatcctgagtttagtgatagtttgcgattgaatacatgacttgttttaggaaaagagatttttttactgactcgaactgccagaggaagagaagggtgttctgtcttttacatcatttgctggtgaaacatttttttaaatgaaaatataatatcctcagttctagttaagcttgattcctttagctctggtagagtggtgttttggaagagaaatggtgttttgtctttacatcaattgaggtttgctgaaatattcttcttgatggatataacattgttgagctttatcttgagtggagtcttttacaaaacatttttatgaagtttacataaacaactaagaaaagaacataagaaaggggttcagagaaccaagaaaccaaatgttctcaactctgtaaaatggatgatttagattccttgatttacaattctaagtgaagattaattaggaatattagcaatgaaaaagctgccttggttgcccactgagcatccttggaaaagctgcaaactcgcttgtcacaacttcaccaatcaagtctttgaagattagcctctcaatgtctaacactaaccctggtgtctctccttcaatctccttccagttcatgccatggctttgcagatcctcccaaatgaggtcttcatcgtcctcatccaagatacactttgagttatcttgtaatcgatcaatctctgaacacagagtttgcagaagctcttcccctcttgaacttttttcgtgtgtcctttgcgtgctgattgataatgttatggatggttgctttgtacacccttctgcagcgaatctgtgagctaagatctcgttgatggtgtcaaatatgagcttcctcttacttctctcaaccaggttcaccgtttgttgttgtccaaatcctctgcctttgtgcttgttgtcctgtagactcacattgcttgtcttgttctgttccagtacaaagaaaaggctcgggttgatcggtaggtgtgcttggtgcagctggatgcttatcatgctgtagtcgatatctcgtagaagccctgatgccaacattatctctgagatgtacttgtggtcaccatttttgaattcggcatcgtcttccatgaaaccctccgtaagttcagcatcaggttgctttagactcgtgttactctcaggccacacaatcgatctacataagttgttgttcttgttcatccaatgggactcttcagaacttagattgtcgtcctctgtgacaagagagatagtaaaggtgagaaactttaaacaaatcaaaacttgcaatctgttttgaatatatcttggacaaatgtaacgagtttaatatttatgaacttgtagtttaacatttctttttttggctcgaagaaaagttgaatgccagtctgaattttttggaccttcccagtgactcacctttaaagacaatggatatcttccgcacaggggatggtgaatcatcttcgtcgaaagctacatcaagaactgacaccgggctgggctgctccactgtaactttcagaggttttgacagcgacctcattcccaagtctggactctgcattgataaatggacaagattcttgtgaaacatgtacttgtgaataacttgtaaaagagaaatttgctttaggagaaaagtttataccctttgtttcggggtgtgctgctccgtaatgtcgctgttcctctcatagttatacctgcttgtaacctcagtatcaaggttagaggccaagcttacgttgctgtcagatcttagacttctcaagtcactgctttcatcacttaaacggtcttcagattgctgtaggccacgagattttatccctggctttcttctcggggaggctgactctgtctgttgcctactgagttgttgtctctggttcttgttcagttctggttttggggatgttggccgagactgcttctcgaacccaagcttctttggtggtgttcttaggctgacactaggcttctggatcttccctgacttggccatgtcgcttttcgattgtaatggtctggtactagtgtttttcattgtggattctgtctggcccttgtaatatcctggcctcggggtcacatccatagcactctgcttcctcggaatgactttctgggcttgcctcaggtttccaaccttgacatttggtaaagcaacattccgcggggagaaagacgcagaacctgcaatgcctgtgtctttgaagactggagcggtagctgctttcataaccacgatagaggatgatttaaaattcatggacgaggtgtttattgcagatggaattggctgattatttctctgcataaaattgcttgaacatagagttttgttgtcatcatcatctttgcttatcaactgctgcgtcttctccattgcttcgagtatttgcttaagagccctgaggtctttctcggactttttgaactcaagctgtgaaagccgcttctgtatctcaccataaactgtcagcgtagtagcgtctggtattttgacttggttcttggcaccatcaacttgcgcccatggagatgctttcataggaaacttagcaggcatcatctttttgattgaatcaaaacctcttgatctttgtagatctacttccactcgggaagttggcctcggggagtcgcagaagcgattttctctattctgaatggtcacaggctcatctggaattacttcaagacccatcagttttgcaacgacgcttgatgttgttcttctgtgacctgttacaagctcttgtggctctggtgaacaactagatcttgcgctcctaaaggaattcgatctactgtctaatgacaacctcggggtctctttcaacttggcccctgtctttctcgtctccctctcatcgtaagagaaccgaggactgtctttcagcttcactactctccgtccctcactccattcattagaattccgagatggtgatgattctttgagaagagacacattagctctggctgatttaggctgctgagacaaggcttcttcatctctggttcttgtctccttatgaatagagcttctcacaagctcccttatatcacttggcatcattaaaccgccccaccttggcgacccattggtcggttctcttacaggattctcaccattactcaaaccgggctgttcaaactgagaagccgtggtgctaatatctgcagatgagaagctcgaggagcatggtgatgaagaaaacgacaacctcgaggacgattcagaggatactcccctctgtttctcctttgcagtcttcttcttcttactcttctcctgcaattccagtaaatttcactattaatattcattttccttcatggaaaatactatttctctactggcgacagattcttaccgtttccttcttgtccgctgaaatgttggtatcaccgacattgtcacttgctttgcctgcaaaaatttccccaccaaatttcaacttttaacaaatacgtagttttgttagataatacacctatagataagtatagagaattctaaagacaagacatgttatagagctttggtttcttgcatctttagtggtcctgaaccttgtttttaggatcttagtcaggaactagaatacaaaaacaatgtcttatgttgaagaactttttcctctcaaacgtataatttttcttcaggttttgatggagaggacatagcaagctaagaaagagaaaagagagagagagtgttacctgaaggaagagacttgagctcatctccggtgacacgtctcggtggataatgttgccggtaaaacacctgaaagatcccattcatacatccaatctgtttattcagatttggattctcatccgacaagttatacaaaagcttcgccgacatcttcttcttctacttctttgtcttcttaactctggcctcagaaggttgttgactctgaaaaactttggaactttaagattcttctcattaccaattcttgaaaatctccactctgttatctcctctgttttgtgtctcagaggaagtagtagaagaagaagaagaagagacaggaggacaaagaagaacccagcattaagacaaaggtaaagctacttgtgaagttatgagcagacaaggaattaggtttctctgtgtatgttctcttggagggttccttgaagaagaaagaagagaagaagaaaataatgatatcttttttttttggttgttgttgttctttgtgagaagtgagtctgtaaaaggcaaagagctctctctacaattatatggagaagcttttcaagcgatataaaaacatcggttatgtaataatgttatgtagtacgtacatacacatgcgtgtacacatgtattcgtgtgtatccgtagatttatacattgtaagagaatgtaattgaattttttattattcttacaaataaaatttatgacaaagctctgaaaaaatctgcttgggaataataatgaggtatctattttttatgcatctctgatgaaagtgatgcacatgaaagttcagaccaaattaatttcttttgttttcattggataagtacctttattttgctttcaatccaagaatctaatgtattttgttaataatcttactggtgaatgtttgcttatttttatggtcagcaatggtgaatccatctttacttttattaatgtcttacaaacaaattagatggtacaacaattactaacaatgttaattagtaatgaataattaatgaagagagaaaggaaataataaatgaaaaaaagaggtttaccttaccttacacatccatgtggacaaaataatgtgggtgggtctctcaagtctttggtgcccctttacatatgcatgtggcttttgtcagagacagacagcagaatatttatttttcacaaagaaataaatatatatacaaagagaaaaatcctaatagaaattaaaaatagagagaggaaaactgaattcctaatggccagaaaccaaaattataattaattgtttaggaagaaggtggattggtgcactggaagaaagcttgcatggtctgagattggtgggtcttacaaaagaataatttatttttgcttcacaaaactataatttaaatcttgaaaatgatatacttaacttgaaaaagtgtttattttattttcagataattcgacagatataaatattattcttacatctagctcgtttatattagcaactttggcttgggacattttaacccaaaaaaacaacttttgctttcgacttttgctttaatcacatgacttcaaaataatcaccattatgaaagatataatgaatttgtttcattagaaaatagtaatataaagagaggaatttaagcttgtattatgagatagaataatatgtcttttggtttttgttttatttggaacttgataatttgatttgagagtttatgtcatgcgatgtactaactaattaaaatgctttttgggggcagatcacgtgtttttgttcaactatgtgctgtgaacaaggtggggtttgttaacttacttatttattttatattaaaaatgatttcaatatctaattttttttttatatattttaattagcttgtagccttggaagtaaccaaggaatatgctgcacatgggcaatttgcgagcgttgcgaatcaagaatcattatattcatctacactctcattagtcattactaagcgtgtttagttaagatttttatttctatattatataattattggttacattacgacataatttatatagtgcatcaatcggttatttggaatgcagaatataaacttcgagtttcataagctattacaattattcgtattgtatgtttatatttatttattgttgtatgtactttactttttatatatggtatgtattggtgtaagggaccagagataagtgtatatttttatataccaaacaaacaaaaacaagattattaatcctctaaaaaacaaatcatctatgcgagcgctggtgtctttgatttcttttcgttaaaagaaatattatgtatatctacatacgtagattataagagatatgtttttcattcccaaagatcttgatttaggtgtttaaaagcttgagaatgtgtgaggaaaaacaagagggtacgaagttgaacatggaccttgtttcttttggtaatgtgcttttccaagttgactttttttgcattgacccttaatccccaaatcggtacatgtatcacacgtcatccacgccatgcatcatctacatccactaaaaagttcacatgtcatgaccatatcaaggttgatgtatactagtatactacaaattacttaagtatatagattgtgttttaacagaacgaaagaagtgtttagacagggtaatcaatcagtaaaccctacgaattgggaacagaaagaaaattagtgggaaacaattggcaagtgaaataaataaaagaggagcaaaactcatttgattgaaataatatgcaaatattatttagtaaattgacttcaaataaaatcaaacccctcatagtgtggtttttgtgatgaatgtctaaatatctattttaaattaaataagtggcacatgattccgctttattatcacccaccctttccacatttgtgtagtttcgccattaattcaagtgtatatgcttctttttctttgattttgacgagcaacattacaatacatgcacatatatatcataattattcataataataaatgttgttgcttggaaatccttagtattactaatgtttaaaaaaaatcaaaaaaaatcatactctgtgtttgtcactatattttgtgatatatatgttccaaactcataaactctcattgttctttattttccacgttcaaatttttttgaagatccgttagtgtaaattgaatataaaacgtactgtagtagtaatacatactatcgtgtgtgtaaatttaatttaaaaggtggatatgaatttaagcttaatactaaagaaaaggtgattttaatttcttcatatagtacacaaataggcagacaaagtaataaattctctcatataaatgcgattcgtcagaccgtttacaaaaatattgagccctaacttctaaggcattacagattagttaaaagcactttcatataacctacatattgtttcgtcacacagatcagttaggtcaactcataaaacagataatagacatcggcgatatgatttctaggttcccaaaataacgaaagactagtatttgcaagtaaattaattaaggatttcacacaattttgtttctttcgttttctctccttatattatactaaactgttcatatataattttacatggattagatttcagtttatcttaaaagttgtagaacttgacaaggtacataacagcataaattatcatcatgatcgcattcgcattgcagaagttgaaccgagccaatactgttaggtgaattattaaatgttattgtgcatggattaaaaaggaaaataagaaaagtcaggaaacaaaaataccaaattaagagtagattaaatttcaaaattttctaatgtattaaataactgttctcatcatatacatgcacatggcaatttggtgcttccttcacacatacttaaaacttgtaatataaaagcagttggttgaaatacgagccagcacttaagttttttggtgggatgatctagtggttaattaagaaaatccctttgatattccctaagcacataatcctaatctgcccaccactactacgaaactctatttacgatgaatggcctcactagaaagtactaaaatcaaatcatgatatattgctcataagtacatacgagtagattaaaatatttcaattatctacatttttgagtctatcagacagacaatatatgaagagttctatgatgattttagcaatctttcaacttttacgatttgatattgtttggtaggattcgatcttaaaaatattgaaatggatgctgtatggatctttaatccatgttcaattattaaaactcatatccataatatcccacttatccgttttgtgtataatcaatgtaagaagctaaacacttttgttgtttggtcagaacataaaaattggaacaaagtatcaatggccagaaagtgttcgtttagcaagagaaccaccgaatacattctctaaacgtgaaatatataaagccaaccgagaaagaaatgaaatagaagatcgttgggcaattcatcagatgggtagtaggagatggatgagagacgagttgtcgaagccgcataaacttgttcaacggagttaccagagaaacttagcacataggagaatcttaatgggtgagaactttattgcgtatctagacaacgttctatgatagaccattaattaagacaccttcatgtgtagtttagttgatttttgtaacattgaattatatattatggtcatatatagcttaaatggtagtactatattcaatttatttgataaatatatatattcagcaagttgttccaatcatattggcctttccctttttatctgcatccataagctaaattataaagcgcacaagttgatgtaccttggaagttcttaaattcatcttttctgattttcagataattgatgtatttattttcccaaaaaagcatttatttcaacacatgtgagggaaatggaaacatagtaacgataaaatagagtaatcaaaatagtatacacatcgaaaactgatgaaatgagagcatggaaaccatgaaagcaccatatgctttttcagccaaaatgatgcaactctttctcttattattacttcttttctataatatgatcactctcaactttgtatataactctagtcattatgttttcgatacgaatattactttgacaaattaagccactaagaaatagtttatctagctaacatcgaaattttgatagatagagacgatgccaatttcttacaaatctcgatcttatatttatttaacattgaaattttaattcattgcttaaaaaggtcatgtcatctacatccaattatggattggtattaattccatacaaatagattaaaaacgtattatttttaaaagactagtaataaaaaaacaatatattttctttcattaatgtagcagggaaattcagatgtaaaagtgagggtttctacagattttcacatgtccattgccatccttcaacgtcacttataaaatctaagtcaacgagaaaatctcgtccgtaggatggtgatgataatggtcatgatgaagagcatgatgatgatcgtacatattgtgatggtccctgaagtcatgggctcttacaacacctttcaagtcttgtggttaattacctcctttgtcagagcctttttcccttttttttgttttctttttaacttttattctctttttacgtttatttatcgaaaacttcaagaaaaaataagagaggaatgaattcataaaagctgacaaaaaaagaaagtaacaccaaaaaaaattgcactaatttgatataaaaaaaactacagaaaagcataaacttcatgttgagaaatatagcccaacacaaattggatggacctcaaaagatattgggcttacgtttgtagtttccttttctcaagaggcctaagcccattccaacactttcatcatttttcttcttctttaaaatacttagcaatatggtatagttcgaaattttaaaaatggaatataaatcttgtatcatggcctccctcttttccctgtcaatgatttagatgataatattgataatccacaatttcgtgggttgtcactatttcctctgtgattggaatcttttaatctataaaaaatgacaattgttaaacataaatggttacaaacagctttgttgtaccaacataaaagaatgttttaaacggctcatgattaataatcattttggtccatcaaaccggtttttacccaaaaaaaaaccgggtaaaatttaagcgatttaccaaacaactaaccccacacgtgcctaccataaacttcatgcctatttctcaccacacactatcttacacgtgtagattgtatatatacacattcatgtgtgtatctccttgttcctctgtttctttacctttacttgcggccaatcgtagaagaagaaacaaatcaggaaaaaaaaggtacaaaaaaaaaaactctctcctatgtgtctttaatggtttacaagtaatcaaattaattatagatatattgatctggattatgtttacaatgttacacattgttagaatttcaagaatcggcggcggaatattctcgccggaaaatggggaaagctagaggagttaacagcggcggcggagagagctctctcggttatctttttggttccggcgagtctgttcccaaaccaaacaagcccaacgctaaaaccggttttaccaccaccacgaccaccacaacaacaacggatggagctggaggtagacccaagaccacgaccacaactacaacaaccggagataaaaacaagacagaggagaactcggctggtgtgagaggaagtcctaataattactacagatcagatggacaaaactgtggcaacttcctcacggtaagagttttaaattcaagtttgattgaggaacttgaatttaaaactgatttggttttgtggtttgagaaacaggaacgaccatctacgaaggttcatgctgcaccaggtggaggatcttctttgggttacttgtttggatctggtccttgtggatctgacaaatgatttctatttccacgacaaacatctcatgcatttgaccctttgaaaaaatgtaaaaattgttctaaactttattctttatccttacaaactggttttgaggattgttttgaatttggccatttcttgtgttcttgaaaaagctacgaagctttctcaatcttgagatctccagaatgtgtttccagcaaaagaaaatcattttacaaactttgctattggttatacaactattcaagttccatgttccttgctcggtcaccattctcataacagcttcctgaaattcaaccttttttgcataaacaacagtgcaatgtctcggactagttcattacttgtcttaacaacatggatgtttcaagccaaaattgatcatcatgtttgacttgcagcttctatctatcaaacaactgttaagtataaacatttgagatcatttaaccaaaagaacacgtacaattaagcggatcacggtggctaatcaagccggtcaccaaattatacgattgatcctgaccgttagattgtgtacgttaattttgatgcacaaaaccgtttctttccctcgttattttattattagaccggatccggttcaattctgaaccgagaaaaaccataaaacgttgattagggctttcaatttgttgctttgtctctctcgaacttgtgctagggatttaggattagcgttagagactcagtcgagcagagaatgacgacgattgttcccacctccgaagaagatccttacctcgccattgttcgtttcacttcccagcttgcctgggctgatgctggtcccgaggtcggtaccaacctctgttctcaatcatcgactagtgaatacgattgtctatttcgaaagttgctacatttcgttattggaatttatgagcaatttctgggtatctttgtctttatgcgaccttaatttgggaatcactgattgttgaggcgttgtgttgataaaaatgaagtctgaattgagcaatttagtgttttagctaccatgtgtctattgcaatctcacttgatctgattgttttaataaaaattgcctcactatggaattgtttagttgattatgatttcttttgcttattaggtcgcagagcctgaagtttccaggctatgtaaggaagcagaggagtctataataaatgggaagtggctggatttggcaacgttgatggtaacttcagctgacttggtatcagccaaaatctctgagaaaggtctgtttttttgtgtgtgcaggtctatatgtttgttagtcctttttaaccataaataatatctctttaattttgatggtgtttgcctcttattagatcttgagtgtacctacaccatcatttgcaaccttgtcaagaatgcgaacagtcctgaggaagtccttgaaatggtgaaagctatagctgctaaggttattcaacaaccaaacgacaaagcttcattgcgtttgaagatgtatgatcgtgtgactctttgagctaatctctcttaggagtctttgagcatctattttaatgtttcatttttgtgttatgtgtttctcatctgttgcttgtctctgtgcagcctcttcaatctatataatctggtagaccacccaaatgctcgttttcaagtatacatgaaagctctggaactggctgtaaacgggaaggttaccgagtatattgtaccttcctttaagaagattgacagcttcttgaaagagtggaacattgacatcaaagatcagcgggaactatttcttgctattgctaaagtgcttagagaaaataaaaggtactgcaacaatgtttgtttcttctttttcctttttttaaggtataccaatgtcctcatgggatttttaatcaatatttcagttttgcgaaagaatccctccagtttgtgacaaattatttggcaactttctccaatgaagatacccaagtcctgagtgaagccaaggaggaagctgtacgagcagttattgaatttgtcaaggctcccagtatatttcaggtatcctaattcataaatcattcattcaaatgcgtaagatttttgcacgttgacttgttactgtcattgtagcttgtaagtgttaactactgcgccttttgttcagtgaggtcttttactggaattacatccctgacttttgtattttgaattgcagtgtgatttattagaccatccagctgtcgcacagttggagaaggatcctaacaatgcaccagtttaccagctactgaagatttttcttactcagaggctagatgcatacatggaattccaaaatgcgaattcaggatttctgcaaacatacggtactgttcttatccctttaccgcttgacatgatcctcagatgaatcgaatccttcattctttagtgaacccataataagccatagacggtatctgcaggacttgtcgaggaagactgtgtagcaaagatgaggttgttgtccctagttgatttggcctcagatgattctggcaaaataccgtatgcctcgatcaagaacaccctacaggttagcttcttttctacgaacaatacattaaatgttgataaccttttttgcgttgctttctcagactcatcgaatttgtcgggggtgcaggtaaatgacgaggaggttgaattgtgggtggttaaggcaataactgcaaaattggttgcttgtaagatggatcagatgaaccaagttgtaattgtcaggcaagtttctaatctacttctatttcgatttatatgtgtaaatccaaagtcacacattctcgtacttcatatctgttcatgtatcagccgctgtgccgagcgtgaatttggacaaaagcaatggcagtctcttcgaacaaagctagcagcttggcgggtaaaatataaaaccaaaatttgaaaatcctgcgatattgaaaattcgttgtaataacaagatgtttcttgttcgggtatgtgcaggacaatgttaggaatgtaatcagcacgatcgaatcgaataaggcaacagaggaaggtactcagacatcatcagcagctcagggattgactgtccgttgaaatatatctctgaagaagaagcttctcaatctaaagagtgatctgatattgtcatctcaaaagctttattgaattctttgcagagttcttttgaccgttggatctttttgattccggccttcttctttgtgttggcctctttttgtcccttaaatttatgcggagacttgcgatacattgtttagataaatttatcaccaatgcatgaatattgggagtggctaataacagctggcgcaaaatcattggattaaaaaataagagctttgttttagtagtcgagtataaaatagtggattcaaattaccccagtcgtgttcgtttcttttctttgctttcaataaatgtcacaactccgctctagttattcgtcaattcctctttgattcgcgtcagaaagctctcgaattggcgtcgtcgatcgtatcacaatttcaatattgaatctcgtgttggcttcagatttcttgtttcgattagaaaattgaagtttttttggtattgatcgatcggttctctagggtttgggataagtatggatagattcagcaatttaccagacgatgttatttaccacatcgtttcttttctttcggcaaaggaggctacgtgcttaaagtttgtctccaagaactttcagaatttggttactatcaaacgaaacgttgttttccatcattgggaaagtttcaagaattttgttgatggattattagctgaacctgccagttaccgtataaagagattctctctgaaattggtgtctatggattttgctcagtataatattgtcaacgattgtctttgcaatgtgttgaagcgaggtgtcttggatcttgagctcgacattaacgtcaaagaagattacatacttccttctgatgtcttcacttgcaagacagttgttagactgaaactagggtgtggttttgttattgacattctccctaagaatgctttgcttccagctcttaagactctcattcttgattcagttcggttctacgccagtgatggttgtgcgttcacaaggcttctctctgcttcccctgtgcttgaagagttagttatagatcgtctcaactgggaacattggaaaggttctcgctttgtgtctagtccgactcttaagagacttactcttcggcgtaaagaatgggaacccgaacctgaaacttggactgattttgagagcgttagttttgatactccgagtcttgcttacttaaaatacaaagatgttattccatatgggtatccaattgttaatctcaactccattgttgaagctaggctcactcttcctagggaagtagagtacgactattggcttaacagatctgctgatccttcgaatttgattagagggctaaaaaatgttgagattctgagcatcaaggttcttcatacgatggacgtaagtgttcttgatatgtatgtgcagcttaaaaaataaaagagcatgaggataagttgtatctaggaaccattgagattgccgactaatttgtttatcttttctgttccagctgttattttataacttcaaggaagcagtcccagtgtttgaaaacttgattcatttgtcggttaccagtgaagcagatttctgttgggatcctctgcaaattctgcttgagaaatctccaaatctaaagactctcaccattgaggtatgaccaaaagttcattggacagactaaagaactcatatagagtcagatatacttgtcaagtatctcaaaaattttcatgtctttttcagggtcccttgcactataatttttatgaaaaactggatttggaagctgtttgcgaatgtttgttggggtattctttcctgttgtcctgccctattaaggtcctcaagataaccgagttcgtaggagatatcggagagatagtgcaaatgaaacatgtcttggggaaattgccgtgtcttgagctgttggaagttcatgttcaggcaagaagagatgacaaaaagctgcagatcatggcggatctcttaatgcttcccagaacttcatccaaatgcaaggtcaaggtccatttctcttgagaaaactatgaacaaactctattcttttgcctcaacatgaacttccatatctgatgagagagtaacaaaagtgctttacttttgttgacaacatgagaactggtttgttttgtatattttcatatctgatattgttgaatcgaacacagattggttttttcttttgttatctttaactagtcatgtcgttttttcttgcctaaaacgagagtttgtaagagagaggctaatctacattagttctattattgccaagaatgaaagagagaatttatcaaatacgttaagcaaacacagaacctcgtttgttttctttacattgatgaactatataaatctttagagatatgttaatttaaatctccttttaatttctgggaacaattttatagaaaacaggaaagctt

SEQ ID NO: 1436 - DNA, 96892 bp, Arabidopsis thaliana
aggaagatggtaagctaagttgggagatatgtttgtgtcagaagttgactcatggccagtccccactttttctttatatcttcaaccccaagttactttctcacttctcatctctgaatcattagggttttcgtttctttaccaacaaaagatagttgagatgttgtattcggacgagaacacgtcagtttctaaggtgttctattatcaatcactaccataaacattgcttaaagttatgggaaacaagaaagaataaatttggagaatgcaacaacaagtaggtgaaagcccatcttcagaccaaaaagactcatcaataatctgtaaaaaacttatgttttaaatcccataaacacatcaattcaaattcctgaagaagaaaaagcctgaggttaaacactgcacctgggaatcaatttccttaaatctttactcaaaagatgaggctcctcttcagcttctgcttcttcttcttcatgatcatctttaccgcaagtgagtcctgtatattcatttttgcccgcacattaacttacttttcttactctctgattttctttttttcacagctgcttatgatccattagatcctagtggtaacattacaatcaaatgggatattatgtcctggacggcagatggctatgtggtaagaatcctctgcacttgtgcgtgagtgtatatatgcttgaaactggcacaaactctcatcatctctatacattctgtgcatttgcaggctacggtaactatgaacaacttccaaatctaccggcacatacaaaaccctggttggacattaggttggacatgggcaaagaaagaggtgatttggtcaatggttggtgcacaaacaacagaacaaggagactgttccaagtttaagggaaatgtacctcattgctgtaagaaaacccctacagttgttgatctcttgccaggtgtgccttataatcaacagttctcaaactgttgcaaaggaggtgtaattggagcttggggtcaagatccatcagccgctgtatcccagtttcaggttagtgctggtttagctggaactacaaacaagactgtcaagcttcctaagaacttcactttgcttggtcccggccctggttacacttgcggtcctgccaaaatcgtgccctctaccgtttttctcacaactgacaaacggcgaaaaacacaagctttgagtaagcaatcaatcaaaaaccttaacttgttccatcatcgaaatctaaacatcaatttcaaacttatgtttctgcagtgacatggaatgttacctgcacatactcacagtttttagcaagaaagcatccaagctgttgtgtctccttctcttctttctacaacgacaccataactccttgcccgtcttgtgcctgtggctgcgagaacaaaaagagctgcgtcaagtgagtaacaaatcattgaaatccaaactctttcttagatatcctctgaaaaaatatcaatatgaatgttttcttgcagggctgattctaagattctaaccaagaaaggtctcaacacaccaaaaaaggacaacactcctttgttgcaatgcacacatcacatgtgccctgttagagtccactggcacgttaaaactaactacaaagactattggcgagtgaagatagcaatcacaaatttcaattaccggatgaatcatacactctggactttagcaattcagcatccaaatctcaacaatgtgactcaagttttcagctttgactacaaaccagtctctccttacggatccataagtaaataaatacctccctcaaccacaactattcaacttcaaaccaaccattgaatgactaataacattcttaaatctttttgatacagatgatactggaatgttctatggaacgaagttttacaatgatttattaatggaagctggaccttcagggaatgtgcaatcagaggttttgctacagaaagatcaaaagacttttactttcaagcaaggttgggcttttcctagaaaagtttactttaatggtgatgaatgtatgttacctccaccagattcatacccttttctaccaaactctgcacaagggaactttgcttcgttctcactcaccattcttcttctcctattcatctcaatatggtgatttgatctgatccttctgggttttaaaacactgaaccagaactgttttttgtaaactcattgcaaagattgtaaaagaaaaaaaggagttttgtgagaggaaatgattagagatgtgcaaggcttttttaccttgatcactgccattgatcaatgactctgtacttcttggctttttgctttggtactaatgtgaaagtgaagcatattgatttgattgagaaagtggcaaaacaacgaaatgtttttaattgggctcaaataaacgcattttgaatccagcccaataaaggcctggtttaacattcacgcgtttcaatagattcgcgtgtgtattattttcgttggtctgaaaaggcaaaaggtcaaaaacggcgttttgtttgggagacactttttgttcgaagatattttctcattctctgatctctctgtccgaaacggctccgttaattttaaagtaaatattccaaaataagtttatgtcaaggctagtctttttgaaaataagatcagaattttacctatatatatatatttatttatcaaaaaaagtagacactacttacaaagattagtattatcaacgagtaatacaaaatggtttgcaagttaatttaattaaaaacaaaaaactaagattgctaaaatacagtatttgtgaacaagttgaactaaaatctagaagccagtcccgcacggtggcttttaagcccaaatcaatgcccctttgattgagagatctgaaatttaggactcaaaaagtttgttgctgaccaaacgcgaaactttgattaaaaacgcgtttgcgttttaaaattctcctgtgtttgtgtatgtgtggaaaattaatttcttctcccgacgaatcccaaaagtttgttgaaatttgcctccaagaaatctgcaattagaaatttcatttcgccgtcatcgtcttcttcttctgattctgattaattccagatgtcttcctgagtcttacggagattaggtcattttcgcctcgactcgaactctgtctcgcagcttccgtgagagagtcatggacacgccaccgacttctcgtatcgcatcttttggtcagacggagattaactgggacaagtacgttcttcattttcctcctcaatttccatcgattgatccgcttgttttctagttttgattgattctctgtggcgttgttgttattagtccgaactttgtttattgttgtttcgatccagtttttgtgattctgtgattggtttcttcggtggatttatcgacatgaaatggatatcgctcgttgttttgacggaatcatttcgtggaggtaattgaagatttccgaatttattggaaagaatctggttctcgggctcctgagaagctcgatttcagaaattgatttggtgcagaagatttgttcgctagtgttaatcaaatctttgtttaggtaaaagatctagtaggcatttggatagttttagtgttccttattcttacggtataatctgaggtcctacgtctaaggtttttggaaatgtgtgatgagtagggccaaaacaaacttgaaaccattacaaatttggttgtaagatttccgagaggtacctgaagaatcatacaacaaataatatcttcatactagctctaattatttttgctctctctccttcttttatcttgcagacttgacaaaaggaggttctacattaatggagctggcctcttcactggtgttacagtagctctgtatcctgtatccgttgtgaaaacaaggcttcaagttgcttctaaagagattgctgagagaagtgccttttctgtagttaaaggaattttaaagaatgatggtgttcctggtctgtaccgaggttttggtactgtcattacaggtgctgtacctgcaagaatcatatttctaactgctcttgagaccactaagatttctgcttttaagttggttgcacctttggagttaagtgaacctacacaagccgccattgcaaatggaattgctggcatgacagcatctcttttctcacaggctgtgtttgtcccaattgatgttgtatgtattatatacaacactaccgctttgtaagatttgtaaatgctgtgaatgttctatcactatgagttgctgaaaaccatatttctcctattttctgcaggttagccaaaagttgatggtacaaggatactcaggtcatgctacatatactggtggtatcgatgttgccacaaaaatcattaagtcatatggtgtaaggggattatacagagggtttggtctgtctgttatgacctattctccttcaagtgccgcttggtgggctagctatggatcaagccaacgtgttatctggaggttagccatgaatgttctagttaattgatgatagtttccattttagtttgattgcaagaacttgcatttcagtcgttcctggaatttggatttgctaccaaagctacaattccgctgatacaatatctgctactgttgggcagattcttaggttatggtggtgactcggatgcaactgctgctcctagtaagtcaaaaattgttatggtccaggctgctggaggaattattgctggtgcaacagcatcctcaattacaacaccattagacacaatcaaaacgcgactgcaggtataaagtgttcccattcatagtaaaaacttgattttattttgcatttactttttttaactctaatgaatatagaagagcttccgtgcctgctgtcctggttctcaaatagataacttcgggtattgctacatagaaactatgctaaacaaacggtaaaatctctgtgcaggtcatgggacatcaagaaaatagaccttcagcgaaacaagtggtgaaaaaactgctagcagaagatggctggaaaggattctataggggtttgggcccaagattctttagcatgtcggcttggggaacctcgatgatattgacttacgaatacttaagtaagagttcttttcttttatacccaaaatctcactttgagccactctcaaaaccaaccaagattcttcttttgaaatgctagctgctcctctgacatgtttcactctttcatggtttttttttccagagcgtctgtgtgcaatagaagattagaaagcttcactactgttcgttggtttttctccttctactaactcgagtagacggcatcaccttgattcaaatctcggctattgggagcttccatgttgacaattggaccattctttcaactttgaagtctgagttccgttattgtaatcattctttcaacttaatttgcgtattggagtgtattcttacagcagaagaaattctagcttacgttcttctgctttatgtagcttctgagatttaagaagcttcaaaacaatgcaatcacttcatgaaatcttatagtcgtacggatgtacgtgttatcgtaacagtcaaaatttgagttgttgcaaatggcttctcatttgcataactgtcttcacaaagtatcctcattcttaggatatcagccaaagctaacctctggtcattctcattgatagcaatataatcatcatcaaacctctggtcattctcattgatagcgacatatacatcatcaagtactttattataactatgatcattctcattgatgctgtgtctcttagcaaaaaaaaggccactagccataggctaacaccaaatcaccaagagcgcttactgggttttattttagctcatatacgtaaatctattactccagttcctaagatttaagagtgtttattatcctaaacaaaaagccaccgatatatctaattgttattcaaaatcagataaaataaaataaatcgtatatatacgaaaagtttcaagataaacaagaaaagtagttagtatttgaccttttttagtttatttcctcgtagcaggctcatttttttcccctctctgactcagcagattaatttctccattaggataataacttaaatatttccggagacttaaatattcttacaacgtctttatcaacaaaaacaaaattcttgaatagcgatctcttttcttttaattaaaaaaaaagactttaaaaatgaggataaaatcaaatataataatgcattattgatagtaacttaaacatgcatggagctcttaattatttttgggagacttttagatatttatgaaataaaataaagtgtagatgttttaaaaataaaaataaaataaagtgtcgatcacctaccgacctatacgtgcatgtattctcgtttatacgatagttacatgatttatgcaataatcatagacgacgtgcatcgacgagcggcccacgaccacgacgtaaggattacggtccacgtcgtaaggattacgttttaaatttatagtttatcaattgtatatcgtaaataataaatttagaatgactgagaatttgttgagaaatgaaaatattagagaatttatcgaatgattcgaatctaaagcgaataataatttttttgatgatttatgtccttttgtttcgtcgacatttatgatttaagtcctagcatatactatattgtacttattaccttatacaatacgatttgtatatatacgaactttaactaaaaataaagttaaatgttgaagagtttaagacactaccatagctcccccacatccacatgcactatttcttcgtaacatatcaaattaaaaccatgcatttattaagttgtcagttaaggaaacaaaaagttgtgaatgtatttgattttaatttattttttcagtttttttcttttaggtagaaagaatgaaaccttagttttgtacataataaaaaccttactatcttacattccagtcaacaaattaaatacagtgagtacattttgttagatatacgttcatttcattagcacatacgttatatacttatatagtaatcataatcataaaactgtacatatgaatttatttggttgcaaaataaagttagcttcaatcaattataataaatgcttcactattttagagttttggtttatttaggggtatttaaatctaaataaaactgaaaatgaagcaaaagcaaacttaaattaaagtacatcttttattgggtccgaaaaactgaaattaaatttcgtagtagtcttaaatgattttgacctttttaaataatatattcaaatgtgtttcaaacacgaatcaaactataccaaaaaaaaaaaaaaagttggataaaaaataaaacctgactacacctcaactttggatcaaaatctatgaatatattttcaaaattatcttagtcaaattttaaattaattaattatttatataaaatttaataattatcataaccttggattaaatttatctacagtcaaaaattaattttaaatcaattaattaatagcattattacaatccctaattgtacgggacgaataaaaaagtagaaaactcaagttcctttctttaccatacagctttttcgattggagttgaataagtcttcatctgacacgtgtaaccctggcacatgccgtccactaaaacacgtgcgagatctgtataaatcaaacctacgcgtttcatctctcttttcaaaactcaccgacgcgatccgatctcatctctctcatttcgaaaccatggttgagccggcgaatactgttggtcttccggtgaacccgactccgttgctgaaagatgagctcgatatcgtgattccgactatcagaaacctcgatttcctcgagatgtggaggccttttcttcagccttaccatctgatcatcgtccaggacggagatccatcgaagaagatccatgtccctgaaggttacgactacgagctctacaacaggaacgacattaaccgaatcctcggacctaaggcttcttgtatctcgtttaaggattctgcttgtcgatgctttgggtacatggtgtctaagaagaagtatatcttcaccattgatgacgattgcttcgtaagttacttgaattttgagttttgtattcgtttttatgcttgatttgagagttttgtcaattttggttctagatctgtttttttgagcttatttgtttgtgtttgtgtggatttttcaagttcattgcttgaatttcgtagatttggtgagagatcaattatacgattcactaaatttgacggatcttaggtttgtgagataatccttggttcgattagctaggcaattcaatgttttgtaccagatccatagatctgcttgttgagtctgaatatgttttcacttttgtgtaattagccatgatctctaatgtttacttgtagattttctgtgagctgatgtctcttttgttgacgacattgttgttgagctgatatctctgagtcattatagctacctttacgatatggttgcacgtccttgttcatcacttttttcttttgttttacctttttgagatttgtggggcatatccaaggatgagtctcgatgacgcttgtgtttagtttataattttctgagttttttttggaggaactctttgatcaatggcttgatctggattttaaccgctttttaattcatgtatttctttgatgtgtacatgtaggttgccaaggatccatcaggcaaagcagtgaacgctcttgagcaacacatcaagaaccttctctgcccatcgtctccctttttcttcaacaccttgtatgatccttaccgtgaaggtgctgatttcgtccgtggataccctttcagtctccgtgaaggtgtttccactgctgtttcccatggtctttggctcaacatccctgactacgatgccccgacccaactcgtgaagcctaaggagaggaacaccaggtgacaataattatcatcataacatgtttatgtgtttttttgtcaggatattcaaatgtcagtttttgctaaacgtttgatatgtcaggtatgtggatgctgtcatgaccatcccaaagggaacacttttcccaatgtgtggtatgaacttggcttttgaccgtgatttgattggcccggctatgtactttggtctcatgggtgatggtcagcctattggtcgttacgacgatatgtgggctggttggtgcatcaaggtaatttcttcttattcccttgtaagactcataattgagtatagctaaatatgaagcacatgctctgtactaagcgatacctccatttggggttgaatcttttataggtgatctgtgaccacttgagcttgggagtgaagaccggtttaccgtatatctaccacagcaaagcgagcaacccttttgttaacctgaagaaggaatacaagggaatcttctggcaggaggagatcattccgttcttccagaacgcaaagctatcgaaagaagcagtaactgttcagcaatgctacattgagctctcaaagatggtcaaggagaagttgagctccttagacccgtactttgacaagcttgcagatgccatggttacatggattgaagcttgggatgagcttaacccaccagcagccagtggcaaagcttgagagcagtatgagccaaaaagaaaaagccaccaaagttttggttatttttagctcaaattatcgttacttttaaatttctgattttacgaacctttcttgctttttttacacatttgagtagttttcatcatcagtactttctcattgtccggttatggtttttgcatttggtttaaatatcaccggtttatttataaacagtggtggattagtagtactattttctgagtttttttctttgtttcattaataaaaaggccttttcataggtgtttgcaattagtttttttcccccattaatcatcgattatcataggtatgttatggctttaaatggtataaggaaattgcttatagaccaaaaaaaagttgaattgctattgagagagcttttacaaaagaaagagcattgttcaataagcttttcacatttggtcgatattttgatcaacctatcataggtatctcaattaataaaccggaatgttaatatgttttgcaagatatccctacaatcaaaccgtgaagacccgacccggttgcgcaagatccattttcctacttggttaaatggtcaagcccattaaccatactataggcctgttgccattttcgaccgacctctctatttctacttactacttaaagaagcaagaggagacgtagaggttcatacagggtttaaaaacaagagcaagtcaccatgatgatagcaagaaatcagtccaagaagttgaagacggagaacaattcacaaactttgcaaactcgaaggaagggaacaaatatgtcgttccttttgacctagtgatcgagattccgtagctaggtctgtcctcttatccaaggtatgggggaaaatagtccgcagtagacttttcatgacatctttcccgtttacgtcactgtcgtctcagcctgatcgtctcttcgttgttttcattgatttcattaatatcttacgttttttgcggtgattcctcttttgtggaaaagtattatcaccatataaaccagttggattcactttatgtgatgctggcactatattgtttatgcctctcatctcaagttctcaactattctttttgcggtttcctcatttcgtgatgagattcttagacattgcatgtgtattgtgcttttcttcttcttatcaagaaccaactttgttcaaattagattctcaaagtgggctttcttttagcatctacgcgattgtgtggttgactacttttcttttaagtataatttcatagttttgttttatttcattttagtatatacagtactacaactgtgtagttaacttactacagtagcatgtatttcatttgaccaaaactttggtatatcaattaacgtttttactttttactttttactttttacactcctggtttacccaattttgtgcaaaatgatgcttatccatgaagaccggacccggttatgtaagatccacgaggtttattacgttcggatctgctcctttatctccatttctcagctggggtagagagagagatctagggtttcgaaagaagagcgatcgatcatgagaagacgcagcaaaaagatcaaaaccgagaacaacagcaatccagaaacgtcggaagagagaaacaagtttgatgaaatccctcatgacctagtgatcgagatacttgaaagattgcctttgaaatctgtagccaggtttctcacagtatccaagttatgggcaacaactatacgcagtccagatttcagaaaatcttaccggggtggatcttcgtcggagcctcgtaccctaatcgtttccgacctaaattttaaggaaccaaacccaaagttgcatttcttcaggccgtctatatcatcaccgtcttttctatcaagtctgacatgtccgttcacatatcctcggcacgaagagtactattatcatcatgttaatggattgataagcgttggatatggtacagaccaaatcgtaattaaccccacgactggaaaattcataactttaccaagacccaaaacaaggagaaagctcgtaataagttttttcgggtatgattcagtgagtgatcaatacaaagtgttgtgcatgacggaaagactgcgtggccatccagaagaagcatcatctcaacatcaagtgtacacattgggagctaaacagaaatcatggaaaatgattaattgtagcatccctcaccgtccttggtcgtggaacgccgtgtgcataaatggtgttgtgtattacattgctaaaacgggggagggtatgtttcgtcggtgcttaatgagatttgatttgaagtctgacaatttggatctttgcactattttacctgaagagattcaaacaagtctacatgattactttttgatcaactacaaggggaaagtagccatacccaatcaacctaatttctatacatatgatgtgtgggttatgaatcaggaaggtggaaaaattgaatggttgaagaatataactttcactattaaacctcggaagggttttgttcgttatctattcgtcacaggcactactcatacgggtgagtttattttggcaccaacgtcctataccgatgagttttatgtcttccattacaatcccgacatgaatagttttagaaagataagggttcaagcacccggagttaagtttagttttgctcagaaagcttcagttgttttttcggatcacgtagagagtgtttggttgttgtaggagagacatggttttgatacccataatcatcagtatcgaaccttggaagagtttattgcgtttggataatttacacattagaggctctactcatacggctacgggagagtttattttggcaccacggttctattctgatgatcttaatgttatccatttcaatcccgacacgaatagttttagaagcactaaggttgaagtatacgaagactatgagtgaaagcgtcatggtacaagagcaatggtttttcgggattacgtagtcttaagtttttctaggagagacagtttcatgttttgatacctatcgtatttgaaatgtttgcattgatagacccttttttagggaaatttttgtcacttcattgcttaatttagttaaaccagttggatttgtctactttcttttctccttttacaactattatttatttcatctgttttaggacatgctttatatgaatgaatcatttatcatttatcaatcatttagtatctaaaagagtttatgctctttgatatatctacgaagaataatactaaggtgggagtcaatgtttgaaatattgataagccggaagacgtaagtaagggcttgattggttctccctctgccacccgcaaacgctgcgtttgcgggtgatagcggttattagcggttggcaccaatcatagaaaccgctagataccgcttcggaccgctcgaaatcgccagatttcaaaagctccttcccgcaagcatttgcggttgcgggcggtagcggttaagttaaaaaaaaatattaattaattaaaataattatgtcttccacccaaaccttatacttattcttatcagaaaaccctaatcaatgaaaccctattctctcaattatggcatccacccaaactgacaaaaatcaaagtcaaaatcaagaatcaaacgtacgtatgatctatcctttcatccattcattagctagtgtaattctcggaatatttcatggcatcgttgtttttttttattttgtttttttttgagttttttgattgaatacatgttttgatttgttttctcgattagaaaatcatttggtcaaacgagaccacatttgcgttacttcaacgggttattgtggagaaataaacggaagaatccaaagaccccaaaatcagatttctaagtgatgttcaaaaagaaaatattcttaagaatattaacgtttggaaaaaatttgagttggagatgtgttaaaaatcgtttggatatcttgaagaaactttatcatatgtatagaggcaatccggaaaacccgcgagttcaacgttatttacagtttatcacactacttgatgcaatttttggtgatgtaccaaatgcataaagtattaaactttttcttacaaaatttatttatttttgaatttttagttttatttatggttttaattattaagtatgtttaatttttcaaatattatcaatttatcataataatatattgtattttttttcttttaatagtaatatattatatttattttggttattttttatttaattactatcgcacccgctggtttaccagtcataaaactcccgcaaacgcacccataaccaaacgctcaaccagtcgttcaaaacacttgataacgcttgaaaccgcaaccgcccgtttccgcaaactcccgcaaccgcaaccgcacccgctgcgtttaaaccagtcaggccctaagtgatgcatcttgactaaataaaatttatgttaaattacaaaagttgtcgatataacagccgatttgtctatactactaaggccaggacttagtagttgcgttgattcctctatatcatgtgtatgtccgttcccatatcaggtaccattctcattatgttaataacttgattgtggtcaaaagcaaatcataattttaatgactttattaaagtatgaatccaataactcgagatttatgaagattttaaattacattttacaaatcaaaatctaataacattaaactttaacagagtcttataaaatcttaattgaataacacaagattttttaacatttcaagtcactaaaaatccatataaatcacaaaccaataacaccttttagttaaaaatacagaaatccaaatctcatggtttaaggtgagatttgaattaattttacaaaaatcatatgaacttccctaaaattatcaaaatcatttaaaaactcaagaaactcaaatcactttaaattctaatttgaatacacgccctttctaagtttcaatataaaagagcacttgcttttccggattacgtagagagtcttaggtgtttagtaggagaggcagtttcatggcgttgatctctcttttttaactttggttgattactctattgattacttactcttatttcacaaacaatcttacctctttttataaaatcattcggactttgtctccttgcttctggggtattattgacactatagtttctgtctaccaaaacgagttcgtgataacattattatacatatgaaaagaggtcatgatttaatcctcaacccaatcccacaaaaggtataaagatgcatatatatacgtgaagacgggacccgggtacgtaaatccactttaccagtcgggtatagatatgtaggttcaaaaaaagcgcattggttataccttgtctccatatttataagttttaaattattactatatactcagctggaaaaaaagcatacaaaagacagagaaatctagggtttcgaaaccagagcgatcgatcatgatgagaagacgcaacaaaaagaccaaaaccgtgatcagcaatccagaaacgttggaagagagaaacaagtttgatgaaatccctcatgacctagtgatcgagattcttgggagattgcctgccaaatctgtagctaggtttctcacagtatccaagttatgggcaactagtatccgcagtctagatttcatcaaatcttacccgcttggatcttcgtcgaagcctcgtaccttagttgcttctagtgaaccagatctcaatatggaacaccacgaatgatacttcttctcgcagtcttcctcatcaacgtctcttgtatcacgtgtgagtgtgacatgtccgctcccatattactatgatcatcactaatatcatcatgttaatgggttgataatcattggacatggtccagagcaagtcgtggctaaccctagcacaggtcgaaccatacctttaccaagagtcaaaaccaggagaacgatagcaacaagttttttcgggtatgattctgttagtgatcaatacaaagtgttgtgtatgacggtaaaagcgtatggtgatctgagggatgagtcatctcaacatcaagtattcacattgggagctaaaaagaaatcattcagaatgatagatactagtattattcctcaccgtccttgctctaacggtgtgtgcatagatagtgttgtgtattatgttgctaaaacgggggcgggaatgttgcatctatgcataatgagatttgacttgagttctgaaatattggatctttttactagtttgcctcaagagattcgacctccaagttgaattattgagaatttgataaactacgaggggaaactagccataccaacggaaactacttcatatacatatgttgtgtgggttatagatcaggattctgaaaaacatgaatgcttgaagaaattaactttcagtattgaaccagcttggaagaattcatttgttaatctacgcctcataggctacactactcatacgtgtgagtttattttgcatcaccacactataattatgagatttatgtctcccattgcaatcccgacacgaatagttttagacgcactaaggttgaagcatccgcagcgttcaagtttccttttataagagcaatggtttttccggattacgtagagagtgttaggatgttgtaggagaggcagtttcatgctgtataatactctctttataaaactttagcacttataaagagagtattcattcgacgactctaatgtacaaaatcgaggatgtaattgtacattacaattcacgattacaattcacgactatacgtgcacattacaattcacgattttggttgacttcactatctattagttctttatgttttcacaatttcacagaaaaaaactctgatcataataaagtaacaaataaaactttccttcttacatgtctggaatacattggactctactaaccgcgatcatacaagttagttgctacgacaccaaactattcacacacagacacattgcttctttaaaacttctggaaagcatacaaattaccaaaaataaattcaaaactttactgaaaatgttacatgtttgcgatcgttgtgacaaaaggtaccaatcttctgtaatctcttcttcctagagcgcaattatcaagaacccgacccaacattagccttgtgttctgtaaagccacatctctcggaggtatccctgactctgccgcagctgcaccaagagggaaaggttgcgacattgttgcagccatcattgcgtactgaagaggtccgcttcgggctttaaatgaagtctgaggtacaagcgttttctcatcagtcccgttttcagagtaactcgaatcctgagggtgggatccaccggtgcccccttgtaccgggctgcagctctgaagaagagcttcgagaacactcaatgcctcccaacacagagtgctttcgactagctgtgaaacaattgtgtacatgtggggactctgcgaagcatccatgggagtgtgttggagcaatgccttgagcataagtaatatgactcgttggtaatccactggtcctttttttagcagtcttaacaagtgaccgaaagctaaagctgagtgtttcgggaaccatttgttgcagagcagaggagagacacatgcaaggagattttcaactcttttaatctcgccacgagcatatgcgacaaaaacagtcgctaattcatcgagtgattttgcccgacaccagacagcaatgttagatgccacagaacatgccttttgatattgctgctggagtggtaacgcagaaaccatgacttggtcttgggtcagctgcaagcaaagccaaggaagtagacctgtgatatgcataaggagtcttgtctcagcatcgccaaatatagagtcacatgaaggcactgtaatccttgataggacctcaatagagaactcgtggctaacagtagacatcagtcctttgaggacaagaggttgtacaccttcgaactttggaagagttccacttgacggcggcatctcgtaccctctagattctgacctttggaattcccccaaatcattagtgttgaattcatcccgaggcatacttgacaagagtacattttcagttgttttgtcacgaaatgatagccggtcaataatacgggagaagagctcaagaacctggcaatagacatggacgaagtctgtgtgcatcatggcgacacagccccagaagagctgtgggtagagtatgactttctctggctccatgttctctaccatgacctgtagcgtcagaaggatttccataataaaacccaaaactggaggaatgggattgctaagacatcgatgaagacagcgtagaagggagacacatgcatcacttgtcacacttgggcgtagcgcacggtatatttggtgtgaccgacatgctagatgtcttgacgtgcattccatagcccatttgagagcttcagttccccaagtttctcgaagatctccttggaagaatatagcatcaaccatactctgaacaagtgcagacaaaagagcggcactaggaagatctgttctcacaaccgttggatcttcattctcccacatcatgcttcctcgttttgattgcacatacttaattaaactcacaacctgttgtttgttctctccatcgctgttttccacctcatatagctccaaatgccgacccgctagtgagtacaataaattcacaagtaaatgttgacaatgctctagcacaatgtcttcagagctatccatcgaaacaaaagtgacgtggaagagcaaaggcagatgttccctaaaatcttcatcattctcatatgcgatttctgcaagaagaatcagagctatgtcagcatgagtgagtgagtgctgttgatgtccctgcaaggctgattgaagttcctttgcattgacgccgtgcattgcgatccctgaatgcaacacatcttctccagaatttggtgtatctatgaggtaatctccgctatcacgtgagacatggcgactcctcaaacttcctgtagagctacgaactcccattaaaggtcctgatgcattcaccaatgatggcaggagctgaccagaacgaccagtagctacaggaacaatattcaactcaggaggcattggacttaaaggcccagaagcacttcgcccagtcatccctgctgttctccagcttaggcttccacttgtattcctaaggggaccatcaagggagcctctgacaagaagtggtgacatatgtggttggctgtctgcaactgaaacaacttgaggtgctgtggcaggtccctgagagaactccagcacaaagtttccattggaatcaccccggtttgcactataaccaatgggttcaatactgtcttccagcatccgctgtgacagttggtaaaccaggtgatcaatagtacgctgaggacatattcgtgcgaggtacaaacttacacgcttagcaactgaaaaatatgtagcaaatgcaccagttatttcggcagatgcatttgaatcacagtcctcaattccctttgtgatcaagaaatccaatacagggctgatgtttctgggcttactagcaatggtactccaaagtttttcaatttcatcagggaattgatccccgtgtcgccatgtcacatagtaaagactttttagtaatctttcactccaacccgaatccttgagtttccagaaattaaggttctcaatccatggagccatacaggtcaagacctgatgctgagcaattatatcaacagcatcaagctgacgctgcataatttcttcacaaagcagctggcttaactccggatgatccttggcgagtttgcaggagagcttgtattggaactgttgatatgaatctggaagattacctacaactgctgctctatagcctcctgaaccttctataccatcctcagcccactcacgcatagaaagtgtctcaagcatttgaagagcatcatcgcgaatttgtctagatggatcgactaccttgtagagaattagacttaagagcctctggatttcacattttggtatttcttgtcgcatgtaaacctcagccaacacactgaagtacccatcagctatagccgcatcagagtagtaacactgggaaaagtacagatgaattaggtcatgcagtttagaagagtctaatcaaggatgtagtcaaacagatgagcaaagcatagaagtgaaaaaagcttattaagagaattcagatgcttaaactggagctaataaaacaaaactatctgatacggaaccatcactgcatggataagttgtcatcattggtcaagatttatcaaacatctgacctagtaattaccaagacgacagtataattaaacacaacttccatgcattcagtcagatagaacattacctgatcaatgcaggcaggaaagagatccaagtttgtaagtagaagattcttcagggccaattttgccaacgcaacacgttgatgaccacctctatgcctatcacgacctgttgtccctcgtccaccttctcccgtgtatttggagtaagatggagttcttggatcagcaggcgagtaaccaaaagggaccctgggagcaggctcaatgaacaaactatttatccaagatatcacacggccgctcatttttcttgcattgtcatcaaaacacggtccataaagaagggaagccattgcattcaatgaggcccactggatggcttcaatttgctcattcagttccttgtcaaaagaaatcttgtctacagaatctttggaccggttatgctgtgaggtcttatagcgctctacttcacggcgataatcactaacaccatcctgtccccacgtatttccagtgtcatcggaccaggaaagaagcagatcgaatagacgtttcctacttctaacatcaaacttctctgattttgattcaacaaattcaggggcaaggaatcttaaaacagacgcaagtgcatatcgcagaggctgcatgtcctgaaagctttcatgaggtgccaacgatatttgtcttgttgaatcttcaatgaaccgcagataatggaggcggaaaactggtttacgagcaagcattccaggccagacattctcagacactgttcgatatatattagagacatgaacacggaggtcctctcttcgacctcctttttggatctgcattcatatcataggaacacatcgttttagcgtcaagtctcaatattaatcacccagctgtaaatcaatgtaacaaaaatggtgaagaggaatccaacggtcattaatttcatattcagggaaaaacttagtaattcgacatccgtagcagcccatgtgtgagaaaatactggatacttccgttccctcaactctaatgattcaaaatgaagctcaataaagacacatagaggtacaaataatggcaatgacttctagtacttttcatccatgagatttcccttacttgttctcccctttttttattcatttgcttaggtaagttttgtaatgaatctatagtgataatgagtacaaccgtaaatctgtgcagcccagcagcatagtgaatgctgtaggatttccaggtataattctgaaagaaagtattctacattgttttacaatttgacaagtatataccttccactttggcttcgtctctgtctctgatgaaatctcctccatgaaagatgcaagctcgctaaacataatttcacatgcttccaaatgagagcgcccgagagccatagttgcagcatgctacatgcaaggaagtataacgtaaagattgtaaaaacttatctaggagaaaaaattcaaccaaaaccacattaacctaacaagacaagtaggtttaaaagactgacaaaactaccaacttcagactaaaaatgcagagacacaaaaacaacttacgttgtgggtctctgacccaaatctaagataagggaaaataaggtggtacatgtctctggttgatgcaatgctacccgcatctttgccatcaggtggacacgaacacacaaacatagcatacagaagccattgatccagtttgttatctgtatcttgtgactggtttgcctttccaccaaactcaacaggtgtaatatgggccaggcggtgcataatttcagacctggaaatgaaaagggcactttagtttccttcatgttattaagaatagcaaaagagttatggcaataaaatgagacaaaaaaattcttcctaaattttaaaattcccacagtaaagtgaaatttatttgcacgttatactagggcatgaattttactgaaggattgttgatccataaagcctactttacttttttaatctttatagactggtaggacagcgttgacggtcagagaagactcaagaaaacacaccaaggatgatgtagttaggaaaatatacttggagcaaacacactaaagataatgcagctaagaaatatacttacttggcttcttgaacagagcgtgggcagagctcagcagcatatttaacaagctcgctgagacatcgaccccatttgtttttatcaaggctctcaaagataatggattgaagagtcacatcagaaggaatggcatcggaatctcgtcttaaatcaaaaggacgggcagaatcccaatagcaactttgaacaatatcatcctattatgtgaaagaaataaaggatacaaatcttaattttctataaagccagacggttttaaaccataatcaaccaaaaggctaaaaagcctctgaaatggtgagatctacacagaagctacttaccccatgttcttccaagacatcgatcatgtatatgggttcagcttcaaatttcataacatggtctgggtgctcttgaatcatgagatcccgaatatcatttctcaaagcacgtacacatcgtaataattctagggcagtgtgccgaatctgactgtcgactgaactaagaaatattagcccaacagcatcaatatcagaagcgcgaaactcaattgcatctgctgcttgatgaaaagataatttcttgaacctatcatttccctttgctgttttgttttcttcttcagcatcagtatcttgtctgtcatctactaaacaagccctccagaaacgcatgagttccaacagacgtcctagtgatgcttgaatgaggagtgggaattcatcaggaagctttaagatgaagtttgccattcctctcatgactgcaaaacgacgatgaggaaggtatctaacaatccggttcaggacttgcactgcttccactcgaactccaggatcaatacttataccatgctgaggtattatttccgtgatcttatcactccggccaacttcctcaatcagataaggtatgcacttcagcactgactggaagagagatccttgagacttttctttattcacagcatctgcatataacatgaaggttagcgaaaagtgttttcggaaagtaacagccaggggatcctaggtagaaaatcaaaaataatatcacacttaaatacacacaacatataaagatttcttaacctcctcacaaaaccatgtaaatcagactaagctttttgcgtaaaactaagtttaccgattgtagtcctcgatgatgttagaagagcttgactgtaggtcctgtggcaggatcttaaaattgactcaattgctgctttcacctttggtatgtaatggcctatcccatgacctattaagtgaacactaagaaaagttaagtgtatgaaaggaaaagcttattgagacctactaacaacctaattcaggttaacgggttacccttaaatatctccaacccaacatactggcttgaaggcgacataacaagggcaagtaaagcacggagaccaataatctttgcttcgcttggactatcttgctttaacagttctagtaacatgtgattcatagcaaagtcaaggttatgttcagctatggtcacacagaactcaacgagtttatcttgctggacatcctgagtgagcattccttttctcagaactgttagcaattgtgatgtcacactatccaagtaatcccatatacgatttggtggctgggacgaagcatagacactcaaataaaacctcaacacccggtgaagacaatcaagtgccatgtagcgatggttcttatcctgcatataaggcgcaaaattctctataatgaccaagaacaagcttgaaaaagaacaatgaagtcacaggtgctcaacatacttgaaaaaaaataagctgctgcagttacaactgcacatcagggtttgggacgtgataattggttccatgcattcttacttaatttaaattacgaatacaggcaaacttactctcagaagcttgtacagttgttccatgtgagagcttaaattatgatgaaatataagcgggtcaccgagacagagaagaagactcacaagcggatagccaacctattcatccaattatacatgttaaggactgtaatcacaaggtaggcatacaaaagtgatactaaatcagattgacgtacaccaagatgtttactctgtttctccatccactggattagctgcactctgatgcgtccaacagcctcataccagagtgtcagtgcaggttctgcaactgaaggaggccactggcttttgccaccatcggaaagtggcgccaagatgttagagagcatattgcaaagcgcatgataaagctcacttttacgtttgtgtatatcccggataagagggtttgcttttgctacaaaggaggcagacgcattcagcccaccctcactcttaacctgtaaataaacatactgtcacgttcactttctgaagcctgccttttctaagatatctgagacataccccaagcttcaagtaacgcatcccattaatgatgctgagagtttcacttcttgcaacgcttgtatcaatccggcgagtattgagttccatgaaaaacctctccgtgacagagctgaatctgttagtgaaaattaaataaatggataagagtggttgtggcttaaaatagatcatcactttcacaaattcttttctgccaactaaacttgtgaatggaagtccacatattcttttcatttatactttagcatgcttggaggattgataacttacaaaatgaattacctaatacgggacagtgcacccaggagttgagcaaccaagtcaagaaggagacccctcaaatcgaccagcgatgggtattccacttggctaacaaccctgtaacggagaagcacccagaacttagaaattcaggtttttacaactcgaaaaaggaatgccaaaggataaaagaagtgtttagcgaatcatataaaattcaaccgttccagattctgaaatcactacctgtcagcgttgattagccaatcaaaaacaaagttctcaagtccagaccatagcttctctgccattcacgagagatgttcttcttttagcaaggcagtaaccacattttgttgaaaagaatctaaaaagagagactaacaaaccagtgagcccttcctgcgggcaacactccacaaagcgaatgcaagctgagcagaagatgcactcaacagccaactgattccagtaatgtaaaaccatattttagaaagttgaaaaccaatatcgaaaattgattaaataagccattaaaatattagggttcataaatggaggtaagagtactaagaaacagagaagtaagagtaaaacagtctggtcagttggatctagtgtacatagttaccaaaaccccgaggaattgttcctatgaagagtcgaaagaaaatacctttctctggaaagtcgaggcatcatttgcacctttaggtgattcactgcaagccacaaacaaacacaatattagtaatggtctagagaagtggcttcacccaatcatagataacatctagtcaataaattcacctatacgaagaaaaagtgataatccacataagaattatgataatgcaccaaagagtccaaaagaaacactgaaacatagaagatcaatgactcaaacctaaaaataatgcaagatgtagaaataatagcctcgtgggagacaaggtcttctagacgtatttcatacagacaagagtcagataccatctaattgttaagagagagaaataacaatatacccacctttccctccatctaagaagagcttctaaaagaggaacaggtgtatgacgggcaatcatagccaatgaatccaacacctgctcataagcaggatctgatggacgaaggtactgtccatcctgcaaacatcataccaagaaccacatcactaccaaagagctatttaagaacaaatacgtatactagtcagtaagctacagtcggaacagcggcatttccaattcaatgtaatacttccagtaaaccgtactcaagactaagtttcaactactgagaatgaaactatctaatttgcagataccaactccttagagcactgaaaacttaaactacctgactctatatggattcaaatgtgtgttaaaaaaaaaaaaaaaggcttattgagaaggagaggaacctgagcctgagctgtctcgattcgtcgtcttgcgagaggcaggaaacgctgaagaagcgcttctactatcaatttcgcagcactcccagacttcatcacgttcagcaagaatagatcctcaaaagcgaaatgtcctctaaattaaattaagaaaaattcaacaataagatttatagacccgaatcgaacagaatacgagactgaatctcgtgaaattttcccagaaataatgagaaataccaaaggagagcaccacgaatcacgaaatcattctagggtttagttcgtcgatccggcaagagaatcgctaagaaatttctttgatcgacgacgagcttcctcgttcctcttttcttatttgtttttgttttcaatatattttttttgtttcttttttttttctgaaaagtgtttaacgttaagatgtttaataaaaatcatttgttaactaacaacatttaaggtagattcaattaaataaaacaaacaaaatacaacaagtagtacagtatagtatcaatctcgggatcttttgtctgaaactaattatatttttgtcaacgtctcgaaagtaaattagagaagctatatagattttttgttttttcatttcgcataattgacaaaaaatttacaagactattaattaccatgcttattttctttggattggctgatttttgaggtataaactatttcgattctcagctttcactcccagacttttgggcccttaaatttccaccatcaactttcatattcctcaaaattacatcatctactttcgaattcatgcttaaacatacattttcaattgaaccattcatttaaccgggattaacaacaaatctgcgtttactgtaccgcgattgcgattaacccgactaatacccagacccattaagaaaacgacgtcgttttcatttcgtttaactcatcaaaaagagaaagaaaacgacgtcgttttcattcttctttaactctcaaatcgatttggtcgttcttctttaatctcgacactgtgaaattagggttcttgagagagaaagacaaaaggggatttggagttttcttcttcgattcgaattattgggtttcgatttgggtttcgaatagggagaaatgaagaattggtgggaggaaggattgatttaccaaagcgatccagatgaccccgatttcgaacctccagagagtgacattgaagccgacgatggaagtgatagtggtgatagcggagtcgaggaggacgaagccaccggagttgagggagacgacgttgggatagatggagacagagaatctgatggagaggagaatagagaagacgatggtgacatagcgtctgatggagacgtcaatctagaagacgatggagacagagatgaaagtcaaaagaagaggacgagagaagagaaaagaaaggaggaagaggctgaagaaggtcaaaagaagaagagaaaacagaagaaggatgagccggaagaagatttggccgagaggtttgagttcgagatagaggaagcagtagctatgtggtatgatgagttaaagattagaaggaacgaaataccagaaagtaataatgaagaagaagatcatgtgatcactagagataagaagattaggttagcttcggatgataggttagctataggcagaacattcttcactggttttgaattcaaagaggttgtcttgcattatgcaatgaagcataggataaatgctaaacaaaataggtgggaaaaggataaaattagctttagatgtgctcaaaggaaggagtgtgaatggtatgtctatgcctcatactctcacgagaggcaattgtgggttttgaagaccaaatgtctggatcattcttgtacttctaatggaaaatgcaagctgttgaagaggaaagtgattggtagattgtttatggataagctaaggttgcagcctaatttcatgcctcttgacattcagaggcatatcaaggagcaatggaagctagttagtactattggacaagtgcaagatggaagacttctagctcttaagtggctgaaagaagaatatgcccaacagtttgcacaccttcgaggctatgtggcagaaatcttgagtacaaacaaaggatcaactgcaattgttgataccattagggatgcaaacgagaatgatgtcttcaaccggatttatgtttgtcttggagcaatgaagaatgtgttttacttctgtaggcctctcattgggatagatggaacgtttttgaagcatgcggttaagggatgtctgttcactgctatagctcatgatgcgaacaaccaaatctatccagtggcgtgggcaactgttcagtctaagaatgcagacaattggctctggtttttgaatcagctgaagcatgacttggaactaaaggatggcagtggctatgtggtcatatcagatcgttgcaaggttagtattatcttatgtctaattgtttaattatgtatagatgatagtgctttatagatgctaatgtgtttgtatttgacaggggattattagtgctgtcaagaagaagaatcaagagattaaggtttgtttctgttttaggctgctgtttggttagccattttggtgctcatgtttgaatgttgtttctgttttaggaggctggaacatctcagcctacaatggagctccaagaaacaacacatggagctgatacaatcacactcactcagagaagcagtcaatgggatcaatcggaccagttggactagttctagttctcaatcctcttttgtctattttggaacaatcttaacaatcttcatcctcttttgtctattttggatgatgtattattcggttaatgtttaggatgttctttatcctcttgaggctttgtaggatgatgtattattcggttaatgttttggatgttctttatccctcttttgtatggattcttatctattcttatgttatgcatcgattcacattagacaaagacacataagacataacatagatagattcacaaaccctccatcgtttaatctcgacacttacacaatccaaaacaaagacaaacatagccaaacccctacaagcttcaaaacagagactaatccaatactacaatttcactccaaaacctcaacaacacctacactcttccccaaagccatacaatagatgcaacaatcacaacagcaacccctacagtcttcaaagctgactttgccatgacatgtcctacctagctcttccacattctccttcatggtcaagagttcaccctccatcttcttaatcagctcttcctccatctgcttagcgtttttattaaggagctccatattaaccatcacgttcattctgaggtcactaatattctctgcaactctcttacacttctcatttaccatcttaatttcgtccaagagagcttcatcaacccatttgaacaagtgctcttcattttctctctataaaacagaatttccaatcatttactccttcaatcaatcaaatatatcacaaaatcgaaaggtgtaccttcattgctatcgcacaacggtagaatctccggtatggattctcctttgttttcgatgtgaatgtaatgatctcttctccacaccaacatttcgaggggacaccaggaggacagacacgaaatcctgaactggaagcggatgagtagtagctgttggtgctcattttcttataaaattgtcgaatgaagaaccctaatcgactaaatcgattttgcagaagaagaagaatgaaaacgacgtcgttttctttctctttttgatgagttaaacgaaatgaaaacgacgtcgttttcttaacaggtctgagtattagtcgggttaatcgcaatcgcggtacagtaaacgcggatttgtggttaatctcggttaaatgaatggttcaattggaaatgtatgtttaagcatgaatccgaaagtagatgatgtaattttaggaatatgaaagttgatggtggaaatttaaggatccaaaagtccgaaggtgaaaactgagaatcgaaatagtttatggctcgaaaatcagccaacccattttcttttaataagtctgtggatgtgttggcaaaattggtttaagcgatttgtcgctttaatgcttatgagccggtacgtttccgttgagctgatgattacagattttgattttagagatttgcaatttgtgttgaagaaatgaagtggtttccgacgtttattaccatagccttaagctgttatttctttgtggagcttcgattagtttttccagctaaaattccaagaaaatacatgtccgattttattatcggtggtgatcttttaccggaattgttgctctgacggcgaaggatgttatcggaatactttggttactcatctaacacgtgttatgttgttgacacgttcttaaggatggagtcaaattgaagttttcttcttgcatcgacatttctcttttgggtctgatagatcttgttaacatctgtaatcgggcttttgaagtccattttgtatgtttggtttgtttaatacaatatattacacttatgggaaaaaaaacaaaaaaaaaaacagacgtgttacatatatattttcaatctatattttctgtgaaaaaatggcttccaccaattcagtttctcagttaatagtagtaatccatttcgtatagtgaacaccagtcaaggcttgtggtacagttcttgctattctacagtgtaccgacgggtttacacatgacatcaaatagtttctaaccaacttccggtactcccaaaccgggatttctctcagatcagaagctacaactctcatctcaggaggtttcattaagcttcgtcagcacaagtaaattcaaaggatttcttctactccttctctctgtctgcgtctctgtatacaaaacccagcagcttttcttttgttctggcccttgcaagaagtttgtctttcttctcgtccatctaacacgtacagctcaagccttggggttgatactatgttctgaaagaatattgtttcttgagagcttcagagatgtctgagaatcttagtggaagacattactttctttatcagttgaagaaataaggtgaatctaacaccacttttaaatccaaatctcctcgttctggcagaggaggaaagtctaaatgaggaaacgattgctcaaagctctccagcaactgttaaaaagggaacaaaaaacaaactcagttcatgaagcagtcttctacatgccatatatactgaaccatttgaacatatgacacttacattctctagtatcggttgtgaatacagctcaacaaacttttcccgtagtattatgtttagtttatccacatcacacgcatgcgtccaaaaagagtcatgaactcctgttagaataatttttacatgccatgtgttaattgacacaaagaccaaggttaagaagaagatggaggtccaaaagatttaacttgtgaaaaaaaggacagaacctgcaaaacacacgcctgctcttttacaggcaaccgcagtcatcatcatatgagacccatccagggagtgaataaaatttggaggaaaagctgtcctttgtcgcctcacaatgacctacaaaagcccacgaaactcttttaggaataggcctctgcatcgtactctgtttccttacttatcttttgtttctatgtaaaaccaaggtaaagtggaagcagacctgatcagtttcatgctgaagcgatagggtctggagggatgtctttacctgcattcattttgatagaaagtgaaaacagtcacattcagattcaacagacgagagtaatggtgtcagtgataacttttaggaagacttacgagttttgttcccatttggtggtaaggttgtacaacaggaagacccaatggggttgtccatcgaactgtttcattttctgaagcaataatctgctcatgaaaattattaaggattattaaaagtccaaaagcatatttaattgacgctggaaaaaagtctacacaccttcgcacattcaccaaaccaacgcatgatggcgcgtgcagcttgaaacatctcatctatagcagctaatgttacctgccccaaacataacaaaacaaaagattatcccctcatagcatttttacttttgagaagtttccaacgtacatgagaactagaaagtagtaattaatcatttgttaaagcacacgcgttctttgaagattagatgaaggaaattgccaaattaagattttctagtgccagtgctttatctgttgctaatatacctttgctgcatagcaagcagccccaaaaacttctttttcatcaccaaaatcacttcgttccttcaaccttctctttatttgatcccgagcgccaatgtaggtgacaccatagactgatgtcataaccgtctgctttacaagcttacgatccacctacagattttgaacaaccgtcaacaagttgtatcagctgaccagttatgtgaatgagtaaacaatgtacccaaacaaaacagatatcaggcaacttgctcacatgccaatactactacatatacattagaacggttcattaaaatttattggtgatttaacaatgttttttgaggatgtaatgtatgagatttctactccactatgcaagcacggaagcggaaaccgagaaacacaaggttaggacaatggaaaaagaatgaaaagaatttcatacggacctggttaagtaattttcttgcacgcaatgcctctggaaaaacttcaggatctctgtctgcatctcggcgcataatatcaagaaccctgcaggtatatgcatatgaaattttgaatggacatttatttactcgattaaacttaagttagctttaagcagtagatgcagagcttacctggtagctattcctgaataaacatctgccggcttctcacctgcaactagattaacagcttctgctcctaactgataatcatcttataaaaccataatcagtaaagaaagatgacaagcagccaacaaaaagaaccatagaagattaaaaacaagagaattactgtgtctctcccaagagcggcataatgctgtaaaccattgcaggaaccatcctggccagaaccaaagtgaaggaagggaagttcatttgaagaaacacacagattgaacgagaaactacaacgtaaagtcaaaaaaaaattgaagccttcaggagaagatgccaaagtggcaacttctaccagaaagtacctgatgtataggaatatgtgacagaactgtctctggggatgggcttctcagagcttcagtcagacttatgcagacagccaagcactgaaatgggtcttcagcctgcagccaccatctgcttccttcaagtggtctgtctgccgaatcaaatatgtcatccaagtgattttcagtgaaagctagccgtccatcaagtgataacttatctacaccaccagcatacaagtttgctaagtgtatcttcagccagcgtaagcctgaaattcccataggccttccctcagcaaactccaaaacaccccgacacaaatcagagccaagatgatttaagtgtgggggcatgggatatgcacgaccccggaagtccatattgtggggatagtaaaaagcttcctcatctttcattttccgtgctacctgctcacatttaaacagttatgaacagaactctcaaactggcacattactttaataacaaggcggataaagctcaccgaaagcttgagttctgtgtcacatcgctgagaatgtctctcgctgttcacctttttagcagatttgacttcccacttccatttcttaagaatgccctcatcttcagtatccggcttttctggtaaaggaacctgcagtttgaaattaaagaattaaagaggcctcgtgatgcacaagggatagaaaatatgtctgcgccaacaataactaatgtcaaactgttgtacagatgaaaaacagtagccattataagatcaaagtaacacatggagtaactcacatcactccgatccaccatatcagcaacacatccgccactgctccatatcctatctacaaccgttaagactcgcttatttactctccatttagtacttccaagcgtatccagggcctaaaaatgtccataatatatttacagaaattaaaactgtaactgattcccacataacgcacgtgaagaaacattaatcttctacctcaaagactggttgtagttgtcctttaggtgcgctcttaagtgcctctctttgttgcttggctccatgagttttcattatataagacgtcaagaacaagtaagcacctttgtcatatctgcgaaacacaaaataaaagtgaaatgacttacataagtttcaccaaaagtaaagtattacaagcatcttatgaagaaatgttgacagttctcgaagctatacaaatctaaatttcctttctcttaaacttagatagataagctttaaggtttctgtcttctctgagtaactaagctggccacaaaagaatgtacatttttaatcatactgaattcattttggaatttatgtttgagataccatgcaatgcaattatttaatcatttggggtaagtatacagcaaagaaagctcatttaccccgaccatttgagaggaggaaccagcattggcatgtatggcatcactgcatatctcccctgcaccacaaagaaaaaagcgacattcacatttccaacaatatatagattagatgtctcagttataccttagtcttcaaatcccagaaatatttaatctaatttacaggggctacccaagtcaaaccctctttagatataacattcgacaaaatgaccataataaatgactccgagctctgaaaaagagtcaacactatttttgtcgattttgggttaaatttgttctgataacaaacaaaacgcgaatagatcacctacacttttttccaagcctttgcggaccaaagggtcacactcgattacaccatattttctcccagaattcctgttgtacaagaaagactggaatatgagcctatgacattcagggcaagaagataagcctagttgaaagtcatagaccgaaatttctcacatgcttcctttcgctaccttgaaggtatgcacaaatgcaggtcggacatcaggcagatcattatcctgctgatcagctggagactgtatataagctgttcttacgagtaactctattagacgacttccaacctggaatatatattagaaaatatcaaaatattagcaacttatgcagccaacataatctttctacctctccaacaattttgcagccaagcataaacagaccttagccctaacatctgcgatccatggtttcgtatagtcatgtgactgcaagatctttctaactgctgacaacttctgtttctttatcaactcattgaccttttttcttaacttatcttgttccttcatagaagtttcattttcaactcccccactctcctcattgtcatccccttttttcttcttatccaagaatgtgcatattcttatctatcaattcacatagagaaaaacaacaccattagaatacaaaccatccaaaacaccatagagaagatcaagacaatcaaggaaccctaaaggctaataatacaagagaaaatattacttcacacctccatataaaggttgtttttatatgattaattacaactgtaacatgctaaaatgaaggagttccattcacaaatagtgaatattttatcaatatcatgttccacatattaaagcaatcggttttgctttaagatcaggctaacagttccagtatccagctatggtatacatagagtttaatcctcaatggtttaggttcactagtgagggaaacagtttaagagatcaaatttcccactataccggcaaaccaagaaaattaccggcagatgatatgatataattatataaacaaagtagaaaccagatcaagatgaagctacccaacctcttgttcaatggcatcgcctactgtacacgcagcatgaacaaccttaacacaaccgttatcaccaccagtcatcaaatgccccatcaacttgtgcattgtaataacagatatcttgtcggcaggcaactgatcaaggtaatgtgcataagttgctttgctcttccctaatctatacaactcctggtctttagcaattgcatctcttaatggttcgaaccaacccagaaataaagacttcacataaggcagattaggcgcaagcttttgctcacacatatctgtcaaaagctccatgtactctgcagcagctctttcccattcttcagtctcgatcttaacttgtcttctccataaattctggaacttggtacgacccattccaaattggtcttgcttcttcatccgccacgaacgatgactttctctcttcttctctttcttcatctccttcaacaattcatctacctcaggctcttcctcaacatctgttgataagacctcctcttcggctacactcgtgtaccctctagccaaagtcccactaaggcacctctcgctcttggaaaactcctctcgcctcgtgatcccacttaaacaacgaaaaccctttccgtgacatggtgatcccaagaccggaaaccgaaagctcaaatttttcgagaaaatagactccggagaagacacaagaaggccacgagtttgggaactgacgtttaatctagcagctgacctcgaaattgcttgtttagcaatgtttctccacatggggaaggattgggaaactgggtttggagaagaaataaagggtttatgcaatggaatcaagtgatcgaataccttagtctgatttgccaagaacagtggggtttgagcactggacatcaatcgaacttaaaaattgagtaaaatcgataaaccagaacaataaccaactcgagattgaataaattcgatcgcatgagcaaagaaaaatggcaaattgggaagagtttcatagacggaagaaaataaaaacaaatggtgagtgaagcgtacacgacgaagccgccttaaaccctcgcttaaaaacccttgctttcttaagcctctgttttttttttctgggttgtctctgtttctcacatgtcaaacaattaaaaaataaattaaaaatatctaccctaaattcgacccgtataggaggatcttacccgacccgggaagtatctgattaaggcctctaataacggcccaaagtctctttactatgcaaaaaggcttgacgaatttatggagcccaattagttaaatatatatatacaaaatgaattttattatagtttcttctattatttttaccatttcatacaactttttagtggaacccaattaatcaacaacaaaaaaaggtggaacccaattacaatgccgaatataattaaaatatttagatttttgtatgaataattcacttggattttatttttttggtcaacaatatcaatttgtgttaataataattattctagtctattatttgtaaataaatttggactaaaaatctatttttcttgggatgtgtcgactagtggttgggttgctagttgtgtttcaccaatgataactcacacctgattattcgctccaaatttgatcgtttccacctcatagttttaatatattaccatttaaccccttaacttttgtctgagaagtaacaagcctgatttgtttcctttcctcggaactgaagctacaaagaaattgtattaggtctctctctctatctctctcttcttcgtgttactaaaaaggacgaagcttgttgcataatatgttgaggtaaattactaattactgatccaaagttcgaatctttgctccaactccaggctagctgattgcgtagcttccgattgatttctacctgagttttgagttcctttgtggccacttcgttgttcttctgctgggttttttgctcgaggatctgatacttctgtttggtcgatgatcgagtgatcttcgttgggttttggggatctaagtcgtctatatagctaatggtttggatttgagtttgaatggagcgtttaggattttggggattgctaatgggtagtgtggaaaagtcattggattctggaaattcgttggcttgctctgcatctgctaagaatggagacgaagagagtagtacttcatcgaagcaagtttcaccattgaagggttctgggtcgagaaatactagtcctttaggtcgagttgggtcgagaaacacgagtccttctaggcagaaagtggtgaagacgaagcctcgtggtctagaggaagaaacagttgcttcatttggtaaacaagttgttgctgatgtgcagatggaagatggtatatgggcaatgcttccagaggatttgctcaatgagattttagctagggttccaccgtttatgatatttcgaatccggtctgtttgtaaaaaatggaacttgattcttcaggataatagttttctcaagtttcactcaaatgtgtcatctcatgggccttgtcttctcactttctggaagaactcgccgcagattccgcaatgctcagtttttagtttgccattgaagacatggtacaaaattccattcacgtttttgcctccatgggctttttggttggttggttcttcaggtggtctcgtttgtttttcgggtcttgatggtctaactttcagaactttagtatgcaatcctctgatgcagagttggaggactctaccgagtatgcactataaccaacaaaggcaattgattatggtcgtggatcgctcagacaaatcgttcaaagtcatagccacaagtgatatatacggggataagtcacttcctactgaagtttatgattccaaaactgacaaatggtccttacatcagataatgcctgcggtgaacttatgctcctcgaaaatggcttattgtgattcccggttatatctagaaactctttcgcctcttggtttgatgatgtatcggcttgattcagggcaatgggaacacattccagctaaattcccgagatctttgttggatggttacttagttgctggaactcagaagagattgtttctcgtgggaaggattggcctctacagtactctccaaagcatgagaatatgggagcttgatcacacaaaggtctcttgggtagagataagtagaatgccaccaaagtacttccgagcacttctgagactttcggctgagaggttcgagtgttttggacaagataatttgatctgctttacgtcttggaatcaaggaaaaggtcttctatacaatgtggataagaaaatttggtcttggatttccggttgtgctcttcagtcatgcaacagccaagtgtgcttttatgagccaagatttgatgcatctgtcctctgaacaataagttatcgtctgtctcacatcattcttgaaaacttacaagttcgccagcaaaacatgtcagaaatatgaaatcaaagagggtttgatgtgtaccttcagtgttaatgaagacctggtcagcaatgatatgcttcaccaatggttaacaatatcgaggagaaaaactgtaagataaacttgtttctagctttctgtaaattagcattcactcgatatgaaaactttctcaatatcccctgtctcgtccgcgtgaaatatatatacacttaattttagtttcctgtgctgaattttccttttctatatcgtaaatttaagcttctctttgcaaatagtgactgctagttcaagaatatcttgttggctaacacttatgagaatgagaaagttttaagttataacattggaatatagatgtgatcttaaacatttgggcaattggtacatacaaatcccatacttaatgtcttctaactagaaactagaaaaccgaggagactcttgaaatggggaggtaatctagctttgagatacatttctctacaatttagctaattcatagacactgatagggtaggagtagtttgcagacttgctgaaggtattgtgagctattattttgttggcagtttctgttggatgaaatgcatcccaaaagacatattgattcctatccaagcaaggttgctgcaatggaaggcatgttaaggctcctccatatctcccgttaccgcagcacgcttcgtttgatactacaagacctgcaaaaagaagaactaaaactcagtactgatatatagaaataagagtaaacccttataaatagggattgaggtcattttaccatatctagaaggattcacaaccatatcatgaaatagatcaaagacgttttgatagacaaagaaagatcctggcagagttgtgttgagagtatttgctagatctttcagacggctattgaacattgaaaccatattgttgatttttgtcacacacccgctggtgttgttgccagttaccatagatagctgactaggtatgcaacctaatggtcctgacccagctaacaccatttttcttgcacctaagttgtatagtctctgcaaaatgtttgtaaaagaacacagttttcactttctgagtatgagatgaatatctgcatcactattgtcaattttgtactaagagatgatgggagagtcataaaagatcattgacttacggatatttgagctgagagagtcttgatcaagagatctgcataatcttctccactgtaggtttggctggtggagtatctctcaggcataaggtagttgttgatatagtcattgcttcctatattgatcccaattatcgattttgcaagatactttctcagatctgcagggttttgaaagaaacgccggaggcgtaactcgatcgtaatctcaaactgcgatatctgtccattaaatgtagttcttgctccctggaaaaacagaggtaaatgaacctatatgtaagaagaagaaaaggttttaaaatctttattatgaaagagtttaagttgcttgaccctcacataatgtcgaccggtttcatctaaaatcccagctgctgcagatgcgtagttaacccctcgtaaggcattttgcccaatggataaaggagataagtatggtggcaccaatggcaagccgaggtacgttgctacattacgacaaaattgtgagaaagttaagttaaaaattgtgaaaccaatattatgatctttagtctttagctgtacctccataatcaacaacggtacggccattgcagaaacgaccagtggggaagccaaaatcaattccataagggaaataattagctcgtgcaagagttggaatgtaattgttgtttccactatcaactaaagaatctccaaagacaaagaaagctggagcaagaggttgatgatctctagattggccattgcctaaccagacaagctctaacaacacaagacaaatcaacaaacttttcatgcttggttactatctttatctctttctctgttttgagttctttgagataagcttatgaagaaaacaacgctactacatatctttatggtgatatagaaagagacatggttacgtgacataagagaccgtgtttggttcagaggaactggtcgtggtaaatgatctcatggagtgtagtggttaactgttactgttctgaaagatttgtattttttctttttctcatttactgcttcttttattttcttactctattcgtcttctttttgatagagacagctttaagaaaaagccaacctctaaacctccttatttcgtaaatatgtttactagtcattgatggttttgctcatagcttctgaattctgattgaaatataaaagtgaccactctgttatgtaatgatggtttttcagatgtgtctaaaccggcttatagtttatgataaccggatggatgtagctagtgtaatgggcccttatttgagggctgaatcttcgggtttaggtgaattttcatgatccatctatgtttcattagttaatatcatttgggattagtattttgtacttcctacgaatattaacagctagagtatcatttgaaaacgttagttaaatgcatagtaggattattttttataacaaaagtattaaatttgtgaaggttttcaaggaacggaccagaatcggagaactcgtcctcgtgtctcaaaaagaatatatcaatttcgatgtcactacaataataaggtacaatatatttcattagaaatggtccaacaaagcatatcatttagcaaatcgatggtcaagggatctttcttgggtaaaatacaaaaacaaaaaagatcagacttatttagaaaccctaagcaaccaatgttattagttttcaatcaagcaactaatcaagcttttcattataaagatagctttgaaatttatatatcaactcggaaatatttcaagaaaatatgtgtgactgcaaataatcattcccaaatgaaacaagagttgattcgaaataaatgaaaaagcaatttcctatcgtgaaaaatgtctccagtttttcgaaacagttatgtggaatatggatgatgttttagtttctcaataaaatacttctttagttaataaacctcctttgcaattaccaaggagaagtatctttttgtcggaaaaccctagctagcctcttgtttctacaaattctataacatccctatatttgtataatatcgaaatcaaggtcaagtattgaagaactgataaatactttacaaaagcaacgcaactacttttcagtacaaacgaccaaggatataatatgaagaagacgagtttgaagttaatgaccctcgttttagggttttgcttcgtcatttatcttcttcaagggcctcgaggtttgaatctactcattcttttgatggtcatatgatgttgatgttgatgatgatgatgatgatgaagatgcatatacatatactgtttacttgcatggttctaatatccttgaatatgatatatgtttcttctcttcgtacatgcatttatgtaattgttgcattctcacaagatccatcgttttagaataaaactttaaatatgttagtgagttacaaattttattttaagacctgtagtcttaacaattatatttataaatgtaggcggttcgagaaatggagatctcttgatagcacgaaaggtaatgacacatatcgaaagttttgagttaaattaatatttggttttatgtttgatcattttcattttaggattcagttatttgtcagagaatcaacgttgattcagctatccatattggaacaattttaaaaatgaatcatcatcaatatcttcttcttagatttggtctattttccgcagttgatatctctggaaccgattgaaacaaaaaatgcagcgagatcgttgaaagattcaatatcaacagatttagaggaagaggttgatcgtctgatggagcacgaatatccttcaccagtaaagccgaggaaaagaactccggttcacaatggcgtgcgtaatcgtcactaattgacccttgttctattgttctttcaattagtagtttaataagtttggtaaaatcataaaatggacgtatcctgtaatgctgaatattagtatattacttatacaaagactttatcaactatttggagtgcttgtattttttgagatttaaaaaaaaatctcattgttttggagatatttaaaattttcgaaattagtatattccacttacatatacttgtatataaatattgttttatcattctttgtacttcttaaatagatcggaaaactagatcataacccgtgttatacagcacggacattaatattttgtataaattaaattgtatactttgtttgaattacataagaaatagtatagtataaaagtgatgccataatatttttcaatgttttactatttacatataatgcattagattgactttgtttaaaaatgttattgttataataaatacaacatatgtagttttaagtaaatgtgtaaaatttgtatagaagttattttggtaagaaacatgtttcctttgtattagaggatctaatttttggtctaatttagaattagtttttgtatagtattttggttatatttgtggacctaattggggcctatattagattatctttaatagggctgacgaaaaaacggacccgataaccaactcaatactcgaaccaaaaaatcgggttagggcgggttaaaattttaggaaatttccttattgggtagagttttagtaaacccgtggatatccgattggaccggaaattacccgttatctaaaaagagtattcaaaaacccaaacattaatttaatatccaaaatattaattatatgatattattttatttgattttaaatatatagtaaaatgcgagttgtatatgttttcttgatattatttatattgtttagtgtttaaaattatacacttgtattttgattgttaattttagagtttcacctgtaatataccatcttatattaatatcgatttaaacccgtcaattctaggattttccagcttgtattaaaaattgaatcacatcatacacataaaaaaatctaatatgttattaattattgttgtatataagattataaattcttaaaataatatgcatgaaattgaatataatatttaaattatgacccagtacttagtaataaattttcttaaatctatttttgacccgttataatattttttcatgtattgaacagtttatattcgtttttaaaagtttaaattatggcatatgcgaaaaaactctaattatttttttataacgatgatattattttttcgcaaaaatagaatcatataaagatgagaggtgaactataataattaataaaaaattaatatgataatttagatatcaaatctaatttgttgattttaattggttaattttttggaaattaataatgtatttcattttttaatgaaatttaattaattaaattagtatttgactttttaatttttaaagagatgaattaatttactctttaaattttatttctaatggcatacctatgtaattacttaaaaaaataaggttatatttaaaatgtatttcccaaataatatagtaggataaaagtgttttgtcatggaagtagtgttaattactttgaattacatttcacacgagaatacgttaacaaaaacatagttttatgacatttctctaacttttttggaattaaatgtggacatacattacttgtatatattttgatgaaaaaaataaagcaaaccaagttggatttggtcaagtcgtcagttctgaactatatcgaataagaaaactcaattatttattatcattttgcataccaacttgaagtacaacttttttcttcatttttatgtctttgggtcatgcttcaaaagttcaaatcattcacctaaacaaataaaaaggtaatataaactccatggtttagcaataactctcattttgtatcaaaattagttaaacaactgtgcaagagagcttaaaatatcacatgtgaactaaacaaaatagcttaaaggataaaattattagaagatactattttagtaaagataaaatgtgaataatatatgggctaaatttataatgctaaaaagtattaagcctaccaaaaagtaatagttacaaattaaatatttcagaataaaatgattttattaaacgcgcttttaaagcgaacaaatattctttcggaccaaaaaaaaaaaaggaggaagaaaaaaatgttggagttagctctgtttctttgttcatcagtttactttatggacgaggtcctcatgtagatttgactttgtttcaaagcggaggaagaaggagaaggcaacactaaaagatcaaaaccttagatctttgcttacgctttcgcctggttaggtaagtgtttaagaatgttcaatggctttatgctgctcctaggattttgattttgcaattctcttggttggtaaaaaaggcttctgggtgtttttccttcttatttcgagatttgatcgaacccacttgatttctatcttgattagttggttttactagtgttacagaacaatttgtgattttgggctttgattctctgcgaatatagttgcgtgttagctctagggtatcttctagcaaaccaaaagtgggatctttggtttatcatggagatctcgatccaatttcggttagaattcaaagaaggaaaaaattgaatctttgagaagcttttgttattgagttaattcagtgatgatcctatgcttgtgatgtgtgaaaatgtttttgttgcttgtccttgtcttttgtataaatcactgagtagcttcgtttagtgtctcaccaatgatttaaccttggtttgctagtttactgaacatggagtacaatgtctagatggagttggaattgtatgtctagtaataatgtgtgtaatgcttcatgatgcaaaaccttgcttttgaattttttgtaggaacggtttttcagaaacaaaagattccatttttagattcaattcccttctggtttgaaaaatgatatcaaaatggtgaatagaagtgatttggtggtgattggcatctcggttgggcttgcacttggtctcttgctcgctctgcttttgttcttcgccataaaatggtactatggccgctctcacctcaggcgatgcgctaatgaacagaattccccgactctacctgttcacactgctaaaagaggtgtagtaatccctgatgatagagcaaacacagaatcgtcacagccacctgagaatggagcaccaactcaacatcagccatggtggaacaaccacaccaaagatctcactgtatctgcatccggcatacctagatataactacaagtgagtattcagtctgaagctttagtttgcgtgaatttgttattgggttgttgtagcttatggtctgaaacttctttagggatattcagaaagcaacacaaaatttcacaaccgttctaggacaaggatcttttggtcctgtctacaaagcggttatgcccaatggagaattagctgcagcgaaagttcatggctctaattcaagtcaaggagacagagagtttcaaaccgaggtaagtgtacagatccactcatttccctggtccatgcacaatggagataacagagcagtattggtttcttgtttccaggtatctttacttgggagactgcatcaccggaatcttgtgaacttgacaggatactgtgtcgataaaagtcaccggatgttgatctatgagttcatgagtaatggaagtttggagaatcttttgtatggcggtgagtcgtcctttgttttcttctatcaatataagacgcagcaagaaattaatcacaagattttctactttacttttcaggtgaaggaatgcaagtcttgaattgggaagagcggcttcaaatcgctcttgacatctcccacggcattgaataccttcacgaaggggccgtaccgccagttattcaccgtgatcttaagtcagcaaacattttgttagatcattccatgagagctaaggtaagagagcaaatatttaatacgcttactcaaaactgtttggttaaaccttataaaattttggttttttttttttcttgttggtataggtcgcggatttcgggttgtcgaaagagatggttttagatagaatgacttccggattgaagggtactcacggctacatggatccaacatacatttcgactaacaaatacacgatgaagagcgacatttacagtttcggtgtcatcattcttgagctcattactgcaatccatccccaacagaatctgatggaatacatcaacctggtaagttaaaatccctggtctatgcaaccaaaccgaataacccaaaaatctgaaattaaaacccaaatcgaaccaaaactcagtgagtgattgtgagatcaatgattctgtttttctgatgatcaggcttcgatgagtccagatggtatcgacgaaatactcgatcagaaactagtgggaaacgcaagcattgaagaagtgaggttactggcgaagattgcaaacaggtgtgtgcataagacaccaagaaaaagaccatctattggagaagtaacacagttcatactaaagatcaaacaaagtcggtctcgaggaagaagacaggacacgatgtcttcatcgtttggtgttggttatgaggaagatctgtcaagggttatgagcaggattaaggatcagcatgttgagttagggttattggctggtgttaaggaagagaatcatcaagagaggaacattgcaacaacatagtaactctttactttaggagtaagtctttttgtacatattaccacatgagtctcaaaagtaagatttctccctcttctgcaaaaagaaaagagtttttgcttgctgacaacaacaacaaaaatttgaggttatgttataaagactcttaacaaaagatatatctagttcttatttttgggttaagtttttgtgtacttttcaatccgaaaaatcattaccaacgttatagcatcattcataccatcatcatcataatagtcataacactaatctaaaaagtttgtaagaagaaggaattacaagttcactaagtactacttcataaacaatagacacctatattttgaaaccattaattaataatggtatcttcatcaacttttttgtgtacttgttgtgctgcgaaagctatgtgtctcggtggatccaacaatattaatattcaatcaataagcaattaaagggagttgttgacaaaaaaacaaaacaaagaaaaactttggagacatatcgaaacagctaaaacatcatgtcacataacttgtaatagcgatgtaaaatcctttaaagaaaccaataatcatactgaaatattgttgtatttgcaaggagatgattatagtgtcgataagatcaagaacctctacgaaatttgatgagtagccgacgaagtagaatttcttggatcaccccttgatatatttaaaccctattgaatatatcttggagcacttgtataattatcataatagttattttctctcttggatcactcgaatacacttgagactacatatattcatgctctttaaataatctgtattttctcgagatataataatggtttgatcttcttaaaataaatttgaaatgaacatcatgggttagtgagttagggtcattttccacttgctctatcacttctcaaaatgattgcaaaaatggaagtgttttggttggctttgaacttttgaacccaaagtagtttcaacatattaaataggtgaaaatttagtgatcttgcactaaccaatatataagaggagctgattccactctaggtgtttaggtaggtagtggagcatattgaataagttggtgaaaattagtgatcttatactaaaccaatataataatagtcacaaatttcataactaaaagttgacaaaaaataaacataatttttaaaaagatggatacaaaaagtaataaaatttcagttgaaaatctaaatttaagattttgtgtagtattgtattttcttttctgtttttgttatttataatgtctttatctaggcaaaatcgcttgaaaatattacgaaatttttatttaaataaaatactctcagacacctagctgctataaccgattctaagaagtagagcaatgttaattgagcaatctgataatgccattttagctatagagttttttttatcttttttatgtaaaacatattgggattgattttatcaagagagaaaaaaataatatgaaaaatatatatctgtaaccaaggtttaattacacaaaatggcacttattatttagctaacaaaactggcaaggccatggatgccaaactttacagtgtaagctttaatcaacattctaatctccatccatggaagctctttcagaaatctctacaccaagaacactaaataacttcaatctgtaaaactcactgtaaattcctctttcaagctgttctctcgccagtggtggagtcacattctcaaatgactctcaatggttcatctaacagctgcagacattcttgtgggttggcgtagaagtagtcttcttccttgggtctattgggaatcactaaccgtctcttagggcttcccattcgagtagagtgaaatgccttcaccgtggatgaaaatacatcccaactcaacaatccttcagtatactcatctatcagcttaactaggaacctcctattcagctggattgtcttcttgaaccccaagaatctggaaaaaatggtgtcagcctcgggatgataaatatgggaagaaagaagaagaaagataacggtatttcacctgcgatgaccttcaacaactcttgccatgttcccatcattggttggaacaaatatgtcgctctcaagtgccactaggtaatcaagtgcagccatttgagatgaatggttccggcaaaaatccagatcagaggattcgagtagggtttctttccggacctgagttagttaagataatggagtcaatggaagatataagtttgaaaaaattgcagaggctgaaatgacctacttaccacatttggaaaagcgtctgttaaagccttcatccgcctttgaccaccatagatttctccagcagctatgtaaatttgaacatttcggtcaatacccaacgcggtcagagtgagagcggtttcctcaggagttaaagggcaaaggccatctttcctcttcagctcagagtttatgactttctctttccaccatggataagcatatctgcaaacaaagagaatttacatcaatagatccatcaaagtcggaacaaaagcaggaagatttttcggggattttttatacctcattcttgttagttcttcttcttcctcggggttgcaaccatgtgaacaaccagaaaatgctaacatatccatctcatatctgagatgcaggacaagaaagggacctttctctctcagaatcttgactactcgtctacctaattcctcaatctgaggagtaaacttaagcccattgaaatttactcggcacctcagcttctgaacctccacaggcagtccattattagcaagtcgggtatccgttctgttcagatgtaaaaccttatgttttttcaccagtggaagaatctgtatccagatattatttagtttgaaaagaattagcaaactgatttaggtataaaaaccatagtgaagactaatctcgaacaaaaagaccaaacttggatgactaacctgattttggtagtaagacatgtttgaccaactaataggaggcatttcgtggtacactccaagctcaacccttttcttaagccttggaggtaactctttgagtatccgaacttcatctcttaacgaacttatgaagtgatccacatcgaatatgtctttaaactcactgccccgaagaagaaaacattgtaagagattgttgaatcggaaaataaaaaaaaacagagttcacaaagaagcttcaagtgagatacataccttggatcgttccaaaaagaggtcttgtcaagctccggcacaataagtgtaacattcatgtatcttgcaacggttaccatatcacatatctgtagaaagtagacgaaaaacaaagtaagcaaatctatcactagaagatgaaaccttgtaaagagatgttatttccaatggtttagttatcatcttacagctgctcgcatttgattgagtcctccattgcaggaaaccataagataaccattgttcacatatacccctgagaagaaaaaacaaagagcttagtttccagattcatctccaagaccaagtaaggtacattatccgattcaaccacaaatttcatcaatcaatgttctcaaaagaacttacttttaggtggaagagcaattttggtaggaagagacgtcatctctgcggcagtggacagttgatggtgattgaaacaagaaggccaacctttaaacaatcttggtccccacatctctcccaaagccatcaaatgaacaaaacagctccaaagcaacaatacagtaacagcacgaatcatccataagctcatacgaggcctcgaaacaaaagagttcttgagtttctcaactttgctctctcctaaaagcttaacattcatctcccatagtttcctgtggtaaagaaacttctccattttacacatttttctatatcacccaccaaccccactctcacagaagattctcacagttcccaaaacccctcagaggaatttcatcgaacacttaaagggtaagcctggaaaaactaaccacagcttaaaagactgcagatttaaaaggacaggaatgaaacaatataataggtttggtgctcaagcttttaattatcctctctaataacactcagagaaaatgtaatctccacacaaatctgtgagcattaatcacacctcgaaaaacccagatttttagttttaaagtagcccacgatgatctcgacttaataatctgactaaaacccagatcttgctctattaaataaaagaagaatctctctctctctctcaggttttaattaagagtcaactttcaactctcaattgatggaagctcacacttccagttacagaaaaaatgacacagagaaggctttgaaattcagcaatggcgatcgatcaaagtagccgtacaaaaaaaaaaatgggagacgagagtctccgtggagaaccggtcggtgttgaccggagaaggaagaagaaggacgtcggagaaatagggagaagatttcggtgtggagaaaaaaagagacaagaatgtgcaaatttcagaacttttttctaccaaggaggaaaaaaaaaagaagcagtctttaggtttcttcttttttgtcggcaaaaactggagtgtcatttataaactttttttttacagagaaatattttttgtaatattctttgcaatttaaaatatattttttgatacagagccaaagtagacctttaattaaatttataaaatacattgtattattttgctattagtggatatgtatagttatatacatacacttatatgtattttggataacttaaacaaggtacaaatttgaattttggttgaccaaatacattcaagctattttttaagttttattttccagagggataaattaatatatttggaagttaaataacagagtttcagttatatctaaaccacattagcaggttgcccctagactaactctgtcattaagcaaaactaatccacaagttaacttccagaaagtatttgacaagaaaataaaatcaaattacatatttaacatacataaatatgtgttaacccaatcattttcaagattggttgaaaaacgaaattaaattttatttgagttaactaataaaataaatttatcgataaatggaaattaatacggcaagattcattttctgtcggttctttataaaaataaaattaaaaaattgttcaaaagggcatattctagacttgtggatcgctcgttttgtgacagcaatgacaaagagagatccaaataaatattgaatatttggcaaataaataaaataaaaaagtaggcctacaatatactatataataattaaatatatatggatggaccaactctatttattgctcacagttgtcatttgtcaatctaaaataaaatatagaaaagtatgtggaagtgtattatgtttattgattaaaaagaattaaacgataaaaaggtccaaaacattagatcaaaacttaagctagctttgttaccttgatttcgactgaagtatggtataaatctggccccgagccgactgaactaacattttcagcattatgttattcgaaatttcgacagtatgataatgagtatatttaaaagaagcattatgtataattttgagagaagaaaagattgagcattttttagtatgttttttttttttagggtgaaaattggatctaaggatatttataggaaacaaatggatgaatacataagaaggaattaatatgtttcgtcatgaaccaagtaaccaacataaatagatacattttaaactttttataaaagcagccattaatagaagatggtcttttaaaattggatttgttttatttgcttttcaaattttatcacaattttgtcttgttcatagtttttaagaaaaatattaaccacaactttgtcttgttcatattttattttacaaaattggctaaaatcacattctatttatttatgagttttaaaatataaattagattttggtgatattcaatttataatattttaataaattttcagtagtctctctagaaatatacaagtttttttaatgtacctctaaatattttaaaatcaagaaaatcaatctagatatggttctttataagaaagtacacaagccaacaaacactcgtagtctcgtagatgtttttatcaagtatatatatatacattcattatactattttcaaatcgttggtaaatcaactgataatttttttttcctatccattatatataaaacaaatataaatatgtcgcctattacatcataaaatttgaggaagtaaaaaaaaaattgaaatttcaaacctatcaactaaattttctgatttaacagatttaatttatttttatttttttagtttaaaaaaactcattcattaaacatgtgaaagtgactaaccacgatgtctagctgtagcggcagtttaataaagctttaagcaatgatctcgctcgccggccaagtttagaaacaatgaaagatcaaattgaatgatttgttttcttttgtcattcgtgaagacaatttaaaaagatacacgtgtagatgtgaggttatgaacaggttattgttttaaaacacagcattatatcagccaatatatatcaatatatagacgatgttcggtccaaaaatctagatcaatctccttcatgtttgctattcgaaaatgattgttatttatatcaaatcgtgcgtgtaacatcgattgataaatattggaaatttaagtaaaggccaattgtcacgtaatgacttgaaagcatctccaatgtaattcagtatttatttcttttcacttgacgatagaagaatttgattagagatgagttacttattgagcgaattaatgtacgttattttctatgaccatatacattccaccgacatcggacattacactgctgtcggaacttaatgatttatttttctaaatacgaatacatttctccaatggaaaaaatctaagagttttaagatttttctataactgtaattgtcatttcaacgaagagtttaagaagaaaacagagagaaaagcgtgtaaatatctgtagttttaatcaaatgggtcatttctatttcagtctatatatttaatcaaaattgcaattcacaaattttaatgcttacgtattttaagtaacattaaatgaacatcttcgtcctaaaagttacttgatattaatagaaaggtaaagtaacagaacaaagcattaacgatatatttatatttcaaaacttacacacaagtattcagaattaagaaaagaacaaaacaaataaaggagacgtttctgcgattatgtttttgcttgaaatagaacaaacaaacacgtattggtaaagaaaccaataactttgaagatagcttaaacgcaaaatatatagtgaaaaaagggaaatcaacaattattatatatccccacgaaactcggtgtcggtggctcaatcatcttaacactctaaacttttaagcccattcgtgcgcatgcgtgtatgtatatacgtgtgcattggatttgaaattttggtcgttatcgagagttctagtagattatgcattttgtgtaacaagtgtaatataattgggaccctttattactttctataaaacttaattcttttaacctatagatcacccgtttgtcaattatatcaatcaagggtcccttattagctgcattttccgatcgataatagagaagatcatccaatgctttacaatcacttccatgcgacctcacatacaattacttccattgcatagtatgtagtaaaactatatattttgcttccaatggatttgatgcttgtttatgcttagaacttccaaataatcttttttaacgtagcgaattgattttgcattcaaagcacccttagtaaatccgtttcctagtctagtcccataattaaggtaaaatctacatgggcttctcaggcccataatgagaagtttaaaaggctcaactcaacaagatttagttatgctaaggccttacaagttacaatcaaacagaggatagggaccgtcggatttatctgacttcctctccttcgattagggtttctgaattactactcctctgccaattagggtttaagcctctccagcattttctttcagctcaaacccaagaacctcatcgccgattatttcttcatccttactctatcccgcgccgattaatctctctcaggtaaactacttcaattttactcatagactaattgtacagagattgataaatcctatgttgttcccattagaatgttcaagggtttatgattattcaggatttcaaatctgaattattggacaaataaaccctaatttcgtataatttgcatatcatcagtaccgtccgagatgagaaagctcaagtatcacgagaagaagcttataaagaaagtaaatttcttagaatggaaaagagaaggtaaccatcgggaaaacgagattacgtatcgataccacatgggctctcgtgatgattacaaaaagttggtacctttatttgctcttaaagctctgttctacttattcttcttcttctggttcgagtgttttgtgatgaacaatggtctttttctgattcttgagaatgttttttcttttgggcaggtattcaggattgtgtaggatggtgcagaaactgacgaatataatgaaacaaatggatccagcagatccttttcgtattcagatgactgatatgcttttggagaagctgtgagttttttaaatatatataccagtttgttcaagtatagagcttattacaagcaatggttctttgttttctctagatttaggtcgtagaacatgagacttgatcattttctgcagttttttacaccgatcttatcttagagacctcctgttgtttttcttgttaaccacttttagagataattaaaattgggggtccttatgcttctatatagattttaggaccgttggtttgaaatccattagaggttgaattcatcctggtaaaatgtgtgatctaatgggtttctttcagaatctgtttcttgaatagcttctacatagagctaagttactatataatataggcttattgtatagggaaaaagagccatcctactgaaacttgttgattgcgtagttccactctgcaatgagaaaacttgttctcttaatggctgactgacttgtgtttcttacatgtacgcttgaaacggcagatataacatgggtgttataccgactaggaaaagcttgactctaactgagcggttatcagtttcatccttctgtaggtaagagtatatgcaagagcctatataggcagttacttaaacccttgatagccaaatgttctcatttcgtttgcctcatatcggttctttttttttatttgcaggcgtaggctatctactgtgctggttcacctgaagtttgcagagcaccacaaagaagctgtgacatacatagagcaaggacacgttcgtgtaggaccagaaacaattactgatccagctttcttagtaactcggaacatggaagatttcatcacttgggttgattcatccaagattaaacgaaaggttcttgagtacaatgacacattggatgattatgacatgcttgcttagctttgaggaagttaaaaaagactgatgttttgtaaaagccaaaaaaggttcactgctactactattgcagggtttgtttggatttttgaatatgcaaatgtgctactattcccttgtctttaatcttactttcgatctatttgcaagaagaaacttgaaaacaaatgtcatgaaaatattgaatctaactcatattatcgtcaaattgtataagttggagccacagaaatggatgaacataaaatattaaatctaattattatttgacacttcaaattacaaaacccgtttgattcgatccgacccgacccgaccagaaaatcgcaaaacctgtgtttttgctttccccggtctctcaaaataaaattgctcgcttagaagcttcaaacgcagctgaaatggcggttcaagcaaatcagagtgcttcttttgggttcagaacagcttcaccttctcagaagctctcttcgaaacccatagctcatatctctctatcgacgaagctcaaaccctcttctcgaccatcgctttcgtgctctacttggaatcagggtcaaattccggcgagacactcctgtatcaatcccggaatattcgcatatcccccctccaatcttaccttctctcatgaactaccagaatctgaatctccgccacttggaaaggtcagtcatcgtcaaaaaacttctcttggaacaaattggggttataagcttgttagacaaagttgcagcctttttttgtcatttgaacgaaaatgtggtaaaccaaatgtattgtctccatctatttaattgtggtagaagaggcagtgtgtgctagtgttaaacctcccttatgttgcttcattgtgaaaacttttgtgaaaggaagtagagatgtatgattcttcccttgttatcgtcatcttatattgcagaagaagatgcgtgtgttagtgaagccgctagagaaaccaaaggtggtactgaagtttgtatggatgcaaaaggacataggagttgcattagaccatatgattccaggatttggaacaatcccacttagtccatactacttctggcctaggaaagatgcttgggaagagctcaaaactttgttagagagcaagccttggatctctgagcttcatcgtgtcttcctccttaaccaagctacagacatcatcaatctttggcaatcaagcggtggagatttgtcttgatttggattcaccagatatatctgtttatcataggtatcattaacttttcaaagtctaaagcttttgtgttgtttagtctatcattagtcctctgtgtaatcatcgaaactcgaaaaaacttctatcattaaaatggcgaattcaaaacaagaaaacaaaagatcatcatcatcatcatgatgaacgtttaatcgaagtacttagacatttgaatcgatttattactcatcccacatttctcatagaacactttgttctccacactacaatctagaatcaccttatagcaacccattgatttgcaatgatccataagaaactcaacaactttcttccccagctgtttcccgcgaaaccttgaatccacaacaacgtcttcaatgtgcccagctttaccgcaattcctcagaaacttcttctctatcatcacactacccgtagcagcgatttttcccgaagtttcttcttcgatcacgcagatcacgtggtcgtcaccatacgatctgatttcttcgaatcgccgatcgaattcttcgtctgttactgatccggtgacggttagttgacctagaagctcgatgaatccttttctcttatcggagatctccagttttcggatcttgaatgtctcagccatagaatcagatcggataattttgaatttgagtttttttttataagatccagtcactcactggaactgaatataatcacccatagaaaaacaaatgtgataattacgaaaaggtacttattcttttagatagttacaaaaagtttccgaatctcttaatgaagtcaaaatgggccatttgttttttaaattgacttttgatgtaacaaaagcagcaagataaaaactccatagtaaacaatatttattgaaatgacaacaagccaacaagtgaaaatgcagaggaaaaaagtaacaatttaaagcggatgatacatatagattacataattggaaatgtaaggaaaggattgctaatttagggttgatggtgactagaaaaggaaggtgaaagaggagggattcccgggatgagaggggccggagggattccagggataagagggaccggagggatgccagggagtccagggaccggagggagcggaacagggaaagaaggtggtggtggcggtagtgaaggcggattcacgatagggacaggtggaagaaccggaagaggtggaagagtcggaattgttggaatcggtggcagagtaggagtcgggggagtaggaagtaacggaattgtagggagagttgggggagtagggattagtgggattggagggagacttgggggagaaggaataagcgggtttggagggagagtaggggttgggatagaaggaatgagcgggtttggagggatgatagatggcgggtttaacgggtttggcggaaagaagaaattgggttttagtgcttcggttttcttgtctttcaaggaatcagatttcttgttatgcaaggaagctgatttctgaggtcctggtggaagaagaggaggaactagaggaagaggtaagtccggaacaggtaactttggaacaggtaagtttggaagaggaggaacgatagggagatttgggagaggggaaggattaggaggatcttggagcggtggaggaaatgaaggatccggtaaaagaggcttggaaccgcggagattgataggtttttggctacaaatctctggttggttttcgggtctgaaagtgaagaaccctgcagagaaaaccctagtattctctccatgatggtttgatttaaggcgtttgagagaagaagaagtagcagacgaagctatagaacagtaaggctgtgagctacttagcaacttcacagagcatctcttgatcttcttcacatgtttgctcacagagaatggtagcttcactttgaattcgccgcgcttgtctgttttcacttcttgtctgaaactcggtttcgagttctcgtcaatgcattccactgcaactaaagcacctgcaacaagatccacaaaacttttcataattctttctaagattttagacccacaaacaagaaaaaaccctataagtttccaaaacagagtgctctgttctagaatccaaaaaacattattttccaagtagtgttaccaagaaaacacgagcaagactgcaagaggaaaaaaaaacaaaaatcagaaaccagacctgagattaagtggttgggtgatttcgagaaggcgccgttaaaacaagtgtcacagtagacagttcctactacaactgcagaagaacgtgtcttcttcataacatgttgctgtccttgagacaaacctccattgatagagattcctaagaaaatcataagactaaaccaaaaccataaggtcgttattctctccataattatcgactctatctctcactatcggaggaaagagggggtatatatataggagtgtggtgtgaagatgagtgagccacgaaaaacgaagagattgttaaaagatgagtgaagcttatctctttttgttttgccatgttaataagaatcatgggaaaaatacaaaatcgaactacaaagctagctactataatgtcttgtgaccctatctttctacagctcagtagctgaattattgtaaaaaatagtaagaggtgagaaaaaagacaacactaatattttggattcacgttcgcgtgtcgattagatttgatcgaacagtacacggtaaaaacacgttcaaagtaaaataccaaacctgttatatcattgtttcttgaattgcggggttgctaaaactaaaaaaattcagacacatatgatttttttttttttttctgagttaaaggttccgaagatgaacatatctgagatacttttgtgttgaaaatatctgttatcatcatctttcccttatttacattctgaattttggatgagactaaaacatgacatgatgttttcatttccaaactgtgaatcactgtctgtcatgtttgatgtttatagtatagtctacatccatgtttttttaaagaatgacatttacaatcattattgttagaaggatatcctaattgtcaatattacatcgaaatatttatttttagaacatccgagaatagatgattagttactgtggtgatgattttgatagttaactaatatcagtaacagtctatcatggacggatttacatatttctaatcggtaatccaaactagatgtaagaagaggttacagagattcattaattcgcaatataattgttctaagaaacttatacattgcttattatacatttgtttatagatttggagaaacatatagccagtgaggctaaagttgataactagacttaagtaagttatagtttctattttctttaacagaggaaacaatacatgcaatttaagaaagtgaaggcttatgggaatgagaatggggaagggaatacagttggagagtctctgtcgattcacgagacactaaggatgtccacacaatcatatatacccaattcttacttctgtcttcttatagagtactacatacatactcattcttgataagggacaaaaaattaaataaaatgagttaaagaatgtgaatgttttttaatggtattaaagactctgaatgttcttctcgaattttcatattttaacttttgatttttgtgtttttttttaatcaggaacgccgtatgtgctaaaaaaaataccatttcatgagaataaacaaattctattagtcgacgacataaaaaacaacaaacaaacactatggtggattatagatagactagggaatattgtaactttataaaaaatattgaaaaaatatgaaaacattgtaaactaaaaatcattaatttctagataatataggactaaataataaaatgggccaagatcaaattaacccaaactgtagtttacaacttggttgttcccattccttgatatgggctaagtgacataaaaagcccgactctttattgtccactaacaattggtcttttaacttcttgatggattaattgtgggtgtagaagattattttgactatataaaaacagaaaattaactaaatattttcgatatattaaataactagatgatagatgatttttttttgcagtaatttcataaatttagtttcataaattagtttggttgaattcaaatttagtaaattgtcaaatttgagacatagatgatagaactaagattagtaattagtagcgctatatatgactcaatggatgtgaacaagatgataatttaaaaaaatgttttataaaattctttttgtccaatgaacaataggttaaaacggacaaatttacttttgtgatttaattattgccatgcattttggcatatagtcactctgtttcataatataagctgtttaatttttgtcatttaacaattttaatacgtgtaacatttcgtcatgcaatgttattttatgtgtagatatctaatttattaaatgtacttttatttcagttataaaagttatacataatctgcgattataaaattttatattaatataatgcgttaaacattaagtatctgtttacgataataccaaaataaaaaacaagggaaaaattccatcccaaatttttgcttttgttacttttgaatagcaaatctctaatgtattatttttctaaaataaaatcttcctatcctaatgtcatcatctacaaaatcattaaaatatgtaatgtctgattaactaaaataattttatcaactagtataaaataagagaatcaaccaaaaaagtttggtttaaattgtatagagagagtcctccattagcgtccagcaacaacgcccacccactttcacaccaacttgaacacactactcctcctccttcactttttccttcaatctctcttctcgctgacgacttggaaataaagtgagggaaaatattcctccaacttcactttcctgagaatctgcaaataaagcaattcaacttccttttctttctttctaaatgaaatttcgttctttgtctcagtctctctctctttcttcggtcgagtccgatcaaaattgaaaacccattgagttcctcgccaaaaggtatagtcttcgttatttcttctgtaattggataatggggtttgatcgattctgattagtacaatcccaaagtgttgttctttgttttctggtaaattttctctgctttttttgtgttctgttttaaaacaattattctgagttaagcaaagcaacttgtggttttgttgtgtaatgatatcaagtgggttattttttttattataagtttctctgttttattgcgtttgttagggattatctacctaaattaggtttcaacttttaatcggttagttgcttgcatttcactttgaccacttttgcccttttttgtatatccccaattgaagcctcgagttttctttttgaccaaacacaattttgtactgagtttggtgaatgtttgtttgatgtctcttgttgggaatctctctgctttaaagttacttactgtcaatgctggcaataaatctttagttttttactattttcataatataatggattgttttgggggttgtgatgagttttggatagtaattgaagaggtttaaaactcccttaaaaaactacagtccaaacagtgatcagatcattctacaggtgaaatttgagagaatgaatcaacgagagaagctgattgttggtgaaatgtttggagagtttctgtaaatagacgcctcggatttggcattgttagtgaaggttaaaggagtttcctagaagtttcaaagcaatttgcctccaagttcttgacttataaaacatattggaactaacatttcaagaaagaagagaaggagatgggctgtgtttcttcttgctttggggtcgatgactttgaggattaccccaatccaagtagttctgttaacagaagctgcccatgcccgagatgtcttgttaacaacttccttaacctggtaatgctctttttgcagtttttacttttcacctgctacttatatgaaataaaggagagttcattgaagcttcggatttgatctcttctgcagtatatctctttattcagaagaggcgaaacccgctctctcccatcctccttacaggctactaatgtatcgatagctacatcaacttcgtatgataactttatgtctaatacattccattctactccaaggcctctgccttatgacgctgatccaagatacttccggtcaaggcgtgattcgcttgtttctagacgcgataagggttcaagtcattctcatgaggaagctgagcccttaagaagtgatgctgatgtggattctgagtctttctcagtggaaggaagcaaatgggctaacaagcttattatctctggtgaagattccaaagaagagttctctagatcctctcggaggattcttcagtcaaggacaatgtctactagtaacgaaggcctgtatataacatctgatgatgaagatgtctgtccaacgtgtcttgaaggtattcattttcatctttttttttctttttcttggatcaatgcatttcaaagaagcttagtatcagattatttcgtgtgttttgtagaatacatatcagagaacccgaagattgttacaaagtgttctcaccatttccacctcagttgcatttatgaatggatggagagaagtgaaaactgccctgtttgtggaaaggtaaacacttttcatgttcttccaagccagttttcggcttctcatttactagtgtttcagagtcagactcagacaccatcacgcgtaaatagacgagtgatccagagatcaatagaatgaaagatgtacaacaaccctagaagcacatgcgtaaaatctttacttgtcttgtctatgacaaatatggctaatcattcttcctgaaactcagaacatttgaattatttctcattcatgttgactaaagaatatttttttctctgctgtgaattcgtctcatttgcaggtgatggagttccacgaaacaccgtaacttgttgccattgatcctgtcttgtactgcctagaccggacctggggagattgacaaggcagcagagagatgtgaatatattttttaacaatatatgatattgtatatgatggggaaatgaggaaacgtctctctgcacgtttggcttatggagttctgaggaaaccctcttgagagaaaacaacagcagcagcagaacagatgcacacaggaatctgacatgtttcttaggatttgcctttggcgcagtgttttgttcaaggcatgaaactttttacatcattttgtatgattacttttaaccttttatgaatttatgaatatatatgtgatgcttgtattttggcatatagtttacattgggtatttgggtcaaggagagatcacattgtaacccaaatgtttctcattacatgataataaaccagtgtcatggttcagtgttaaaacaagttccacacatttgaattcttaatataagcaaggattcccaaaagatacaaatgtcttgaagatcctcaggaccattatatatagccacttatgtctacaaatccaaagtcttgtgtctatacttttatatatataaaagatcttttgttggtgagctttaacacagcacatgactctcagagcatccaccccgggatgtaaccgtttccctgctgcgcctgagcttgggttgtcgcagttatttgctctgagcataccggattatcatacctgtcatcatcatcatcatcaccaaaacagcaacttaaaaggttcacacacattgatgatcctctttacaccaagtaactaaagaaccttatataagtacaatcttagtagtgaagtacacaagctgatttgcagatgattgtttaaggcaaaggatttaccccatttgcagagttggattgcattcaagaggctggtatagtccctgagactgagcttgatgatgcgcgtaggtaacattctgttcaccaccttcccatcctcctcctcctcccatatgatgacttctcacaccaatcatatcatccagctaaacatttacatttcaccaaaagactataatcagaaacaagaaaactagagatgtttccaaaaatgtttagaaacttaaactctgtgaaagagattgatcgcaaggcaccaaatgcatttattctgtaattataccttcattgccaaagctctattggtttcaagcaacatttgctctttattttgaagatccgagagctggtcaagcatgtactgtgtctgcaaacaatcatcataccaccatagtagttataattaaacaacacaaattaatctcatttgaatcattgattccatgtataaagataccttgatggaccgaacttgcttgagagagccgtccagttgacgctcaagctgctctaactcctttgaattcaaaggtcctaaatcctccccaagaagatttctgcaccaacaaaagccacacacacctacaaatatgaatctacatggatacagaattgagtaaatatacggaggtagacagatatgtacctctgttgacgttgaaggttctcatatctacccttaagcttcagatattctctgtagctgttctgaaatatttcacgaaaacaaacttttaaaaaagatctttcttgaaatgatatgataggaatctaaaatagtatttgaattaagaacacctcaagttctttggcaggtttgttgttgacttcaatggatccatagctgcatttctggtaccgatcaagtgtcttgagcatgctgaaaataactcaaaaagagagaataagagtttattaaaaagatcatacttgactttggagatctaaacctataaatcaccataaaaaaaaagctcttcaagttttaaagtattcttccatcaaaattgaagattgtttccattatttatctgattatatacgagttgatttggatttgattgtttcaactttcaaacgtaaagtttcgtatttatatttacaaatatcaatagttcaatcctatcatttgcaagcaatatcttacgttttcgtttgattcacaaattgtgatttgaaaaaaggaattaatcgctatattttcttgaatgcatgtaagcaaaactattttaacatataattaaaaatctattaaacattgtttttaagaaaaaacaaacaatcaaagccttcacagatatacacgcgtttgaagttttaaccaccataaagtatgatgaactaacaaatggttaatgcatgtaaccatatattatcattctacgttggatacttgtaattttcatagaaatctgtgaacaacttttaagtttccaatcacacagacatatattaattatataaaacttttcagattgcatatcaggatttggaatctattcgattacaaaattcacagttctaaatcattgacaacaaaaaaaccagatcttaaatttcaagaattggaaaaaaaccctagaaaatgaaatcaagaaatctaattaactcaacttcgtagaaatcaagatcgtgtgatctatatataacaagtccttgagacaaagatctaagctcagatctagcaaaaactcaatcaagaaactgataaagagtgagagagttgtttactttgaggagctgcaaaactcatagagctttccacggttggagaagatgatgagagcaacttcagcatcacagagaacagacaattcataagctttcttcaacaaaccgttcctacgctttgcaaacgttacttgtctgttgattttgttctctatcctcttcagctctactcttcctcttcccatttctttttgttaccttaatttccactttttatgtctatacacaaatatgggtatgtaatgtttatctatatacagacacacaaaaacataagttgggtatctctttttcagaggaaagatctgatctttttgagtttttatggtctggagaattgatggtatttggaaaaaagaaattaaccctaatttcaagaacaaaaggtactagcttaaggaagaagaagaggaaacttctgtttgtctgattttttatttatagggttattgattctttttcctctctttaattgtgtttggaagtgtgtggaggttgtgaaatcttaatgaaaattttgttttgaatcaatggaatctattgagagcaaaagataagaaatgtgtgagggtgaggttagggtttggtgtgttttctcatttctagcccatctctctgcttctttattcttctttactttcattcccacgctctctttaagcacgtgtgatacagtcaccaaataattggctcttgtgatacaattaccaattaaacttgtatatatatgtttatatgttatttaaaggataaatttttatttcgtattacttactttagagttttcattatagggttattatttaatttgaacatctatgtgtttctcctcaggtagaattcatgtttgtgtatatatgggtgtctactatttatggaatatttatacaaaacatctaaacatatcattgcttgaaaattctatgtttatatcataatagcaaattgtttatgtttagttatatataacacaacaatagtactctaagaaaaacagcatcatgcacgtttgatggttgactagtaactagacacacgaggcacaaaggttatcagttgattaacatgtgtatgtatatacggtctttcacttatcacattacaaacttgaaagtaaaatttgtttagcgatattaagaaagtttatatatagagacctcgtactagctggaaatgtatatctaaaatgaaagtacactccctcttacatacagtttaatatattttcaacataaaacatatgtacatagtactagcttattttttaaccaaaacttttgggtttgatagtttaacaactcggtcaagaatctcatattttcttacttcaaataattgccaatatattctagttctttttgtttttaaattatacctggtaattttctaacgagagtctcataattgcaagttgtagtagtcttgcagctggatatgaagcgcgtgaattaaaactaaataatacttacaataaatgaaagcaacgtatcatatcattttctagttgttttcagaagccgcagaaaagcatcttctaccttaaaatgggtttccatgtgtcgatgccttattggatcatactttcttactttttaattcagtttaaaataaattgaaaaatgagataaacatttaagtggttcaattatcataaaaaacactaaaactgataaaatagccacataatataggtcatatcaaataaatgagaaataatatttgtatgcctaaatcaagttatccatgtttgaaggtgtttgcagtgaggtatatatgtttttgtctaataaagattacagttatgattatgtaacataaattagataatatttacagctcgcgatacactacaattgaaacgtggttaattagtgaaactgaaatttgaagaagaggatgaaatatgaatgatattcgttaaaatgatctcttagattgtatagtcattgtcccccattgccaaaagatcaaccacttacataaagtaaaacgcatctttagttaaaagctaaccaaaagagtggaacatatttatttttggattgcatttgcgaatttcatcaatatatggttttgttcaattgggaaatttaaataactccactaaaatgtacaaagtaattttttttcgacaaagaatctatgaagctaaaaaatctacccataagtcacttttagcagaaataccaccatatagacaagggattattgttgattttgccattttttatagagatcttttgaaattgccatttttactaaaatcttacggataagccattttctaagatttaaaaatatatggatttcggactttttttggtaaaaatacgtagtttacacaaaatactaaaccctaagaacaaccacaaccgagtaaacccaaacataatgaataaaacgtatattcattcacgtaacctgaaaaatggcaaaattcacaaactattaaaaaaagggcaaaatccacaaatgccatcccaaaaaatggcattttcataattgattctatagacaattatttttctgcctattaactttatttgttttgataaagataaccaacctactatcagttatggttgattttttttattcatattaaaaaaaacaagaaaacgaagtaactttatttaagttaaacaaaaattcaagaaaaatgtgtgtttgcaccaattatggtacatcaactgccaaaaacccacctatagttgctcactgaaagaaaggtccagcagagcatttggttactagatgaatttctccggtttaatgacgataaaacccggttaaagttaacctactcagtaattcataagcatccggtacatctaagcaaagtgccttatttgcagtaacagatcaagaattggaataagagacttctcgaataaacaagacattcttcaactttaacattaccattaccaatggaccgattacacttatcatagtgtcaagaagatgaaacaactataaaataccgagaaaatggtcaagattttgagcattcagggcaagggaaacaacctttggcttggcaattatcgcaagccactgatcttgtgtttgatgagtcactgaaaccaaagaatcctcctgatttgattgttcctgttcctttgcaacggccacaagctacattcttaagatctccacattttcgacacatgccaagagatctgcaaaacttgtgtttagaaacatatgatgatggcaagttatagattcaaaaacaagtctaatgtcattcagccatggacatacaacactctagaacatttcttatagccgtcagcaaccacaatgaacagtcttaagatcatgtctcattacaaaggtcagattttcagaatccataatcaagatcaagaatgattcaatacctgaatatttcaaaaatcaaaagatctttcagtgaggaatacagaatttcaggaaaaccattactttcacatggtgtgaactcagaaaaaaaatgtaatccattggagattgaaactaaaaacataactcaacaatggattttttttttcattcagaatctatccttccaaactacagatcacaaagaaactcttaaggatgaaaaaatagtttaaatcaaaccctcttggattaaaatcaagcagctcattgcaattctaagcagctactacaagcatcatcattatcacataacaacaaaacaaatccacacggtttaaatccaaaacaggatataacacgacatgggttccactcagaacatgaaagattgagcaaaaagttggattttgtggaatttcagaaatcttatgtaatgaacttgaaaagctttattaccttctctgagaagcagcgataaaagcatcaactttaggagcagcgatggtggcaccaagaagcagagccccaactgccaaacccgcaacttcgtttgacgttaaactctgcatcgtcgtcttcctttttctcttctcttctctcgttccttcttcttaacttgatgataatgatatcctgaatttatttcaaacgggtaaatattttacatatctagagcttatcagatatggcctattagctcagttggttagagcgtcgtgctaataacgcgaaggtcacaggttcgatccctgtataggccacttttttgtttttccttcttttaataatttcaattttgaccccgtatcttttgatttcaccaatttgtatcccaaagttaaataaatgaatttctccaaacgatttgtagggtttaaacaacttagtatactccgttactcgcttccaaacccgtacggcctctttagagtttcacctttgtgtctctctgaaactgcaacaaagcttgaagcgatagggtttattcaagcttcactcaaaccagtcgctaaatttcgacatctttattcacatatctatagattcaagctttgtgatttgccattcgggtttcagattcgtgttggtaattcaatttctgaatcctctgctcctaaagagaagaatctgagatcagcaatggaaacggatctcaatgattatactgtcattaaggaaggagaagctgaggttcttatgcacaagaagaaccaagtcttcttcaacaaagctcaggtttgctatatgatttgattttctgcaaaggttcttcctctttggtgataattgattgaattatgtcaagggcaatcttaggattgatcaagtattagttttgagcattttatcttggtttaagatttcaaatttagtgtttttttcttgttatggattagtgtcatgcttgtgttagtgagaaatttgaaggcaactgatcccaaatccttcttagcaattatgttctcttgtgtgaatccatatggatataagtgtgagctaaactaattgcgtgttgttttatggttaggttaacaatagggacatgtctattgctgtgctaagggcatttataatcaaacgcaagcaagagcatgaggctatgttatctaaaagagctagatcatctgggaaagtggttgagaaggatgtctctgaaacttccaaggaagaaactcctactgaaaacggtgacgataatggaaaaaccaatggagaacacgaagtaacaactcaggatggaccaaaggaagctgctaagaccgcatatgaatctgcacgaagggaactcaaaccaccaagagtgcttgaggtttacctatattctttcctttatgactgtaatagctgtacttttgttttcttatttcgttgcttattatgcgtttctagttgataactttttcttgtgttatttattttataggccctgtcagcttcagggctacgggctttgaggtatgctcgtgaagttgaaggaattggtcaagttgtggctttagataatgacccaggtattttttccttctcaacgtttgtgcttgtgaagaggttcgagactctacttttctttcgtcctaacatcccagaataatatagtatttccattttcctattaaagcatcggttgaagcctgccagagaaacattaagttcaatggtttgatgtctacttcaaaggtggagtcacatcttactgatgctcgtgttcacatgctcagccacccaaaagattttgatgtggtaagtatccaatttttgcaaaatcttttcatcttattgatcacataactaacttggttcagtgatgtcttaggttgatcttgacccatatggtgcgccgtctattttccttgactcagctgttcaatcagttgccgatggtggtttgctgatgtgtacagcaactgacatggcagtgttatgtggagctaacggcgaggtctgctattccaagtgagattttactccttcattaccttattctgaaaacaaatatctttgattttgtctgaatgtcttaaatctgtctgttgttagatatggctcttatccactgaaagggaaatattgtcatgagatggctttgaggatcctcctcgccagcatcgaggtaattttttgctaccgttgaattgattcactctcgccaaatcttccaggctttgattgttttaaagatgctcgactggtatttcttttctaaaaagcttttgtttttgatatattgactttggtcatatttttatttgcagagccatgcaaatcgctacaagcggtatattgttcctgttctatcggtccaaatggatttctacgttcgtgtttttgtccgcgtctacacgtgagttttcctttcttttcaaactgttcctctcaattaaagggaagtaaagattgaagctttatgaaatgcagttcggcgagtgcaatgaagaatactccactaaagctctcatatgtctaccaatgcattggttgtgattcctttcatcttcagtctgttggaagatctctccctaaggttttgtggctgtctcgttgcaatgttagtttagtagtttttgaaagctgccttttctgataatcctcttctataatttcttacagaataacagtgtgagatatctacctggagttggtcctgttgttcctcaggattgcactcattgtggaaagaaatataatatgggtggaccaatatggtctgctccaatccacgatcaagaatgggtgaattcgatactaaacggtgttaaatccatgaaagacagatatcctgcttacgaccgaatttgcgctgttcttaccacaatctcagaggcaaaactctcctccacactctgatagctttagtttttggttttgatcaatttctctaaatccctaaatgtttggcttgtctccaggaattgccagatgttcctctctttttgagcctgcatagtctctctgcaacgctaaaatgtacttcaccatcagctgctttgtttcgatcagcggtaatcaatgcaaagtaccgtgtctctgggtcccatgtgaacccgcttgggattaaaactgatgctccaatggagattatctgggacatcatgcggtgctgggtaaaccaaccatttaagtctaaaggcacaagctttgaatgtcatttcttttcctcattgataatgaatgaactcgtttgtttgattgtaggtgaaaaatcatcccataaagccgcaatcacctgaacatcctggaagtgtgattctatctaaagaaccatctcatcaggtctctctttcactaagccattgttgtaatgcttcattcattgtttatatatttaaagttccaaacttgaatctttaaacaccgctttctttcggacaggctgacttttcgcgccacgtcggttcgcttagtaaagcacaggcgaagaaagtagcccggtttctaccaaacccagagaagcattggggtcccaagataagggcaggtcgtacaatcacaagcaaacatgtatcgcttcttggtcatgaagcagtaaacggtcatctcaataacaatcataaagaagcaggagacgaagaagaagaagaagaagaagaagagcccgaagaagatatcatcgagggtgagccagagctcaaacgccaaaagacaacagaagattttgcctcaacatcatagggcgaatgtttacacaagaattttatatttttgtttgcaaaagattttctcttttcttttcttaaacatttgttatcacagttctgcgtttttgatcctagcacttcaccatttttgcagacttctacaacaaacaacttataagtctctattggattcttcagatctgttagagactatttaaaaaaaccttgtaatgtgtaagttttcatcagtaacacttttctatgaatctttcatcattatttccagtttttattggcaatatgattgatacataaacgaggaaaacaataatcatggagtatcattaacttttgatcctaagcagcaaacaaattgtataacaaacaagttcattaacgataaaacagaaagaagagcaaataagtcgttgtagtatagtggtaagtattcccgcctgtcacgcgggtgacccgggttcgatccccggcaacggcgttacttttttctttttccttttttccttttcaaagttttccacggcataatcgtaaagcccagcccacgagtgaaagtaacagagacgatacacgtcataatgtgatcatcttaaaatctttttttatgtatagagagatacgaatcttttaaccttgtcaaattttgtttttcttttctctctgaacccgaaaactccagcaatgtcgtcggcgaaacttttcggttgttctattaacgttaacgttgaggcagaggaagaagaaggcggtgacggtggtagctcaaccaacgtggaggtttctcgatctggtaaccaaccggattgtgaagctatgagtttctccaatcagatggaaatcggcgttcgcaatacatattaccagtttctagagtcgaattcagattctggatcggattctatgtatgcagaacctgaattcatcgatttcttcgatcgagagtcgtacgaggtcgacacggtccgtgaggtttgtgtaagttcgaatcagagggttagtactccaggttatttcaatatttgggatcaggatgtagatttagggcttggaatcgggttaggttcaaggtcgggttcgggtcagttacctggtgattcaggtggggttggggtcgaagttggtaggggtgttactcctgttgagtataatctctttggagaggaagctatggtggttgatgaagtattggaatgggagaatttcaataacgctatccacttggttcaagaacctgcctatgctagtatggagggagaagaagaagaagaagaagacgaagtagtaatggaatttgcagcatccatttatagtgatgcttgggaaatattattgtacgataacatgacaaactctgctcctatggatttggatgttgaagtttggctagatagtgtagatggatatgctcctatggattacaatgctatcataggacaaatgtttgataacgagactggaatcaaaggaactcctcctgcatccaaaagtgtagtagatggtcttcctgatgtggagcttaccattgaagaattgagcagtgtgagcattgtttgcgcgatatgcaaagatgaggttgtgtttaaggagaaagttaagaggcttccttgtaagcattactatcatggagagtgtataataccttggttggggataaggaatacttgcccggtttgtcggcatgagcttcctactgatgatctggagtatgaaaggaagaggagagcatgaaggcgtggtagtggcgggttggaaagggagtcgatgctcgggtagagaaggagtaactgtgcgttatatcttcgataattgtctaatcagtaacgatctgttcctcgttgatatgatgtacatattggttctagataataggaagcatacattttttagccatatctttttgcaagttatttaggttcattaatcttattagactttgcaggtaattgcagtcagaggttatatttaattgttgatccgactttgattagttctaaatatgatttttttcggatgtggttttgttgctttaacagcgcaagattctactgtaaaacgtgaaagaaagtgaaaagctcaatcatgttatttttaccgtttgtgttatctaggatttgaatcaattagagatgagatgttgttgccatggggctaatccattgtctgatgtgatgaatccggcggatccagagtcaagtcatgtgagtctgtgaccaccttgtggttaaccaaaaacatattaaaacgatggatttggtccggttaaacgtggtcttctgggaatgggtctcatatggacctgatctaatccaaagtacgggccttttagtccactaaagaatctctagtttaaattggtgtaatttggttttatttggaagctacaaatactaagaatttccacatgaacgtgtatttgggtatccacacgaccatactctatacacaattttttttgttcgcatgcgtttgaattttgccaattaggtcaatttttaattagttgtttaaaagcttttgaattatttatttatattttcatgtttcattttcactaactacttgaaatatgaaccgaaagtccattagcaataagattgttaaacaaaactaaagttaaaagtcattttcactggcagtggctccctcttttctcttatagtgactctacatttctaaagagccaaacttcaaacattgagtgtcgattttttttaataaaaattctttttaataatcttagattttttttaatttttttttctggctcttggatacccatttggctcaacactatttgcttatcctctcatatgcgataatcatgtctcttgtctcattcgatgtaacaaatactccacacagaaaatttcttaacttctaaaactataagctcctctatgaaatcttaattttaaaccttgtgcgtcatttacgttgttcacatcaaccatagagagttgcaattaactacttgcaaatgatctagtatatggaatttggcaagaatttccatgttcctcagtttagactcatcttaccaaagctatatacagtatatctttaaatgactaaacatttgtgacgttttaaaactttatttgtgtggatatgtttcgaagtacaaacggattaaataagtgaactgcaatgaaaaaagtataagaaaatcaaaataaaacgtaatgtagttggagtgggtgaataacatcacatcaaaacaaattcatcacaccatttgaaatgttttcattagataattattacctcaatcattttgggattgacatttgcgctcgagtcttcagtgacgttctcccactttgtcttcttgtctcttaggattctctctcttctccttaagggacattaagctttctagaccaaaatgcacatcaactacgtactctcaaccaataataactagacaagattatcaagttaaaaattcaacgtaaatcatattttagactaataatttcatggggtaaacttgtgattgtgttgtgtgattaaatttgcatgggtaaaatttgttatcttatagttcgttttcctactcaaattgtaaaatctggctttgatatatacaaaacataagcacactaattctttttaaaaactaaaaagaactaaaataaacaaaggaaaacacagttaggcaatgataagtgggttatttgagaattcgtaaaattattagcataatcataactattatgattaggactggcaatatatagttgtaaaaattggcagtaatagtggttagtggagcaagaccttagtaaagtttacaagtatcttagcatatttgttttggcctttctccatatctttctattaaattagagaaatgatggactacggtcgtgcctaagatacaataatttaatagatcatgtagttttgtaatatttgattatctgataaagattatttaaacaagagatcaaatttacaccgcaaatattaataaaaagttaggtatatatatatatatatatagttaaaacatatttataagtattcttaatttggcaaattggatagaattatttaaaggtacgaaaacaaaataccatagtataaaatggatatacaattataatattttcataaaaacaaaaggtgtagaattataaaaattatcgtaaaaggtgtgatgatacaatagactttgatttggtgattggcttatccttaatccaccaatcaggtgtaccatcatgacatcatccatttttcattaaaaaaacattataacaataaattaatatgttgatgatttttggagtttgcttaacaaagaagatcgtggaatttcgaattctcatatggtattaaagattaagaggccgatgaatataatctgaccaaaaaagagtttcaagaacaattaccaacgagtcaaaatataatatatatgttagaaaaatgtgacaaaagttatatgtttttgttttagttagaatagcatgtttagatacgacaacatttacatggcatgtactatttagattaaattacagttacacaaaattataaatttcttaacagaatagaagatctaagggaattctttggtaaaaaaaatgaaaaatcaaggtaggccaatttcaggtggtagtgtcattgatgggaccaaaacaatgaaacattcaaaaacactttatagtttatgatccagtgaaaaataatactaaaagaatatcagaaaaggaaacactaagaaaaagcaaattggaaaaaagtagaaaatgataaaataagaaaaagaacttgaggctgtggaagaagaacaaaccgtgcaaaggacatgagactgaaataaagatgaaatagactttgtctaaatgatatgacttgatggtgtgtatttgcctttcgtttgactaacacagtgatatgcacactctattttattctaatttgccatattatgcatcaacagggaatttcaaagtttaagtcagtcaaatatttttaggtgttgtgaatttcacattacaaagttataaagtagttttaaagtcaccagatgagaatctatgagatcaacaagtacagccaaatgaatatccagtctgatgaattaaaaaaaactatactacacatgttcaacataaactatagtgtttcttgaatatatgtggtttcctcaaatagtaaggtgcatcagtaaaacccgaaattagttattgaaataaacaagctccattattgtataactttcagtcgacacccaaaaagtctatctaaagaggaccaatatcaatatgcacatatttttaattaacattgcctttctatggatggattattataaacccatgcatgcctaagtttttggttatatttatcttaaagaaagatatgtttttaatagtagaatagtagcaagaaagaaaagaggagaccaaaaaaacgattttttcaattctccaatcattaattgtacaaaactcaaaaacgattttcctaaagtttgatatcgttatataaaaatccagacatctattctcttaatcttgaccaactaagagataacactcgctcattttataacttagttagttagttaaatcaatgaattttcttttggttttagtttgtaatcactaatcaatgatcattatacaagtgtgtgtggttttaaactaaataaaaggtattgttttaagtggttgttgagtcatcggctcctcaattgtattatagcctctgccttagcctttgtaatgaacatcataaaacgacaaggcaagcctgcctaacacatcttgctttcctagtgcaagtaaggagtttgtttttgtaaatagtggtctttgaccatatatctatatataataaaagaagagttgaattaataattctgttcttgtatcaatatgatcttctttgtattgattctataagtataaaaacataccacttgagacaaacaaaaaaccataaatagggttaaaggatgaatcatgtgaatagaccatgcatggttcgagtatttccattgcgctaaggactgaagactggaaatgttttcaatgacaagaataaacaagtatttcacatatctctaagattaattagtactatatatgatatgggatgattggttaagagatcatgcataatcaatgggttactaagtactgtagatttgggttttgtatacaatgtatattgaaacttcggtatgccatgtttgtgtgtggaaaaaataggaaaagattgtcattttttcggtaaaattctaatttattaattattgtattactaacatttatatattaattattaagtctttaggtttgctttatttttgtttacgtctgtctgtgtgatattagtattatagtagaagaccacatttttttatagtttatctaggacctaatatatgcagaaatcaatataataattaattaaagaagagaagcaaatcttaaaggtcctatagatatataatcttcttcttttttctaaagaggaagaagaagagaaattggtgattaattttacgtagatgttagaactaattcatttagaaaaagatatatactttataaattgacttatttggcatcatcgccactttatatattggctaacaaaagcatcgtgtttcgaaactaaaataattttgaaaaccccacaactaaaaactacaattttttttatctctgatgtaagcacataacattgatctaaagcttgattttatccacaatatatatgtacatatggtacccaagtccttatgtgtcattatcatcataatgcatgaacatgatatagaaaccttttccagttcatgtcctgcatgaacatcatgatcatgtttcttgtatgtgtatcgtttagagataccactagatggccatggccctgttagtctgctactcacatgtacacgacaagatgccaccacttggttgttaaactaatcctataatgaagtagcaccttcacgtgtcatcatatatacacatccatatataatttatgtgaatatgatacactatgatctatgcatacaagccatgaagccaaggttactataaaattcaagcattcaattccttcccaagtctcattctcatgcatggacaaccaatgaatatacaatatatgtatggggacttctaaccaacatgtttatcgatctttacaacagcaaagtagccatagcagatttacacagcaacgtgtaaatacttttttaaacttctctcagtaagtcatttacaagaaaaaaaattatgtccatagccaatgggttatgtcttatatcgacataatctaaattattttttaaaaagcaaaaccctcttaagccaatgtcacgaaagccaccaatttgcaaaaaaagttgtggtccacttgtatgcctttctcagctgtataaacactccttctcatccaatctccaccattaaactcaccctctttgagttctaaagagagagagagaaattgaccatgcagccaaattatgatagctcaagtcttaacaacatgcaacaacaagactacttcaacttgaacaactactacaacaacttaaacccttcaaccaataacaacaacctcaatatcctccaataccctcaaattcaagaactcaacctacaatctccggtaagcaacaactccacaacttccgatgacgcaactgaagaaatcttcgtcatcaacgagaggaagcaaagacgtatggtatctaacagagagtcagcaagaagatcaagaatgagaaagcaaagacacttagatgagcttctctcacaggttgcttggcttcgaagcgagaaccaccagcttttagataagcttaaccaagtctccgacaacaatgatcttgttattcaagagaactcgagtcttaaagaagaaaacttggagcttcgtcaggttatcacatccatgaagaagcttggaggaggcatacatgacaaatattcttctccgtcgtctatggatgaattggatcaagacttttcttctatcacagatgatccaagaactcatcatccatcatgagttgttctgatcgagaaaaacattacttcaagtttctgcctctaatcttatctattttctttctttggtatcactttttaaaccgtttaactacgtaccaaagtttgggttttatttgtttttctgttgttttgtcagaagataattaaatgatggatatttgaagatgatgctgtaaacaaagatttataattatatacataaatttggaaaagaagagtataattttataataattatacgtagagaaataaaaagaagacaaacaactaccaccaaaccctcttcacccaatagagaagccaagtttgatatacttgaagaaaagtaaattattcaaaaggccgcggatcttgttaattattctgcattctcagtgaggatagttcgaggaggatctttctgaaatcaatgagatgattaaaaatatcattcatttacttaaaactatccgttgtgcaattatgaagttcgttgtcgaaatgcttagaataactcatcgtgaatgataagattattatcttttgataagataaagatagaaaatgatcatgcaacaacaaaaaaggaaacttcctgaaagaagataagcttagttcggaagactacttgggccgtcccctgaaacagaagtttatcgcgcaagaataattgggccttatatcagatcctttggcccagcccgttagtattagacaagaccagttgcgtgcgtcattgttgaatatttcgaagtttgatgatcgatcgtcgctcaaaatttagggcttttcacttcacaatcccgatttggggttttctggtaaactcctttaatctcagctcgtcagacaaaatcgatctgggatgaatttggatctaattgagcaaaaaattgtgttttttcaatctattgaatttcacatccttaaacccttgcatattcaatctattgaatttcgcatatttttcctcaaatttatccaaaatcatcccaaatctattgtgacgggttgaaagtaagtttctttatcgaaaatcagtttgaatgaatgttagggtttatattttgatggtgactgattccgatttgtataaatgttagggtttatactggtttctgactctctggtaagtatagagatgattatatattaaatggtgttttaaggcgtgttcagatatagctgtgcttgtgttgttctgttttggcatttttcatttgttctgtctttacttcttcttagtcagtctgtggatttcctttgtaatggttattggttagttaggaactactctcaggccttcttcacatgacaccaaagttttttgtggattatgtggaggaaattgctattttagtatatggtcattgaagcaagataagaaccttagaaagcagagtgttataatttttctgtcaaactcatgctgtagttgcagactttttcctacttcagattaaggagaatggttttttttttgtaagcaagaagttaaaagagtgagaatctatgaaggcccagggaccatgtaaagtttgggaatggttttaaaatttgatggctttgagaatcgatctgaactatccttagatttttggaaaagtgcaaaaaagtgcaaagtgcagcatccttatatcactttatgaacttttcacgtgaggtctcgaatccatcacttaacattaacacatagtataagctatacacttggttgttattacttatttcttcttacagttcttgaagccgagaacatatatggctgatggtttctacaattaggaacgtgatatgactcattttagtaagaagttgtgatttacagctgaggagtctgtgttatcaacttgaattgtagaatctttttgttgtcagggaggcgtgaaagtgtcacatgttcaggttatcgggaagttattggctttgaaccttggcttccctcttagtagttagcaaggtgaaatctgcgttttcacttcttgatgatccatatttcacaaatggggatctgtaccaattagactggttttgtttaactaatgcagagaaagaagaatactatagttttaattagccaaaactacaaacccatttgcacaacagtagtaatacttcttgaagctaagaatttcaccaaacctaacataatctcaaactaaaagtaatttacagcttgcaatctagtttttctttttgccacaggagtatcagaatgaaggaacaatcccatatcctgtgttgtacattagcatcgtgttgaacccttgctcctcggcttcgatttctctctttgcgaaccggccattgacccgcggtcttatctctgcatatgccttcctcgaagcataccttattgtcttctcaaatttccttgtcttcctcttctctctgtatctcaggaccctggcttctctgtccattggactgagttgtgttactgttatcatctggcttgcagggtcaggttgttgctctactgtccctttgggcgttcttgggtgtgaagctgttgtgacacatgctgttgactccggcacaacaccagtttccatggatgaaatgtatgcctaatgacagaaacaaagacattctcaatccccctggtaagaggactaaagagagtcgatgcaaaaggaagcatatattgtttttattatagacttctggtgaaatttctatgtgctatagatcaactgttggcagtggatcagtggatttgtgtgtatgatgaaagaattcaccctgctgcgttatgggaagatgctaaattgaaggggtaacaaatatacaaaagccttacgttatggttaatggaaccattgtcgttgtagtgagtccctgaggagccatatttgatattgaactgaaaattctgttggttatggcactggtggccccttgattcttcaagtttaagcggaacaactctatctcccccgtagctcgtctgtggtacgctgcagttttgttggtgttgactgtattcacctgtgaatttgtagtccatactcgagttgtaatccacaaggtttagatactcatcactaaacaataacccattgttttggttattgttatttttgtctgaattagggaacagccacgaagcaacctccttggcatccttatcaccttcttcaccttcctcttgatccaccaccagtctcttctctggatcggtcattgttttctcgctttggtggtgagtagtggtcatggagctgaaagagtttccagaaattggtagaattggaactcgctgatggcgtctagcaagtgggtttgcagaatgaacctctgaatcacaggctgtgcatagagaggcatcatctgcctcacacaaaaaagcagccggagcacgctcacatgactcgcagacccggacacgtttatggcgggaagcaacgcgattggcagagtgaacttgagcatcacagctcatgcacaagtaggcagaatctgcatggcaatacacggtgcaggcgtttgaccggcatgtgtcacagggtcgtgccctgttgttctctccactacctatgtcgttactctcttgtttcaacataataactcagatgtagtaagtttgatggtgtgggagctggtatctgaaagaaggggctaataaagcttatatctggtgtgagagaataagtagaggggagatcgaatcctgagtgcctacacgtggcacagcgttagtggctcttacatgttattggatcctcttgcagctagttgagcttttgggaaggcctatgtgtaaagtgtaaagtgtaaagtgtaaagtgtaaacatctcctcctatgcacttcttcgttgggacccgttcacaagttgcttaggttttgccacttgccatactgagattctcaagaggaagtggtccggataatgccatggtgttgcaggcaaattgttactattttttcgtatcaccttttactattttcatatgcattttatttaaagtaaagctagattcgttttatctctttggctttatacaaagtttaagtggttgaatattcatcctgaaccttgtgattactgttcaggtatctctccgagtaaggcttcgagtgtcagagccatcaccaactgttatgggttgactacctatacaaaggttagacaaactcgtgaatatggtatagttgttgttccattatttgtgaatgcatctgcatcatttagaaagatttgcaattgaaactttcgaaggattttctgatgaaaagtgttataatgtttaatctggttcataaagtcatggtaatgagaatcatatcggaaaagtgacatgaaaaacatagagacggtggattttctaggatcaaactcgaatccgccaagtagtcttgagactacaaattagaatttacctgacgcacaagttaaaacttaaaaggcattttggagtccacatgagcaataattagatttatcatatatagtatgtagaaatttgcacttggtaaccattatagtaagtagttacaaaacatgactcatgagtgttgtcacatctctgtaatttgggtttatgatgatactctatactatttattgtagctttattagatctcaacctgtggaagtaatctaatacaaacgacacttgtatggaattttcaggacatgtttctaagatcacagaggtaattgtgaagttttctgctacactcatttactagtccacatgatccatagatgcaatttaaccatcttcactctatttggtgacccattcatgtgtttagcatcgtgggttttcctgtactaataaccattagtacttggagttgccttgttggtgttatgctcataatgtttactatgtggaagctacaggatacgatactctctaggtttgaggactagctccagttacgcttttgggtccagtgaatgtatgatacccattatgtggtccaaaaagaatgagatttgacggacgctctagtggccaaattcatatggctaccttcactctatgccttaagagctgaaaagtgagtgttttttttttgtataaaatgctggtcctaggatacacttttcgcatctcttcctctttcatatttgcttacaccgcacttctctttcccattttgaactttaaactttgaaaagtttttttttgcttggtaattggaacttaacatacaagttcttgttatttactggttttacgatgaatgtaatggcatttagaattgttatgaaatggttatatgatcattgaattctaaagaaaagattctaggttctttagtaagcatttttggagatctttatcctgccaagttggataagttgaggcatctttggcttttagtgctttggtgatgaaattttttggagattgtaacgtggttcgagttcatgaagagtaaattgtgtattggccttttcacttgtagctcaagaaaaaagtagttttgcttattattgctcgttgacagtctctaattaagtttattgttgtagcggtttggaacttctctcacatgtgtaggccttcggataactgttacgagtaatagatcatatgtaacaatatcctcaaagttgcatcgagattttcaagaaaacactattgcttatttgttttcattctttatcaggtttccgtggtttcgaatactttgcttctttcagattaacgaaaaccctatttagttgcaaagactgagaagagaataagagtcgagggaccatataaagcttgtaattgtacgtttatgcggattctccactttccatggctgtgagaaactatctgaggaaaagtgcagtgacctttggcaaaaggtaatcacttttatgcactttcacgtgctagctcgaatccacaccaaatagtaacattctattggctctgaaactcatagtgctccaagtggttgtcattgcattttaaaaattcctgacaagaaatttagtagaaactttgctacttcaagtttccttctttatgatatgctagctcgtattatatgcaacatgggatatctttgttttgcttgtgtggcttataagtttatgttgcatgatcaaaacagatcactgaataaattttctggtggtctgagaactcgctgcagtgaatgaatgagatccatgtaagtggccccaaaagaacataatttacaacactctggtaggtaaattcatgtggatactaaaactgactcatttatggctaaaaagtattgatttggtacatgaattcatcagcttaaccgttgaagtgggaagctatcctagtggtaaataagttgatctctggccctttccaggtggcaaaaagtgaaggctttacagtgtcaccctttttcttttggttgcgtcgttattctttagtgccagtatataccttggaaaaagtgagctattattctaaaagatagaccaagaaatagatttctcacactgaatatctttgttcatttggatggtccataggcattgacatattctgctagtagtggttgtgagtgatagaatcttgttatccgagacaacctcgtgggaatggatttagcaccaatgctaatcactaatcagtacaagaatatgcgttgatgtaattgtacctattagcattgttcactcaggattcttggttatttgttacctgactattcagtgtgtgattttattggagttttacatgtttacacttgtctctgtaatctacttttggtataaaatcatattgagtacaactttcttttctcagggatgtgcgaaattgtctttggggcggcataagtggaatcatttatcttctacgtgataaagtgatgtggaaagtgtcaccaagaaaggaatcattaactttgaacttaggcaaggtgagttacgtgttgactgttcttggtacagctagctatactaatgcatatctctttgtagcatcagtttgaatttagactgtagggcagtatttcatagataagaggacttctaccaagtgggcaaaatttgtattaacttacagcagctaagtatgagtgtatatctaattaactcgtactagttaggcaaaactagtaaactacagaccctatatgcataaaaccgtggtaataacttgcaggaatttcaaaccagaagtaatttacaagcatgcagtctagttttgccatagcagcatcagaatgatggaacaattccatatccggtgtcaaatgttatcattgtggagaaagcttggtttgcctcttcatcgacatctttcttctttgcaaaccggcccttgatccgtggtcttttctctgcatacgctttccttgaagcatatcttatcgtcttctcaaatttcctcatcttcttcttctctctgtatctcaggactctagcttctctgtcccttggactgagcatctgagctggagggtaaggtggttggtctgttaccgctttgggcgatcttgggtttgatactgttgcgtcactcgttgttgactccggcacaactcccaggtccatagatgaaacattcacctaatgacagtaacaaagacattcttagaaatttacttcatggatttgtgtgaaagaagcagcatgctggtcatagtaacggatctgaattaaatatatgaaagcttaccatatgactgagggaaccattggagcttcgaagagctccccaggagccacagttgatactcagctgaaagttctgttgctcttggtacatgccctttgatacttcaatttgaagtggaacaactccatcttccccatagctcctctgaggtacgttgcagtctagttgatactgattggattgatctgtgaattgcttatcactcgaactataatcaacaaggttcagaaactcatccccaatcgagaagccattgttgttaccactgtttttccctgaattaggcaacaaccatgaagccgcctctgcttcatcttcatcctcttcttcttgaccaagcacaagtctgttctctggatctgtcactgttgtctcacatgaatggttagtggccgtggaactgtaagagtactcagaaatgggcagaattggaactcgttgatggcgtctagcaagtgggtttgcggaatgaatctctgaatcacaggttgtgcatagagatgcagcatctgccttgcagaaaaaggcagccggggctcgctcacatgattgacagactcgaacacgttcatggcgggaagcaagacgattggcagcatgaacttgagcatcacaactggagcacaagtaggcagaatcagcccggcagtacacggtgcaggcggctgatcggcatgtatcacaggcttgtgcccagttactctctactttcaacatactaaccgcagatgttgtagttgtttgatggtgagtgagatcgtatgtaaaggcagcaggggactaagaaggctatattagttgttgaatggaaatggaaaggaaggatagaattctgagggctggacacgtggcgagaagtttgtgggtttgatgttgagtgatcatcttgtggctggctgagtttttgagaaggggtccagtgcagagatgcttacagctttggaatcatcaaccagcacgaaatgtgaaagaaagaaaaaaactaattgtcttcttatatctttgcaatggcaccaatagttactactttttctctctttcttcctcaataagtgtaaacacctcttcctatgtaatcttctataggacccatccacatgttacctaggttctgaaacgtgcaacttctaactatttttgtatcatctactactattttggtaaagctggaaactttagtagctctttggcttgaccattagcctaatgtttatcttgattcttaacttttgccatgttctaactgttcaggtttctctcatcgtctcatgatttcaattataaaaattaaatgatcactgtttagcattgttaaaaagattatgactcttaaccatttgttatcttcgaatgatgctaggtgtcttttttggtgatatgttggagataatagatatggcatgtcctaactttgtttccttccacatcaagtcggtcaagctgatttggccaacggtggagatccaaggagccaattggaatctgccaagtcgctacgagtctctagagattaggagccacaagttgaagcaaatggtgggtccaaattaaggtgaataacgatagttatatcaacatcacctgtggtctgtttatacaagtccaatttgcttatgatcaccatcatatttcatagttacaaaacatgtataagtctatcaagtgtttgtcacatctcaatcacctttttgagaatatgataaaactcgatattatctttactagcttttattagatttcaaacttgtggaagtaatcatattcatgtgttcaaatctacatgggtcaaataaatttggtggagcaacaaagtttgtttttatttacatgatgttctactgatgcaattaaaaacacagcaactaacaaaggtaaaaactgaggatcaacaaacaaagcttgttttcctttcttggcagtcagaaagggctaatctcacgagccagtttcagtaacaactctggtacaagacgctttctgggaggagccaacgagtctttggtcagcccatcattgtcctccgcatgtatcacagagactatgtcatcaaagagttcgtctttacctcctcgtaagggatcctataaacaatactctcatgagttttattgtactcacactgagctaagtgtttgtgtgtgtgacacaatgtaaggtaagttgactgatttatgtggcttacctgaagaaataagtcagtatgtgtctttccgctgtataaaacaagctcggcttttgctccaacagcttgcagagcgtctgtaaaagttttgctgcaaacgaggtggttttagtatcccaaaaggtttcatcagtaatgtatcacttcaagaagatgatcatatatacctttcatcgcatggtatggaataatctgaggatccgtggaaaagtataataggaggtaaaagagaagcagcttttccaacaactgggtctttcagtcttacttccggagagaatttctcaaaggactcttctccttccattatgctgcaagttggagttgaacattagatctgatcagactgcgtttaggatttggttaaccaagcatttaccttaggaaaatcgagcgatacagaccccgattatggaagtgatcaaccaacttgtatagattgtacctattgaagttcaaaatgataagcagatcaattgctgtagaccaaaaagcacatagaagccaacgggaatccaaaagcttagaagataccctccagataatccaaaataagcttttatctgggacactgtccaggagatgctctctccttttaattctttagtagcttgttccaatagagcacaagcggctatatgggcaccagctgattgccccatcaggtagatcctagagagacaagcagatacatgcagtttaatagccgagagaccaattggaagatcaaatggtaaataaaaacaaagccaatgagatgaaacctgttggggtcacctccaaatgcagagatgttattgcagacaaatgagattccttgagaagcatcagtcaccatatcactaattgttccctgaggaaagttcctataccataaagaacggattgcttggtaaatgcatgaaagttcttcctatattcataaaagacgactagttttttgaattgtgtaatttgtttacctgtagtcaaggcatgctacaatgatatctctttctgctagctgcattcccaagagcgagccccaagctttgtacctaaatatcagtacaagattagcaaacatgaacttattaacaagcaaccagctagtacaagaagatgaaacttgagtgagtcagtgagataagaatacagagcccatcatgatctttacttttttctttttgtaactcaaacatcaacaaaagaacagtgaaggggaaaacttctataagtgggacacgagaaattgtaaaacaaacaaatttcaacattatgcagaagagaatgctgtaaatctgatgtgcaacccacccaataatccaagctccacccgtcacaaaaaccacaaccggcttcaagccatcgttgttgcttggcaagtacagatccagcctatcaaatcaccgttcatacatcaataatctcaagacaaaggtgatgtgataaaagcaggcattcaacataccacttaaggccgatgtgaaaggagaaggtaagattctattcagttcacacacaaacctgttccttggttgatctccatacactatactcctccggacttgctttgagaaaaaataactatatgcaactgcacaagataatacaaacttgagacgaggaatcaaagactaattttccaattaaaacaacatcttaatcaaaaggaaaaatcctttctatgaatttatttatcagcaaagaaaaaaaaaaaaaaatcaaaccttgaagaaagccaggcataagaagcatagcataacatgtaagggcaagtaattttgtcatccatcgatagcctaccctgaacaaaacttaacaattagatcaatccttgctcaactggaaatataaaaagaagaagttaaacaagagcaaaacaacagcacatggagtaactttcataattagagtaaagttccaaaataaaagacagagaacttttatatatcattggattctttgcagagcaaggcaaagccagctaatatctacacgaattacctccctaagcgtaatcatcaatatacctaaatccaaaaacagggacaatcgagatcagtacccgaggtatcgaagaagcttgaagctaagtccagtaattagatacgtttcagctgccgcgtggccgatatcgcgaccgaacgattgctgccggaaaatccgacgaggtccttcgtcaaccggcgacttcccggaaactcgacgacgtaacggttcaccgttaagaagagtcgttctatcggagtcctcatcgggtagaacttcctcgatctccgataccgtcgaggtcatcggccagcatcgctgctccggctgctgagtctgaagaggcgaatgcatcttttccgccgtgaaatagtggatctc

SEQ ID NO: 1437 - DNA, 74687 bp, Arabidopsis thaliana
gaattccaagattcttcgtgttgctcttctcttttgaatttcaaactctttttgttatcttcgcttttgtgcgctttccatttccttctacacgaggaatgtagtaaagtagtgtgtagatataaccaaaagtttgtacaagacgacgacgttcttagctcttattgatgacgtttgatcatgtaatgatgtgtgattaaagagaatcaaatgtcagacagtaatgaaattattcgcaaaatattgattattctaaaatgtttgttagtcatttcatttgtgattggatggagtagtgtgacgactttggaagctagtattagcaaatcatgggctttaccacgttcggaaaatgctaaaactcgtgggcccaaagtgtgacgaatatttccgaatctaagagaaagttcacgaatcacgatccaccaaccactacaaccataccactggttttattttatacgagcatcacagacagacgtattcgatacttcgatattaccagtgaccaaaacaaaacaaatctatatttgggtaaacaaaagataaaccggagtggagccgagccaccttatccaaacttgcagccacgtctattccatcatttcatcagaaacaaaatccacacaaaaaacatattttcttgaaacgaaaaaaaaaacttattactcgatgatcatgaagcactagcttatccacaaaaaaaccaacttgatcccaactaaaaataggaaaagactttgttttggtcatcgactattatatatagagtccaatcacaatctatcttgttcagattttgtttgtggccatattctttgatctcttttttgaaatcttcaaaagcattaaaaacaccatgacgtctagatttgtgcttccatgtactactctctacgttctttcggtaacacttatcttatcattatatatccctctcgcatctgcgaaacgatcattagaagaagaagaatcaatcatatgcccttataacgacaagggatgtctattatatctgaatgagtttgcaatggaacatatcaacaaccataatgattatgaagcagccttagcttctctggagaaggagtttcaagatcatgacagaattcacttgatacacaaaccatacatgcacatgactgattcttccctttataatactttagacatatagaattctgtatatatgtggatattctcatagagagatcattggtgtaattaagaagaaaggatttgaaaagatcatcgaatcatttcaattatatgaagcttcattatataaaacaagctaaaattaacattgattaataacaaaccaaaacgcaaacaactttttattaaagcttaatgacaataatgaccaaaggaacaatacttcccgccaccgccatgaccaccataaccaccttcatcgtcttcttcataatcatcatcatcatcattgtttctactatgaacccaccacaacagattacttaaagagttcccatcatcaaacccatttaatcctttaatcttctccattgctccatctttgtcgtacatactttccaaagcatacacaaatcctttccacccttctccgacgctgtctctagccaaagcaggcattgtccaattcacgagctgtttcacgaatgtcacgtccgagaacagaacttctgataccggaagtaacggtaataactgtatcccaaggcgacattctttccactctttaggcgcgaaccataagccactgtctctctttgttgaccataacactccaaccacacgattctccgatgtgaaatcttgcgggtaaatagcgtcgtcttctttcacctgccaccacattttcgccgcgtgaatctccagcgtcagaaccatcgaagcagccgccaccaaatgtgtatccccataagctagccccaacaaagcagcggagtaatacgcattgacagcctcgcttgtactctcttgattcctcccgtcagcgaactccgttaaccctccagcccaagaatgaagcttgaaaagatcaaagcatctcaaacgcgggtaattcgaattcgacttggctcctttcttccccaacgtcaagtaatccgccattaaagtatacgcttgaggtctgtatctcttcccccataaaggatcaatctttgcaagcacagcaatcgcataaacaaagtaacctaaatgataatgatgatcattgtaaatcccaaacccaaaatctgctcctgaatctctagatcctagcttagtaatcacacctccccattttggatcatacaagaaaccatttggtccgaaacttccattaagccacggctcgatcatgttcttcaagtaagttctaatctttggaataacatccagataacaaacttcttcagctattaaagctaacctcgccgccctcgcgatcaatttcgcgtagaaatacgaagagttggtgacctcagctgatgaatctaaagcgttaacgtctttgattagagcagagatgatctcttggtgagaatcttcttgaactcctttgatagagtgccacgtaacagaaacagggtctggttttaaaacccatgaatctccgatgacacctactaaatcaccgtcgatgctgttgtatttgaaattgtctagaactgtgatagaacaatcgttggttgataaaagcttgagatgaagaggatgagctagcattagaagatctccatagcctcgtttctcccatttatactctaaagcaaacggctttgtgaaatcagcgtcaccggaaactgggtaagagcaactgaatccgtcgaggattgtttcgaaatacggatttggatttggtaacacgacgatccggataatacccgaaaacccatcaccgcaattgattgaagaaacgccgtctttggttagattgatcggagaagaggcgtagattagccatgtttggttgttgttgagtttgacggtgtactttgttgaagaggtgttaccggaaagtgataaaacagcgtggatcgttgagattgtgatggaggagttaacggagaaggtgatgaaagggcttcctctaacgaggaagaatctgagattagaggaggggaaatcgagagtgacgccgagatcgctgaaggaagagatgagatgagatttacgagaatgcgggtcgggtccatctgacccggttatggttatgtcggcgttgaaagcttcgtagatgaaagcagagttgtgggagagagatgggtaggagatggagagagatgaagtcgagggtttgatgatgtaaggatgaaagtactcagcttggtcgccattgttgagagtgaagttttggaagaaagagtttgtagggagaggagatgagaggagatcgtggctgaagaaacgagacgggtcgggtagaacagaggaatcggatcttgggaagagaaacggagtgtttttttgtcttgaggaagacatttgttgagacggtggtggagatggtgaaggaggaagaggaagaggtggtggtggtgatggaggtctgttcttgggctttttaaagggtttggtgattaagactttgacttttcgcctcacttttttcaacattttgcttagtcaagaggagaagagataacgacggatttggaaattgggttcacaaaaagcaaaattgtggggtttgtttggttagaaagaaaaatgatagggaaattttgtaaatatataataaaagatggtttacaagttaaggttttgggaacgtgcaggagacttgctagatgctaaaacgtagacaagatattggtatatgcccaaattaaaaatgtaaattaacggtacgaatatggttggataacaataattctctaaggttatttgtattcttgcaacaaaatatttggttaaacaacttagttcgtaattcgtatgtgactttgtgtgattgagtattacatgtttggtttggattggttatttgaaaaaattccaaatttgttggataggtttggaaaatgcttgaggtctttgtgacttgatgttgttttgcttagagaaggaggaagagggttgattgcaagcaatgtaaattgcaaacacgcggtaatgcatattacatttcttaaggctcatattaaataggcataggacaggatattttttttatttcttttaccattttaagtcattttataatgctgctttcaatgcatatatgacaactttatgttttgcttagtataagaattaatttgtaaaattttgatttggtcgagatttgagcatagtcccataaactatttttgtttaatagacaaggccttatcttaaggcccatatataagacggatactagaaagtaaaagccattttgagtgttaaccggaccaacaagagaattcaactaacataaccgaatcgtgccggttcaaccaccaaccgcttcggtttagctctgccatcgtcccgcgagtcacatcaaagagacggagacggagaaggagaagaagaagagatatggccggacttctagcttgggctgccgatgtcgtcggtaaaaatggaaaagaaggagacgatgagaaggatcggatcccattggttttcacggaggagcagcagaaatacgtcgatgagcttggccgaaaagcgacaaacctcagccgttcgatccaagatctgcggctcagattgcctccaccggatatctcccagcgtctacctgaccttcatgctcactcccttgcgtccaatgccgctctcactcttcagcttgattcgcactccgctactcgtgaacaggtttgagttattgaaatactatagctgatttgggaattgtgtttttgcgttataggattagtcttcaatggatatggctttggctgatgttgaagtgatcctaatggttcttcttttggtattgcaactaggcacacatgagagagcagacactgctggaagaaaatagtgcatatgagaatgcaatatcaacctgtgagacaaaaatagaagagaagaggaatgaagcagattctcttcttagaaagttgaaggtgagttatcagataattgttcttttcttgtctgtgatcttgttcagatatgtatgttggtcctgttaccatttgggttctgcctgatattagatggtttgcaggagctagaagctgtagaggaaaacttgaaaactgagcaggataatgcacaagcttctctagatgcaaggcagtccaaaagctctagtgaaactgttattcagcctgatgggaatggaaaagatggagcagatacagaggccatgaagtcctttatgctagagaagttggagagcaaaaagaacgatatggttagttttcattttacgtttcatgggtatggattggaatagtcgatttggctgtatatctgatggcagtgtaagttatattttccatttagagtttaatggaagaaaaagttcaggatttagagaggagttgggctgttatacaggaaagagcactgaagcagccttctccaggtacttttttttgtcatcaattctgattagttagtaaattactattttatcaccattcagaaccatcacgtcttcaatatatatgaaacaaaaaaaaaattgttttacatagcttattttcagtaagaattcaatagagatctgttttttggttccgttagataggttgatagcgtgaaaaatttcattcacattatctgactggaaaggtttttctttcacagctcagagagagaagacactggataaacaacttcatagcctaatcgagcaattagctgcaaagcaggtccatcacaacccaaattaatctacacttttccctttagactgtttcttaacagaaactttgatatgcttatcaggcacaagcagaggggattgttggtgagattcatctaaatgagatggagttagagagactaaacaatttatggagaagatatgaaagctttaacgttgaagggaacgctgcgaggaacagattcaagagaacaaattcagatagagaatttacatcagaccacgaagttgatggtcattcctaccttccatattcatctgctacaagaaatgggacccaaacaaggcttatgtatctcaggtcagcttttgtcgtctacattttggctttgcaagtcctggttttcatcagaatttccttttgagaagttgtgtacacgagtagtctgttctgcttttagtttgcgcaagggagtcaaaatactgcatataaaaatttataggaatacaataattgttgtcaaatggttttctgtccttccatatggatatatggcaattgaatactgagactcctacatgaatctttctttacaatttttcttgatattagatatatgtctccactactcattcttgagggatgctttctagttatctgtcttcatcatttgtagcaatatatcattcagagtatcgataggtccaggcaggcaccaatgaatacagtcatttcttaaagtcacatttggattctgtagatgtccatatctcccaggatgcccatctggtcgcaatagcattgcctgtgtcgtgtccattaacttcagtctcaaaccactcttcttcatcccatcttcttctgcagctctaaattcctccctttgaatgtcgtgaaccttgagatctgcctcgggtatagtctcgtttcttctgtaaggttgtgtccgtacacagtcccctccttcgttccaagccccaccttcgaaatgttgaggagaaaaactccttaaaaatgccagacccttgaaattctcgattatagcttttagagatattcttaaagccttcctgtatccataggtcaaaggcaattcagtcgtgtttggtaacgcacagtattggcacccagagatttgttggttttcatagaaaataaccggccgggaaaaccagtggccggatgatataaccaggtagtcgagttggtcgagctgactcgtccacttcgtgtcatattcgtcgaggtataggctgaagaagttggacttcggatcaggtttagtagccttcactagaaatggtgaccacatgacatgaagagtgaagttataggatgtgtagttccatactttgaaatccgtatctggtgaaggagaaatgtcttcagggtattccacctacaaggaaataaaaaaagtcaacacattagagagatggtggttcgctggtgatcattgacaattagtttggatttttaccctagagagaaggcacaagagagattggacttggtttctgctaatggagtcaccaacaaaccccatggctttccctctaaccatttccaagaactcttgaggatcaaagatgggaaggtcgcaactctccggcttccacctccatctcatgaatccggtatcaggtctcccatatttcatgcagttctggtgctcatgtattgcccagcatgtcgtgttggtgtagtatggagcttcttcgtttggtacccactccccggtaaaaaggtcacacatttgctcatcatctctgatccgcgtccttgatggtgatgtggtgactggggatgaatgatcatcagatgaagaattcagatgtcttaaggacgtgtgattgagtggagcgggaatgggaccgttcacaggtgaaggactctgatcagctgaagaattccgatgtggtggagcgggaacgggactattcatgggtgaaggaatctgatcgaatgaagaactccgttgtcttaaaggtatatgatcggttggagaggaaatgggacctttcttgggtttaggaatccgatggaaagaagacttccgatgttttgaaggcgtatggtagggtggcgtgggaatggaaccattcacgggtgaaggaatctgatttgatgaagaattcaaatgactgagacgtgtatgatcagtctcgaaagatgagattgatggaggtaagattggatcggcaaggagagtatataaagcaggaactattgtgaggacaaatagaacaaatgctaatgtaattgcaactcttggtgttctttgaaggattgcaaacaaaggaagctccattgtctgcttcaagacaatggtgtctggtcttgtcataaatatgtatgtatatatggtgaataatggtgagctcgtggtcatccaataactaggcacaacatttgaccatttcctgaaatataataaataaacctgagggagacagaaagtcaaaaaacttgatttagcttggtcattaggacaacatttttcgaacttgcgccaagaatcctttgtcttcttctctctttagcatagccagcaagaagtcattgaggttgtcgataggaccgggcaagcaccagtggacacagtcgttgtacaacgtgacattggcctctggaatatggccgtagcggcttgggtgaccgtcgggtctaagccacatagcttgggtcgtatctagtaatcgtaaccttttccctttcttcttcgcttcttcttcagctctccaaaattcttccaactgaatcttgtgtagcttcattgtcgtttcgtcttgagtctcattgctcctataaggttgtttcctcaaacaatctcctccttcattccacaacccgccttcaaaatgtgacggtgcaaaacttcgtaagtacattacgcctttgaagctttccgaatccaagatcgctttaaacgcggttctaaaagcttttctatacccataaaacattgtgagatcggttatgttcggtaattggcaataatggcaaccggtgatagtccggttttcgtagtagactgatggccggtaatgccagtggccagaagagatgattacgaagtcaaaatctcctatatcggctgtccaactctcgtctgcctcatcaaggtataggtcaaaaatatcaatatgcttgggctgggtctggtcgggttctttggacttaaccaagtgtggtgtccaaaatgcggcgatcgtgaaattgtatgtttcgtatgtccatcgtttgaaataatcgtcattcttaaccgaagcatccatcggatattcaacctgaaatgagaaattctagtttaatctcgagaaaccaagtaatacgagggatctctagtccggacagatcgaaaaattggattcagaaacgaaactaactgcaaacaaatcaagttggtttcatctttttactttgaacaaagtgtaacaaaaacgaaccaaatcttaccaagacaaaacttgatttcatttgatttaaaagataaaaagtaaacactttcattctttgacgccaaattgtaaaacgaaaccaaatcacaatagattcgattcctatatttagtacacaagattccaaaccgaattgtaacaaacgagaaagctggacaagacatccatgtttggtattgtttatgcaattaaattatccaactacgtagttaattaatctaaaatgaccaatggactccgtggaaatgtcaatgtgttctttttttttttgtagaatcttttaacacaagtaaactaatattaagacatctaaaatcattggacggaccgctcccatttctgtttcataattattttttagtataagaagaaaacattatttcaataattgtggcaccggtgaaccaaaaacacctttatgcacgttccaatctctctatttaaaacaaataattgagtagttatttaatttgtatcaagttttggtaaagtaaaaacatacatgtcaagttaatatatgtatatgacacttcttaaaataatgatatttgatcaaagtaatgatgcacatcttacttccgttataatactttaccaaaagtatataacttctactaataattaaatcatttacaatgtgagtctatgacctaatgattcgagttatagaagctcatcgattagaatgttacttcgaagtaaagagtggttatatgatattctttgatgcatgagtactaaaatatgatttactaagtttaatgcgttattttgcccgttaaacttagaattattaaaagaaggttttaatgaccaaaaaggagagtttgatgaaatataatactccgatatgtttacatcatatattagatttcttattttagaaaatcgaaatttatgctagcaaacgaaaagattaactttaatttgtaaaaaattaaaagccatatatgttcataaaaaaaaaggagaaatattattaacaaacaaatgttttttttttgttgatggttatcaagatatcattctagatattcaataaaaggcaaacaaaaaaacaaacaagaaaaactaatgtaagaaaaaaggtgttacctgagaaagaaggcagatcaaagactgcatgtggtttctgctaactgagtcaccaacaaacgccatggttttacctctcacgatctcaagaaacctaaccgggtcaaataccggcaagccgtcttcgcacccgtaaggtttccatttccatttgatgaaatccgtgtcgggtcttccaaacttcatgcaattttggtgttcgtgtatcgcccagcacgtcgtgttggtgtagtaaggtgcctcagggttaggaacccactctcccgagaatatgtcgcagctgtcatgtgatgttacaacaccgttttcgaggttgatgatgctgctttggcttggaggttgttgcttgaggaagaagttagggtcttcaagcaaagggtagagaagagggatgatggttaaaagagatgtagcaatggtcactgcgatgagtagcttttgtttacatggaaatgttgcagaatgaacaagctccattgaaggaaagatagagagagacagagaaagaaggagagattttgagagagaaagcatacaaagattataccagagtaattgggactcgatttgtttataagttgtgaattatttcaaatcatgaaattttgtgaatttttcttctatgttagaacaaaaagagtaggtgtcacatctaaattatgagttattattattgcaaaatagctaactgaaaattttaaagtgatcaatcaaacaataaattcacaatgtgatgactattccgctaatttggacgttttttgtcggcaatttggacgtttaagtgatatttaattctgtaacacatgtaattagtgtttagctaggttgttaactatgcaattgtcacaatataatttttttttttaaaacatgcattgtgttgtataaatctaaatgataacacaatgccggaaatattacaattcactaggctatgtcttggtcataatttgcttaactagtacttatgattttttcaacaattcatatttttgattatacagtatcaagttattattatgcactttccaactgttacgaacaagtttagtatatgaatttgagagttaaaacaaacatatgagcttcttcacccatgtggattcattttggtttgtcgttataatttaaccaaaaggtaagcaaacattttctgttttatcttatcttaaacaaaaatttctgaatcgagtcagtataccaattgcactaacaagtatacactatgattctttattatatgtcaaaacggtctaataagtaaaattgaatgtgagtaacatctaagaaacactgaatcgctgcagcgttgtttgttgttctcagtttcttgagtgtttcttattctattcaatgttttagttttttattcatgatgacacgtggatagtctacgtggaagctagaacgccacaatcgtctccacagttgtgattgtgaaaggtctctttttttttttcccgaagatctcgacttcacgactcatgattccacaaagtttttaagaattctgcagtttcagatttataatcgcttgcctaagtttcaattcatcttcattccgggagaaaaagtcgcgatacttgagctactcagctttagggtttaacatgttaaggtctctgatttggaaacgatcacaggcatattcttcagtcgtcacgatgtcgtgagttcttcttctaaggcctttcgaattctatagaactgtttttcgaataaagcattgatctttattgctgccagagacgaatgaatcacttgtagggattttcattttggggacatagtctctgacccaacacttgatattactgaattgtgtgatttcttcataaaatcattgacaatgttgcatatactgatgatggtcttcttgtctttatctctttggcagttcaatcagtcagagaggaaatgaaaggcttttgtctgaagtcgctggttcacattcaagagataataaggtaatagacaataactctctcattgcttttgagtctcatgagactttgtgataagagagttcctcaaatccgattgctacatcagacaattagttaggaatataatcagttgaaataagagtgtagagttttctatggttacggggttgttgtttggaagtctctggtttgtatctctgtttgtgtgtttcatatgtgcaatataaagaaacttgatcacaaactgtctccctctctttcgctgtatctattacagtattttgtcttgaatgcagatattggttttgggaggaaatggttatgtaggttcacacatatgtaaggaggcactgagacaaggtttctctgtatctagtcttagcaggtatttgtatcattaccggttttaaatctgatttagtactcatagactgtctcttcgtagcttaacctttagtctttgaactgtttattaggtctggaagatcttctcttcacgattcgtgggtcgatgatgtaacctggcatcaaggtattcccaacatctgaaaacacattttcaatttgttcatcatttatgaacaaaagacttcgatgattcactcgatttctgttttctactaaaaaaataggtgatttgctttcacccgattctctgaagcctgcactagaaggaattacatctgtggtaattaagaaatcttcttaaaaggtacttcatcatatggttccttcgcatctctgatggaaacttgtgcagatttcatgtgttggtggttttggttccaactcacaaatggtcagaattaacggtactgcaaacatcaatgctgttaaagctgcagcagaacaaggtaaacaactaaacattcatagatttcttgtgttgtatggggatgagagaaaactcaaattgttgagttatctgcaaaaatatatagataaggtttttgtggcttgttgttctttggcaaactaacagaaaagcggcttatatattctgtttaggtgtgaagagatttgtgtatatatcagctgcggattttggtgtcataaataacttgattcgaggatatttcgaagggaaggtacttattcttattctttgtcttcttggtttttgttcttagttatttacatatctctttgatcaatttatctatctattttcagagagcaaccgaagctgagattttggataaatttggaaacagaggtgtgtaaattctcacttttaatcaaaaactccatttctatatacatgcgtgttcactgataagtcgttgttttttcctctgctttcgaaggttcggttttaaggccaggattcatacatgggactcgtcaggtcggtagcataaagctgccacttagtctcattggagctcctctcgaaatggtaaaacacgatttgcatcaatcttggtaatctttaggtgaaagtaagaatctttttttttttatctcaaaaacattatatcatttacaggttttgaagctgttgccaaaagaggtgacgaaaattcctgtgatcgggccacttttaatacctccggtcaatgtcaaatccgttgcagcaacagcggtaaaagctgcagttgatcccgagtttgcttctggagtcatcgatgtgtaccggattcttcaacatggtcactgaaaacaacacctgtcttaacaaagttctcctcaatacggttttaaatgtcaaattcaaatgtaaccaataaccatcgtctctggtcttctgctaccaaataaactatgactttcgcatattacacaataggagaacaaataatgaaatctttttgaaactggaaccaataaccatcgtcattagagattcaacttttttggtttgttttgataatcttccaatgtcaagactcaagagcttccacacaaaaaaaaaggggcctatgaatctgtaaaccgggtttttatttaataaccggacttaatgagtcgattttaattttaaaacgagttgaatttgaaccggcgtcaaggttttaaaaggctaacctagagagagagagtgtgctttggtcgtcgtgcttctcttttcccgggttttcgctttttcatggtttcactttcagctctgcaaacaaactgaaaaatcgcaattcagatagagtctagggtttatcctcgtatggttcaattccgcgctccatatttcaatttcggctaaattcacttgttcaggtctgttttccttctcgatttcggaaattcaactttgtttgttagcaaatcgaattgtctattcttcttttggggttcgtttttcagcgttctcttttattttccgtctctgtcttgttcgtaagttgatttcgctattaaaaaatttgatttttttttggttttactgttcattttccagtcatagggtttatgttggagagaaaggctaatgcgaaactgatgattgcttgtgatttgagattgttactagaagtttctgtttgattagattttagttttcaattcttcaattttggttttagggttagcttttgcactgtccagattctaaattttttaagtttctaattttcgattctacattgtttccctgttggatttcatacgaaagtttcaatttttttcaggttaactcagtaaaaatctctgaaccgctgagaaacgacaaagatgtctgaacgtcgtgctaagcgtcctaaaatctccagaggagaagatgactttttgcctgggaatataatcgaaatcgagcttcacaacttcatgacattcaatcacttggtatgcaaacctggatcacgtttgaaccttgttattggacctaacggatcaggtaagagttctcttgtctgtgccattgcactctgtcttggtggtgagcctcagcttcttgggagagctactagtgttggagcatatgttaagcgtggggaagattctggctatgtcaagatctctttgagaggtaacaccagggaagaaaatcttacgatttttcgtaagatcgatacacgtaacaagtctgagtggatgtttaatggaagcacagttagtaagaaagatattgtggagataatacagaaattcaacattcaagttaacaatctcacgcagttcctgccacaagatagggtttgcgagtttgccaagttaactcctgtgcaactcctggaggagacggaaaaagctgttggggatcctcaactgccagtccatcatcgcgcgctagttgagaaaagccgtgatctgaagcagcttgagagagctgtggcgaaaaatggagagacgctgaatcagcttaaagctcttgttgatgagcaagagaaggacgtggagcgtgttaggcagagagagttgtttttgactaaggttgattccatgaagaagaaattgccatggctaaagtatgatatgaaaaaagctgagtacatggatgctaagaagagaatgaaggaagccgagaaaaaattggatgaagctgcaaagaatttgaacagcatgaaggaacctatagaaaagcaaaagaaggagaaagcagagacagattcaaaatgcaaaaaagttaagaatctcatggatgcaaatggaagaaaccgttgtcacttgctcgagaaagaagatgaggcagacgcacgtgtagtggcaacgtacaaagaactggaggaattgaagaaacaagaagagcatcgtcaagaaaggattctgaaagctactgaggatctcgttgctgcggaacgggaactccaaaacctgcctgtatacgaacgtcctgtagccaaacttgaagaattgagctctcaggttacagagctgcatcatagcattaacggaaagaagaatcagaaggaggacaacgagaagcttttgtctcagaagagatacaccctgaggcaatgcgtagataagttaaaggacatggagaatgcaaataacaaactcttgaaagcgttagctaactctggagctgataggatatttgacgcatatcaatgggtgcaacagaatcgtcatgagtttaaaagggaagtatatggtcctgttttggtggaggttaacgttccaaatcgagagaacgcttgctttttggagggtcatgtttctttttatatctggaagtcttttatcactcaggatccggaggaccgtgatttgctggttaaaaatttaaaacgatttgatgttcctgttctaaactatgtgggcaatagcggcaatcaaaaggctccctttcatatttctgatcagatgcgttctcttgggatccatgctcggcttgatcaaatatttgatgctcctgatgccgtcaaggaggttttaaattcccagtttggtctggaggactcgtacattggatcaaagattaccgatcagagggctgaagaagtctataagttgggtattaaagatttttggaccccagacaatcactaccggtggtcttcctcaagatatggtggtcattcctctgcaagtgtagattctgtatatcaatcacgtcttctattatgtggggtggacgttggagagcttgagaaactgagatcaagaaaggaggaattagaagactctattttattcatggaggaaactcacaagagtcttcaaacagagcaaagacgtttggaagaagaagcagctaaacttcataaagagagggaggagattgtaaatgtttcgtatctggagaagaaaaaacgccgtgagttggaatcccgttaccagcaaaggaagacaaagctggaatctttagagcaagaggaggacatggatgcttcagttgctaagctgattgatcaggcttccagagctaacgctgaccgctatacatatgcaatcaatctcaagaaattacttgtggaggctgttgctcataagtggagttacgccgagaagcatatggcttctatagaattggaaagaaagatcagagagtcggaaatcaatatcaaacaatatgagaaaacggcacaacagctatctctcgccgttgagtattgtaagaaagaggtagaaggaaagcagcagcggctagcaactgccaagagggatgcagaatctgttgcaaccatcacacctgaacttaaaaaggagtttatggagatgcctaccacagtcgaagaattggaagcggctatacaagacaatctgtctcaagccaattcgatccttttcataaacgagaacattctccaagagtatgaacatcgccaaagtcagatatataccatttctacgaagctcgaaactgataaaagagatctgagcatatgcatgaaagaaatcgattcgctaaaggagaaatggcttccaacgttgagacagcttgttggtcagataaatgaaacattcagccacaacttccaagaaatggctgttgcaggagaagtttcattggatgaacgtgacactgactttgatcaatacggaatacatatcaaagtgaaattcagagaatctgggcaacttcaggttctaagctctcaccaccaatctggaggagagcgttctgtctcaactatcctttacctcgtctctcttcaagatctgacaaactgtcctttcagggttgttgatgagattaatcaaggtaaaaagtgtaaatgttttttttttaatgtaaaaactgtctcgaaacattagtcaaagtctcttaaaaatatacatttgcttgtgcaggtatggatcccataaatgaaaggaagatgtttcaacaattggttagagctgctagtcaaccaaacacaccacagtaagtttttcctttttctattcatacgaaaacaccctggaaactgctctcaagtgtcgtaaaaagtaagaaacaaatgtttggtctttgctgttgtaggtgcttcttactgaccccaaaactcttaccggagctagaatacagtgaagcctgtagcattctgaacatcatgaacggtccttatatcgcggagccttcaaaagtttggagcttaggtgatagttggggcagtctcaatagacggagaaccgaagctagtcaatgttcctaacttgatcatcttttctgttttgggttttcgaagaacaatgtattttatgctattaaaccgaccggtcagagcagattgaacctgaaccgatttcgtttttatggtttgcaaatgtaaaaagttcaatggataaagtttctgaagctttttgatttatatatatatctggaacgtgataatacgcgtatgaatgatcgatgtgatctccaagtccaacgtctcctttctatttaccgtgttccttcctttgaagtcattcttcaattcatcgctccattgttcttcagatttcaattttgctgggaaattttagagtaggcgactcctttgatcgccttatttcatttcgaaagttgagattttggatacgaccctcttgatctgacaccggaatgttggtgagtttcgctttttctccgacaatctttctctgtttctttttttctggatcgtcgttgtgttaaagaactggtcaccatgagtatataaagtttacctctttcttcagcattttgctactgtttgcgttttgggtgttgctctatatatatcaccattggtctaattctatctacgaagttctagaattttatttgctgattgcgttttttctgcaaaaacccttctcttagagtcatattgagatcaaagctccgggatcttagatgatgatctaagtttgaatgtagcttttaggtctgattcattagttgaaattttggggattttaagattttttgagtatgttggtctttttcaggttagttaaatggagagaaaaagaacaaaggacagtgaaccaggaccagtccctctgcttgtaccggttgatagatttgggtttctgaaacaggaacatggcagttctcctcaacgtttcaccaagactaaatcatctattaattatgagaagtatgtcaatgtgaaaaagtgattgttttgtcctttgttgttgttgaggatagtatattgtgctttgttatttaaccatggatgctaaattcctttagggaggagaagagagtgacaaaatggaggaagatgattggaactgggggtagtgattggaagcattacgttaggagaaaacctcatgttgtcaagaggcggattcgaaaagggatccctgattgcttaaggggtctcgtttggcaattgatctctggaagtcgagaccttttgcttatgaatcccggtgtttatgtggtaataacttattatctccttgtgtgttttgttattcattttctttggcttcattgctggaaagaaaaaaacttacaattctctcgatttcattatagcaactggtgatttatgagacgtcggcatcagaactcgatatcattcgggatatatctcgtactttcccgtcacatgttttcttccagaagagacatggaccaggccaaagatcattatacaatgttctaaaagcatactctgtctatgacagagatgtcggatatgttcaggtatttccagagatcttttcctttattcttatttgcccaagatggtactaattacgaaagactcatggtactaaaaataatgcagggaatgggtttcatagccggtttgttgcttctttatatgagcgaagaagatgcattctggttattagttgcattactcaaaggagctgtccactccccaatagaaggattgtatcaggtgagactttcttcttactctagaagataccgatatgctattagttgctactttcctctttggttacgcgagtttgataatgatagagccgctttgattgtttgagggatagtaagaaaatgacataaagtcaaatagataaaaaaaaaaaaaatcctttccttcatcaactagttagtttatgactgctttttcagattctctgccaactatcctgtagagagactttctattcttttaagagtctccaagattagcttcagtctctatcaaacgtgcttcttgctgaagttatgatagtagctctttggaacattatgcttgaaaacagaatgtcaattccttaagacaattttaatgatttaatatgttctgatttgtgtaaatgtaggcagggcttcctcttgtacagcaatatctgttacagtttgatcagttggtaagagagctaatgcccaaactaggagaacatttcactcaagaaatgatcaatccgagtatgtatgcaagtcaatggttcataaccgtcttttcgtattcacttcctttccattcagcgctacgaatttgggatgtgtttctagctgaggtacttttaatcaacatcttctaatctcaaaagtctctttcttttgtgtcatcatatctttgtgttttttgtttgtttccggcatagggtgttaaaatcgtgttcaaagtcggtttagcattattgaagcattgccatgatgatttgttgaaattgccatttgaggaactcatgcatgctctgaggaatttccctgaagatgccatggatcctgatactttgcttccattggcttattccattaaggtctcaaagactaaaaaagctataaatttcctttagatacttgaaattgaagctctgtgtcactgtctaattttgttatgaatctcttccaggtatcaaagcgtttggaagaaatgaaacaggattgtgacaaggccgttgctaaaccgactcaaacggccaaatcggttcgacaatagagtttgatattcttgaaccgaatcaaaccggaaagtggattctcgaagattcttctcattatttgtgcaaattttatctttctctctttttttacaactcgtgtgaaaacaatagaagaattacttttgtaaaaatatatttcgactcaacaactttagattcttctttctttttggtaatgaaaagtcaaatttgagcaaacttgaatcatgtataagttacgtcttttcgcatgtgtggctttgtgatgatgtagtgatttcgaattcaaatccgaatactactctttctccctctggaatccagtctggttgatttgctcgaggcaaagataacgtttgcgttaagcacaaaacccttcactccgaatcacgcttccttcaaagtttcgagagtttggtttcaagtctttgccattccctattcatttttggactcaggttagttttctctgatatattaaagtagtatccattgatgctaattgctcaactgaattctgataattaaaatacaaaacaatctttgaggttttttttacagaagatgatgagagaggtaaaggaggttttgtgttttgtctgttcatctgaattctggaggatggttctgttttggaatattgctcttgtttcttcttactttcaattgcttaaagcaaggatctttggctccaaatctacttccatatctggctccatcaatccacaaaatggatcttctagacccatttgtgttatcactggtgtaagtgaagtaatggttcaaaagtctactatctattcttgttacttcactgcttgtgtgaatcatttccttgattatgtcatgttgtaatgcctctatttttaaatgttgattactcatgtattgcattttgtgtatatggtttttgatttcaggctacttctgggcttggtaaggccactgcatttgctcttgcagagaaaggtttctacgtcgttcttggtaaaaaacatctatgatccattgcctcctaaagtactaatgtttaagtatcacaaatttagttctctgtggactaatcggatgaaatccttcttgatttttttatcagttggacggtcctctcagcttctttcagaggttatctataaatctttttgtttcggctttgtcgaattagaaatgctatctttcacattattctttgatgcaaaatctcttggcttatgacagaccctgaaggaaattaagaacaagaacaaagatgctcaactcaagtctttcgaagctgacatgtcttcatttgaatcaatcttcacgtttaaaaactctctagagcaatggctctcggactcagcgttacatccttctattcaggttttggtgaacaatgctgggatcttggcaacttctagtcgaccaaccattgatggttatgacaggtaagtctggtttgatcaaatcttttgttttcagttgtcaataacttaccttatgtattagcctatggatttgatattttaaaactgccttttctttgtctccctctttgtcaggatgattgctacaaactatgttggtccattctttttgaccaaacttcttctaccacttctgaaaaacagcaatgttccttcacgggtcgttaacgttacatctttcacacatcattcaggtaagatgtagtgatatataagatttaacaagaaccattaaagactagcttaagtgacttgatatctctttgttttctgtagcttttattcaaaagctagacaaggattctgttactggagtgtgtttttcgacatcaaaccaatatccatgcgctcgaatctacgagtattctaaatgtaagccgatatatttctcacagtcacttaattacgaaacatatatagtttcttcatactaaattttgcttcatgttcttgaccagtatgtcttctactgttctcatatgaattgcaccgacaacttcggctcatagacgactcaagccatgtctctgtaatgtatgcaacaaaacactcgttgctctctcactgattaaaagatcgtgtgttttgacttgtgagtattggttgttgattgtagagctgctgatccaggatttgtgaaaacgaatataatgcgtgagcttccttgttacataacttccatggtgtttcttggcttcaaaattcttggcctcctgcaatccccagaggatggagctgaatctatcatcgatgccgctttatccacacccgtaatatgaatgaataatgaattttattgattctctcttcttcatatatgatctgattttcttacttacacatactaaaaacatgttattgatttgcaggaaacatcaggtgcttactattttggaggaaaaggaaggaccattgaatcatcacaagtttctagagaccctaaacttgctaaacaactctgggaaacatcttgtgatttgttcaatgacttgcagcttcttcatcaccacaactaattattaaagactctagaagatccttttatgtttatctaagaatagagtcaatttcatgaatatgagaaactatatgaaagaaatgtattgaagttttatagatgatatctttgttttattgtattaaatattgctatacaattacatttaccattctaagaaaacgtaaaatcacacatcgatagaccaaacttgtatgtaaaatggcaattgtatgttaacacatgtaaaatggcaatcgttagtatgccagattacttttaatagtattgttttaggtgaagggagactaatatatttttattttgtttgttttgagtactgattttgaaaaaaaagtgtatgttgattggttacttttctacacattcaaaactttataagaccagacgaaggcacgaggaagataaccgagtgtatgttgattggttacttttcacttttacacattcaatatttttctataagaccaaacgaagtcacgggaagataacaaggtcatgatgaaaaaaaaaaaaaaaaaaaaaaggaagataacaaggtcattttagtcatttaaataagactaaacgaaggtcgtctagtaaaacagaatttgattctctgggacccactattgcacaacacagctcatgtactacgcacctgtctttttcttgtaagtatcgaattcttgaacgtgtcgtctcacacaacacacgtgtagtattttaattagctgcagtttttgtgtggcttagcctatctcggagatctaaacgtattattaaatctttaaatacattttgacaaaaacaattaattaccaacaaataaagctctcttatctttttcgtggtcagaaatcgtcgagtatcaaagactttaacgtggctgcttcgaataatccacgtgtcaccttaagattcgttgataaaataaatgatttattgacaaaaatagcatacacaaaaagatttattgctgtaaatggatttgtggccaagaatcgtcgcgaatctcgcacctataatattctcacataaagaaggggtaaggctattttagtaaaagatactaaaagggtaaaaacgtaatttagtcggagccctaatagcctcacaacgtatctgggctggacactatataaacaattccctccaccttcttctctacaatatcacaaactcgtttgctcttttcatcattactaaatcataagcggctctcaagttctttagggtttcgagttttctcaatctcctacctgattaaggtttgtttctcatagcttttagagagatttgttcttttgttatcgttgtagatctgagattatgttgttttttgatcagctgattaatctggcgtttgttggttcgttttcaggttaatttcttatcttggatcaataacaagagaattataactccggattgtaatcaatattcctctacatgtaagtctctaatcatgaacgtgttattatgtttttcaattatcaatttttagggtttgattattagcaatttgttcttccattacatagatctgataatgacatatctggatttgttggaaaaagttgtatatgtaataatttgtttgaaactgcagaatcgttgaatttctatgtgtttatgatgctctagttatgtttgcattacatagtatatgattatctaacttttggttatatggttttgttaaaacagaaaaagcgtgaatgagattatgatggaatcgaaagctggtaataagaagtcaagcagcaatagttccttatgttacgaagcaccccttggttacagcattgaagacgttcgtcctttcggtggaatcaagaaattcaaatcttctgtctactccaactgcgctaagaggccttcctgagtactagccagttccctccatagcttttcaattacaacaatctccttttctcaaagctctggttccccaaatcctctcgtcttttgtttgccctcacaacaacaacaacaacgcagagatggccatgtctgctattggcttcgaaggttacgagaagcggcttgaagttactttctttgagcctggtctctttcttgacactcaaggaaaagggctacgtgctttagctaagtctcagatcgatgagattcttcagccagctgagtgcactatcgtctcatctctctcgaacgatcagcttgactcttatgttctctctgagtccagtctctttatcttcccgtacaagatcgtcatcaagacttgcggtactactaagctcctcctctctattgagcctctcttgaggttagccggtgagctttctcttgacgttaaggctgtgaggtacactcgtggaagtttcctctgtcctggaggacaaccattccctcaccgcaacttctctgaagaagtctctgttcttgatggtcactttgctaagcttggtttaagcagtgttgcctacttgatgggcaatgacgatgaaaccaagaaatggcatgtttactctgcttcttctgccaacagcaacaacaagaacaatgtctacacgcttgagatgtgtatgactggtctagacaaagacaaggcatctgtcttctacaagaacgagtcaagctctgctggttctatgactgataactctggcatcagaaagatactgcctcaatcccaaatctgtgactttgagtttgagccctgtggctactcaatgaacagcatcgaaggcgacgcaatctctaccatccatgtaactccagaggatggtttcagctacgctagctttgaagcagtgggatatgatttcacaaccatggacttgagccatcttgtctcaaaggtactaacttgcttcaaaccaaaacaattctctgtagctgtccactcgaccgtggcacagaagagctacgactctggtctctctgtggacctagacgattacggatgcaaagagtcaacaatggagtctctaggagaagagagaggaacagtgatgtatcagaggtttgagaagctaggaaggtattgtggttctccgagatctaccttgaaatgtgagtggagcagcaacagtagctgcaacagcgaggacgagaaggaatagggaatctaaaagctcaagtttttaattttcgttttcttgaataatgtcttatggatatttttcttcttcttcttatttcccttaaaccagtgtttgtgtctggtctatgtgaattcggatgatccaaatgttgaatataatggatcaagtatctattattatgatcattttcatgattttagtgtattaagctaattgctttgcatttgactttaaatctcatgacacctttggtttttcacatagttgaaatctagcttaacctcatagttaacaaggtcataatatttcgccgaggcataataatcgaaagagtcaaagaaagcgagagacgcacgatagaaagaaaaaaactagatatattaaaaaaaattgtttttttttttagatatattaatttgactaaacggctacgctttgtgcccagtcttcgtagagaatcgctacgtttttattctaaccgaaacaagacaagaaacgtgttttcgattgtgtttgtgtatgccgataaactattatatttttgtaatttgatttagttcaagaaattgttgtggcctatcggctatcaacatgctttttgtaagagagaacttgtaatttctgtctatgatttccttcgttttctttttctctctcaaagtcatttatttaaagaacaacattacgtgtgtataattgtataattttttctatttcttactatacttagagaattacatgttataacaaatgatctttgatcaaaagaaaaacaacaacaaatgatcaagaattgctttcttttttttatatgttgcaaaatgaatagacgagccaaacttatactcaaatattgttttatctatttttaagaaatattctttatgcgagagagcaaactccccaaacgatgttaaatggatcacaacacataagtcgatccgaatagttgaagttttctaaaaaggcagtccctataattgtattaaacacactaaatcctccacacagacaaaaagaaatcacgtaaacgagacatttacatgaaacaatcaaaccagtttgattttatccgattttgctaatgagatgagttctgtatattgttataatggatataggagaactaactaaaataaaaaacgcaaagaaaactttatacagtacatattcttacggtcttaccaattatcaacgatgtgttggttatgtacacaaggtaaaatacatcgattcatattatgcataatataaaaaaaataaagaataaaactacattttggtaacttgaattcaaccatgaactgtttggattggcaaacataaactcaaataaaatatctaggtataattgtggttcatacaagaattacttcatactgttgggccaaaggacgtatccttccccgcacctccaaaccatgggcttactactgatccgacatcaaaaccgtgttagttgcaaccaacgaatgataagtcaataagattcaacttgtcaacaaatatacagcttatatgacatgtctggctccaaactgaattttagtagaaagttactaattcataaaattaatttatatacaatttttcaatttttattttataaattaaagaaaaaaacatgaaaaatacgggaggttcggcaaacacaacatttaacttgccaaacgtatcatctaactttcccaccttatacaaggaaccattttttcaataataaagtttttttttttttgtcttcgcaaataagagcacgaaatgtttgccaaacgcatatgcaacaaacccacgttacataattctgtttacagccatagagcaagctatattgttaaagacctaaaaaaaactttactataacatatagaggcttcgagatatttcgaaagactcaacttatatataaataaactcaaaaagaaaacacggaggcgagaggatcatactctcacacagaaagagtcacattattatatcctctaaaaaaccaaactaaaacgacacgtgaagtcttgatcagccgataaatagctaccgacataaggcaaaactgatcgtaccatcaaatgtaatccacgtggttttagattactcgtggcaccacactccctttagcctataaatataaaccattaagcccacatctcttctcatcatcactaaccaaaacacacttcaaaaacgattttacaagaaataaatatctgaaaaaatgtcagagaccaacaagaatgccttccaagccggtcagaccgctggcaaagctgaggtactactctttctctctttgacagaactcttaaactggaaaaaaattgttgaagctataactctttgaaaacagttgaaacttgatcattactagaaatttcagttacttgtttaatttagtttgtcgtaattatgtaattgatgatttttggttacaatggttgtcatgtaggagaagagcaatgttctgctggacaaggccaaggatgctgcagctggtgctggagctggagcacaacaggtaaacaatccatacacagacacataacatataatatgtaacgaaataaacgtctttgtaagcttacatgtacgcagatttctgatatggttatgtatatgttataggcgggaaagagtgtatcggatgcggcagcgggaggtgttaacttcgtgaaggacaagaccggcctgaacaagtagcgattcgggtcaaatttgggagttataatttcccttttctaattaactgttgggattttcaaataaacgatctttgatcaagaattgcattatatatatataaatatattgcaaaattattagacgagccaaacttatattcaaataatgttttatctattttaaaaaatattctttatgcgaaagatcaaactccccaaacgatgttaaatggatcacgatacataagtcgatccgaattgttgaagttttctaaaaatgcagtccttataattgtattaaacacactaaatcttccaaacacacagaaggaaatcactataattgttataatggatataggagaactaactaaaaaaaaaaacgcaaagaaaactttatacagtacatactcttatggtcttaccaattaccaacgatgtgttggttacacaaggtaaaatatatcgatcgtagtactggattcatattattcataatatgatgggaaaatgaagaataaaagtacattttgtaagtagaattcaaccatgaactgtttggattggcaaacattttttatttgtttttggcaaacataaactcaaataaaatatctaggtataattgtggttcatacaagaattacttcatactgttgggccaaagggtacgtatccttccccgcacctccaaaccatgggcttactactgatcggacatcaaaaccttgttagttgcaaccaacgaataataagtcaatacgattcaacttgtcaacaaatatacaacttatatgacatgtctggctccaaactggatttgagtagaaagttactaattcacaaaaactaatttatatacacattttcaatttttattttataaatcaaagaaaaaaaacatgaaaatacgggaggttcggcaaacacaacatttaacttgccaaacgtagcatctaactatcccaccttctacaaggcaccatttttttttcaataataaagttttttttctttaatttcttcgccaagaagagcacgaaatgtttgccaaacgcatatgcaacaaccccacgttacatatttctatttgtagctatagagcaagctatattgttaaaaactaaaaagaaaatctttactataacatatagatagaggattcgagatatcttgaaagactcaacttaataaataaagtcgaaaagaaaacacggaggcgagaggaccacacactcgcacagaaagagtctcatatcctctataacaaattgataaactaaactaaaacgacacgtgatgtcttgatcagccaataaaaagctaccgacataaggcaaaaatgatcgtaccattaaacgtaatccacgtggtttcagattacacgtggcaccacacaagtatctccatttggcctataaatataaacccttaagcccacatatcttctcaatccatcacaaacaaaacacacatcaaaaacgattttacaagaaaaaaatatctgaaaaatgtcagagaccaacaagaatgccttccaagccggtcaggccgctggcaaagctgaggtactctttctctcttagaacagagtactgatagattgttcaagttataactctttgaaaacagttgaaacttgatcactcctagaacttccattttcttgtttaatttagtttgtcgtaattatgtaattgattttgtgttgaccatggttgttatataggagaagagcaatgttctgctggacaaggccaaggatgctgctgctgcagctggagcttccgcgcaacaggtaaacgatctatacacacattatgacatttatgtaaagaatgaaaagtcttcttagagcatacatttacgcagatttctgatattttcatatggtttgatgtaaatgttataggcgggaaagagtatatcggatgcggcagtgggaggtgttaacttcgtgaaggacaagaccggcctgaacaagtagcgatccgagtcaactttgggagttataatttcccttttctaattaattgttgggattttcaaataaaatttgggagtcataattgattctcgtactcatcgtacttgttgttgtttttagtgttgtaatgttttaatgtttcttctccctttagatgtactacgtttggaactttaagtttaatcaacaaaatctagtttaagttctaagaactttgttttaccatcctcttttttattgcacttaatgcttatagacttttatgtccatccatttctcaattcggctacgttgaattataagggtcacataagcaaaaaaatatcttaaaaagtcataacattaaggcaaagatagattcttaaaagtactcaaattgagatcacgaaaataacaagttagaagttagaacttccgtaggatatttataagaacaaaagattaataaatgaaggcaatgattctggattccttgcaagttaggaagttcgaaatcgttgtggtcaatggtcatggtaaatactgatccaattaaaactatatgagaaaaaactggtagctataataaaactaggggctaaactcgaattatcatatcattaagtttttatttttgtttgctctgcgtcattgtgatgggaccttctctttgccttagatggtttcgtttacctcaaaaagtcaaaaatcaaaatcctcactaaaaccctaacatttcccagagcttcgcaatcgctgttcttcagtctcgcttctttgtaaactgtaaaggatcaagcttttctattcagatcaaatccacttcactatacccttttttagtttcgttaacccagctcaaatccgagatgagatatcaacaatggcgattgatgcttcttcgaagctaccatcgttctcatcttccttatctatctccttgttctcaggtaacctccatttcatcgcgatctttctcttctttcattcaccctgggatcggagctttgcaacaaagtgaacaactttgtcccttacgatccccaatgacgagctctggcaacttagtgaaatcagtgggtcgaagcttctcgtccgagcctgcggttgaagagaaatcttctgctgaggctaccgtgattgatatttttagtagattgagtggtgaggatgagattaggaaggagttggaatcgagtggtgtagtgattagccaagatttagctttgaaggttttgagaaagctcgaatcaaaccctgatgttgccaaaagttttttccagtggattaaggaggcttctcctgaggaacttagctcgaagaactataacatgatgctgcggattctgggtggtaatggacttgttgatgagttttgggggttggttgatgtgatgaagaagaaagggcatggtttatcggctaatgttagagataaagtgggtgacaaatttcagaaagatgggctggagagtgatttgctgaggctgagaaagctttttacttcagattgtttagataattcggcggagaatgtttgcgatagggtgtgtaagattgtgatgaaggaagaatggggtgatgatgtagagaaacgggtaagagatttgaatgttgagtttaagagtgatttagtgaagatgattgtggaacgtcttgatgttgaacccaggaaagctttgttgttcttccggtggattgatgagtctgatctctttaagcatgatgagaaaacctataatgctatggctagggttttgggaaaagagaagtttcttgatagatttcagaacattgtagtagaaatgaggagtgctggttatgaagtggaaatagagacttatgttagagtttcaacgaggttctgccagactaaattgatcaaggaagctgttgacttgtttgagattgcaatggcaggtagtagtagtagtaacaaccccaccccacactgcttctgtttgttgctcaagaaaattgtcactgccaagattctagatatggatttgttttcaagagctgtgaaagtttataccaaaaatggtaatgctttgacggattccttgctgaaatctgtcttaaagtccttgagaagcgtggatagggttgaacagagcaatgagctgttgaaagaaatgaagagaggaggctatgttcctagtggtgatatgcagagcatgattgcatcaagtcttagtcgtaagggaaagaaggacgaagctgatgaatttgtagactttatggaatcatccggaaacaatctagatgacaaggcaatggcgtctcttgttgaagggtattgtgattccgggaatcttgatgaagctttagtgtgtttcgagaaaatggttggaaacacgggagtctcctatgctgattattcatttgagaagttggttcttgcttattgcaacaagaatcaagtaagagatgcatacaagcttttgagtgcacaagtaacgaaaaatcaactgaaacctcgtcatagcacatacaaaagcttggtgacgaatctgttgacgaagaagattgcaagggatggtgggtttgaagaagctttgagtcttctaccgataatgaaagatcacgggttccctcctttcattgaccctttcatgagttacttctcatcaactggaaaaagcactgaagctctcggttttttgaaggctatgacctcgaataactttccatatatatcagtggttctgcgtgtattcgaaactatgatgaagtctgcaagacacagtgaagcacaagatttactctctctgtgcccaaactatatccgtaataatccggatgttctagaactcttcaataccatgaaacccaacgaatctgctgtagaaaaacctttggctgcttctgcttagctccagttttagtttacattccttcaagtctttttggtttctgggcatttgattcaaataatttggccagaatatttcctgctgttcccttttgtttacatgtatcactcaccagtcaccagttaactttcttcatcaacctggtgcactggcaaaataattttaaggtactatgtttttttatattccacttgcttatcatcttatgcttcttggctctgccatggattgttccgtgtatcatcattatttgttaacaagatctgtctgtaactctgttctctttttaactttttctccgcactaatgtattgcctattgatcagatactagtgcttgacattaccaaatatcaaattggaagatctttgatgttgagaaaatctgtttatgaaagtcccattgtttagtttataatttgagaagtaaatgatgtgccttttgttgaagagaatcaaccaagcctattgtaaacatgcatggctcatgggcctgaaagattaagatacgaaaactagtccaacatagagagagactcaactctcaaggatagttttccatagtctttgttcttttctgattattgatagaaaaacaggaccacaaaccacggtccgtttagtaattgcatcttgcattgtagtgctgatctttgtcgcgatctatatcgatctgttttgtgcaatcttgatctgtaattcttctgtatgtggatgtttgaaatcttgcaccgttttcattctcattgtcaatagcatcatctctgcaaagtcttttgaaattttctgaagagagtgtggagaaaaaaggactgaacgaggaggaacagatcggtgagagagcgacatagcaacataaaaagacaacaagctttgattaatgttcttacaagaaatgagacaaaagagtgaaagagtgaaataaagaaaagagagagatgtgtcatcatttctctatgattagttgctatttaacaaaggggaccgtttcaaacacttggattcatccggcgggtttctggtttttgaagcaatcccatatgcttcttctttttttcttaggtcggaatttggcaaaagagaaaaacaggtttaaaggtttcaactttcaaaacgaggagacaaagtttcaatcactttcccggcaaaaaaagctataaagaaaaaagagaggatatcaatggtgtaagcactaagtaagcacgcttagttacctgcttgcttgggaccgatttatgtgaatctaatatttacgcatgtttcgagtttaagattttgcttcaattcgttacaaggtctatttgaatgttcttaatatttaacccaacaaaagatttatatatatgaactgagctatatatgagtcatgagtgatgattcctaagattcgtgtataatttttagcttgagaaaaaaaattcaaattgaatgaacttaagatatggctatcagtatttagacatataaataggtggctgtaacattatatggtttcaataaattatttggatttgttaaaatgttgcgacactattgggtgatggaaaatgaaaggttgatgttttgtttataccaaaaaaataattaaaatgaaatcccatgatgcatgttgttgaataggagtagcagttggtgtgttgggtggtcaatccataagcattaaactcattatgtaactatttcaaaagtaatatatatcattaatgagatgtttaattataacacaaatgtcccataaaaacagtggtcatgaatttgtcaacaattttttaatatagaaatttagttgaaattattgtaagattttaattgatcatcttgtgtttaaccgttgacatgaatggtttcttcgaaataagcggatcacatgaaagaatcagaaatattgtggttactgctactaataattgatcatcttagtactgcatattacacgaaacataagctaactaataatctcacgctttgatgtaataatcacctagataaaggaaatgatggaaaattgcttagatgattcattttcattgactgacaagacatagttataagggtaaacgacctgtgtccccatgaaaagttttatatacgctcataactctacagatttcggacctcgtccccagtccacatgaaactaaagttaaaaaccacgttccccctaaaatgaaagttaaagacctcgatccccatatttttgaatttagtggtttataattggtttactgtacggacccgatgccaaatcaaaaacccagttgattaaaccgtatgtatacccgattcgagttattgacaaaccgaaatacccacccaagtaaatacggatgagatgagaagaattcccaaattgaaaaacccaaaaatcttagaaccctagtttcgattttctctcttcaacatcaaatttcttcaattttcaacataagtcagagctctaatatgagaaattcatctggagctacgagtggagcatcaaatgtcggatagagaagaagagtttttggtgtgccaaagctatgttggtgtgaagctagtatctcggcgctaatttcaaagtctgccgccaatccataccgctgttactatagatgtgcttatgatgcatcacataaggtaattttattgttatttgggttgttgtttggaaattttgattccaaatctctgttttttggtagcttatcgatgataaccacattttcaagtgggttgacgaagcattgttagatgagattgagagattggctagaagaacgactgtacttgaagaaaccatttcgcatattacaacagagtccacggatcacaagaagatggtgtttgagaggatgcaaatgaagctagagaaagagatttttgagaggttagaagaggagctgttggaatccaaatcaagcatgaagaaaatgtgcattgttgtcattgtaggttgtatgatgatagttggtttgagtaaagtgataggttgaatagaaggagtagtgtattggtttgttgtgggttcttctatgtacttcttgtgttatgttgtgctttttttgttgttatgacttatgagaaacgtcgttgttataattggtgttatgttgtgctttttttgacaaaaacaaaaacaaagagtaaaaaccaaaagagagaaatagccaaaccaaaacagagataaaataggcaaaagttttgtcatttcacaatggttcttaatgccgagacatcaccataaaagcaatgtagtcaaatggccaacacagagaccaaaattacatatccgaatgaagtcttaataagatggaacacaaaaactaaacccatctaatagcttctaatccttctactcctactaagcattcatccttgagacatcacaactccttgagacggctccacttgactgccttgagcaacttgagatatcactccttcaaaggcctaagacaaaaaacaagtgtcagttaccacaatacattactattctacaacaaaacaccattttactaacctgtacaagtgacttcttcttcttgtgaaacctggagttgtgacccgcgtcaccacaaatgccacagtgcatcacccttttcatatcttttggtgccatctttgtgggagactcattcttccctttcttcctcttcttgtccttcttactctcctttcctttcttcctcccaggctgcggtggtggtggtgggacatggacattgggatgctctgttgatggccaaaaagctggccctcgctgtggaaatatcccgtttatgtagttcttcttccacataggtgtccaaaaccagtgacacacgtaatcttcaacttcaagcttcttatctagcatgactccataagcatgctcacaaggaatgccacaaatttgccatttctgacaagtgcatgtcctctcagtcaaacagatcctctgataatctacacctctttcagcttcatacatatcattggtgcttcttctaattttcatctctgaagctttctcaaactctttggcaagaaacttactaacataaggggtgcatctccctttgtgctcatgagattcaactgatctcattgcaatcctaaccattgcaagtcttctaatagtctcaagcatcggcacaaaggctttatccctagctttaacaattgagttgttgaatgactcagtcgagttattctctacatcttcacagtagtttccttgcttgtaaaacgccctacaccaagttcttggttttgacttgacaacatcacgccagacagcaacattatagttgtaaagcctcgtcaaacccgcttcataagccttctcattgtagctccatgccaaatcccaaacatactttttcatctctttatctttccaatggtttttcttcagattttcatagatgtgtctgacacacattctatgttcaacctttggcagctctagctcaacagctctgatcaaaccctacaaaatttaaaatcataggttattacaagaagatacaatacatgattaaataaaatcgaaagcaaaccatgaaatcataccttttgacgatcagataccatgataaaaccatcaccatctagcagtcccaaatcatccttcaactttctcacaaaccacacacaattatctatgttttctacttgtacacaccccatgctattgggtatatagcattatctgcatctctacctaaagcaaccagcagctgacctttaacctttcctttcataaaggttccatctactcctatcaatggcctacacgattctatccatgttctcttaatcgcatcaaaacaaacatagaaacggttgaatacctcttctcctccatcatttctcaaagtctgaatttcaacagttgaatctttgtttgattctcttatctctgcagcatagtcttgaagcctagcaaactgctcatcatgttctctctctatccatctcaatgcttttctccttgcagcttgacattgaggcctagatacagtgatcttccatctttttttaatggtttcctcaatcttcataggcatgaaatactgaggctcttctctaatgttatctaaaaataacctagaaatcacaggaaccttcaacatttcacaatcaccatttggaatacatgtatgcacatccttgaacacattcactctccacttaggacattttttaggcactgcacaatagattcgccatacacaaccatcaccatcacacttaaaagcaaccttatctttatcatacatgtattgtgcaatgttgcatcctgtcttcaaggcatggtcgagtacaacttccttaaaggctatctcgttgaagaatgtctggtgatagtagagattccctcctccacgtctactgttctcacgctttctctcccgaacaacatcctcatcttcatcattgtcactgtccggatactcgtcgtgaagaatcgaaggctcatctctgaactcatttacggccttctcgatttcaaacgcgtctcggtccctcggatcttcgtcgtcaggaacatcgtcctccattagaatttcttctccttcaaactcttgcggaccagttccggtagcctcctgatgaacgattaaagcattcgtctcaaattcattcgcatccatcgaattcaaaaactggggatttttcaattttagggttctatcgaattagggattttttgaattgggggttttctgaatttagtcgggttgtttgggtaataaaacgggttggtttatgtgttaatccgatttagtttcgttcttatacggttaatgttgtttcgggtacagtaaaccaacgataaaccacgaaattcaaaattttgtggactgaagatttgaacttttgatttagggagactgaggtttagaactttcatttggtgtggattggagacgaggtccgaaatctgtgaagttgtgagtgtatatgaaacttcccataggaacacaggtcgttcaccctagttataatcattatattccaatagaccatgcaaatacaattattgaggtattttattcaaatggaaccccaaattaatttcaaaatttcatgatttcaacggattctaggaaacattatgattataaattgtttgttattgtctacttgatgactaacagtccacttaatttcaggaattgttagtgtaatattcaaaaaagaaaagcttccattccatatgctcttaaatactttttaattttgtgttattaggcctaatacagtgtaaggaaactaatacttttagccaccttaatcaagtatataaaccgtctttggatatcaaataataatcataatctataatctatagtaaaatctcattttcgtctaaccaagaatttgatgacaattaggtgagtgaaaaaaagacaaatacaaaactctaagtgagaaaaaacaaagtcttagacaatcgggtgtatcgaattaattatacattgccaagcatatatagacaatgtaatggctgtaaatggcagaagtagtttgaatcttcataaccgatttagaacacttgaaataaaataaaacgatgagcaatttgtcattgtgtaatgtgtatatatatgttgtgactaacaacttttgtatcaaattttaaactaatttacaaaatctgaagactgtagtaatcacgggaaaaaaactttcgtgagttcatataaaactatggccaataatctaatataaccaatcatgcagtctccctaacatgattgaagttgagacaatttagcttcagtgccctaggcataggactcaagttgggaaccatttttccctatctgcattctgcacaatagttcatgtcatgttttgtaatcttataaaaatttatgattttcatttttgtttcccctgaaagtcacagaacccatttaccatcaaacgtcaaatcaacgagaaaaagcattaaatattaatgattgtttctcataaatcgagttttaagaaaccgtgtcacgtggagaccaaactataaaaacttgactaggaatgaaagtagttcttgaacaaggaaattttatatattgtttgttcaccacaaatttagaatatttgtttttgtttctttccttttggtttacaggtcggtacgcattgatgaagataacgatgatgtacgaatgtgaatatatatagttaaataaatagaaccttgcaaaatcatttttaatgtgtgctccattacaagaaaaataaatgattcacatgtattcttactaagtaaacaacatttcttgatatagtaaacacatattacgtactttgttgatcgaaatcagaatctaagcaaatattattgtgtaatttttctgttaaccaacttttcgaaacaagataatttgacgttaagtttcaaaaatttggttaagggaaaaatgaaattacaagatatatttactagtttatgtaatattataaaaaaacttctccaaaatttcagatgattgaaatctttaaaagccagcataactataatgaatgatgataattaagtatttcacttaaccaggtaaaccatattcgttttaagatcatatagtagtatatacttcgaacaaatgcaaatgcatgtcataatattactgccaactcacacatagacaaaaacccatgaaaacgacacgaggtttggacaaattgtaatgtcttggacttggatactgggttatcttatacatctattattactacacactacaaaatattgaaaatcttattgtgaatataaatcttgtagtagtcaaataaaaaaagagtgggttaaaatatttgcattttgactattaagaaaaggtgttgtattctgaaatttgttatctatacagatttgttttcctgatggaagttaaatgtgatcgttgctcttagtgggatttatcgaatttatttcttttagatctaaattttttaaaagactattataaataattaacttacaacatttttttgaagaaaaaaaagcttatccttcaatacttgtactaatatcttcgtatttccacacatcgagaagacaaagatgctgaaaatttgagtgggcaacaaaatcaatatagtagacagaagtatcttgagcctagtttttcatacagtataatcttctcatcgaagttctcacattctcaaaacatattaatcaaaaaaaaaaaaaaaaattgcatacaaaaacattctatatacggaggaattaataaagtctagcctatgcatgaccaaccatggattgttgggttccgtttacaccaagcaatcagtcaacaatgtgatttaatcatacccttgaaacttaacaactctttttcatcagatttcaacactcgaaaaacaatctatgtaagtgtaatgtgaaataaattaagaaataggaaaatgtaacaaaaacactgtatattctaaactaaaattagaaaccatagacaaaaacatgacagggtggcagctagcaaaagaacagtaatctaatttcctgctttacccttcaaaatttttgaaatacacaaaatatagatttgctttactgactattcttgtcgattacaagaaacaatatgggcaaaattatttttataatatcttttcttacaaatttttaatataaatttattacttttttaacggtctccccacacacaaactttatcgacaagcatgctattctaatttcactttagactaccaatgaatctggtatctctataaagtttgtatatcttgtttctgacatacaaaaaaatagttttttttaaaataaaggttatgcttttggtgaagtgggttcatcttgatgttgaaatgtttttatactttaaccaaaattgaaatgaaaaaaggatagagatttggttttttgattcttccaatctcactctctctgtctttctctctccatcaaataccaaattatctggaagctgagtacatcttgttttctgctcattcctctgtttcaacaatggagagtactattgttatgatgatgatgataacaagatctttcttttgcttcttgggatttttatgccttctctgctcttctgttcacggattgctttctcctaaaggtgttaactttgaaggtatattcactgtaaagtctcactctttggattctctctcttttttttttttttacattgtcactttcgtagatgaagtgtttgatatttggtctttctggaatttttagttgatgggaattcaaataaaagtatatatttcttcttgatccaaactaatatgggagttttttattttcgtcagtgcaagctttgatggacataaaagcttcattacatgatcctcatggtgttcttgataactgggatagagatgctgttgatccttgtagttggacaatggtcacttgttcttctgaaaactttgtcattggcttgtaagtttcacattttacattgatacacttatactgtatattacactgatgagcaagcaaggaaaacaatgatataaattttattacagaggcacaccaagtcagaatttatctggtacactatctccaagcattaccaacttaacaaatcttcggattgtgtaagtacttactgttcactaaatgattattaagtttaaaatttgattaaattcttctgttttgtgtgtgtgtgtgtgttcttgatgattttttcctcttacaggctgttgcagaacaacaacataaaaggaaaaattcctgctgagattggtcggcttacgaggcttgagactcttgatctttctgataatttcttccacggtgaaattcctttttcagtaggctatctacaaagcctgcaatatctgtaagaatagtaaaaatttgttatggatcttttaaattttgtgttgtttttataaggaatttgtgatcttgatatgtcatgttgtgtatcatcaggaggcttaacaacaattctctctctggagtgtttcctctgtcactatctaatatgactcaacttgcctttctgtaagctaataaatcttcagtttacattaaccagtaaagaaattcatatgtagagacatgaaatgttgagatttgatctgtttttttttttgtttccagtgatttatcatacaacaatcttagtggtcctgttccaagatttgctgcaaagacgtttaggtaatttgatttattgacaatgtctcactctttcactctctttgtccgtatgataacctttcattgtttcccttcggattacagcatcgttgggaacccgctgatatgtccaacgggtaccgaaccagactgcaatggaacaacattgatacctatgtctatgaacttgaatcaaactggaggtaaataacgaacttcctttaaaactttcaatcttagtattatgatcatacctaactaacaacaaactgctttcttttttaagttcctttatacgccggtggatcgaggaatcacaaaatggcaatcgctgttggatccagcgttgggactgtatcattaatcttcattgctgttggtttgtttctctggtggagacaaagacataaccaaaacacattctttgatgttaaaggtttgatcttactcagtttattacttgcacagaacaatcttataaagttttttttttttataaagaaagttcttttattcaacagatgggaatcatcatgaggaagtttcacttggaaacctgaggagatttggtttcagggagcttcagattgcgaccaataacttcagcagtaagaacttattggggaaaggtggctatggaaatgtatacaaaggaatacttggagatagtacagtggttgcagtgaaaaggcttaaagatggaggagcattgggaggagagattcagtttcagacagaagttgaaatgatcagtttagctgttcatcgaaatctcttaagactctacggtttctgcatcacacaaactgagaagcttctagtttatccttatatgtctaatggaagcgttgcatctcgaatgaaagcaaaacctgttcttgactggagcataaggaagaggatagccataggagctgcaagagggcttgtgtatctccatgagcaatgtgatccgaagattatccaccgcgatgtcaaagcagcgaatatacttcttgatgactactgtgaagctgtggttggcgattttggtttagctaaactcttggatcatcaagattctcatgtgacaaccgcggttagaggcacggtgggtcacattgctccagagtatctctcaactggtcaatcctctgagaaaacagatgtttttggcttcgggattcttcttcttgagcttgtaaccggacaaagagcttttgagtttggtaaagcggctaaccagaaaggtgtgatgcttgattgggttaaaaagattcatcaagagaagaaacttgagctacttgtggataaagagttgttgaagaagaagagctacgatgagattgagttagacgaaatggtaagagtagctttgttgtgcacacagtacctgccaggacatagaccaaaaatgtctgaagttgttcgaatgctggaaggagatggacttgcagagaaatgggaagcttctcaaagatcagacagtgtttcaaaatgtagcaacaggataaatgaattgatgtcatcttcagacagatactctgatcttaccgatgactctagtttacttgtgcaagcaatggagctctctggtcctagatgaaatctatacatgaatctgaagaagaagaagaacatgcatctgtttcttgaatcaagagggattcttgtttttttgtataatagagaggttttttggagggaaatgttgtgtctctgtaactgtataggcttgttgtgtaagaagttattactgcacttagggttaattcaaagttctttacataaaaaatgattagttgcgttgaatagagggaacactttgggagatttcatgtgtgaaatttgggaattcatgtttgagaatgaaatttatcttattattggatccaactccacaagttaaaaattttcattaatgcaaactagtttcattgtttgttttgcacacacacctgacctactgataggaaaaggtaaagtgaaaaaaagaagaaatgtctctcataaagacaacacgtagttcatatgttgccaaaacttaaacggaactttactttcgttttcaatggatgatgaaacgtcgagaatgtgttttcaagaaaacggcatgaagttgttctctccgtcaaagaaacgacgtgtttgtgtatataaggaaacaccacgtggacgtggaccgtccatgaaatataaaaacggcaataatctatgtatacatggttcacactagattcaaagtcacactttatacctacaaatggaaacgttcacacaatagcttcatcaaagtcagaatcacatatagtgatatgatttggtttgataacattaacaatatgcaaagtcaagaattacacgcacattctatacgtttatatgaaagaaaaagacagttaaaaagcgaatcatatctgcataattgcatctgatctcatgtcggtgtctccttaatccttaagtatttcttatcaaaaaatttgtggctattaatagaagagaactagagaggacaaacaaaatatcccaaaattgcagaaccagcttctttcttccgaagagaaaccaaaaacaaaagaaaatggaaatggtgacaagttttgtatatccaccacctccatcaatattgctcaattgtatgagcgtcgttggtgtagctgctctggccaatatcggttggtctgaaatcagaggaaatcatctcaaatactccaaattcggcgtatcatcatcatcaccacaaccacagaaggagcgattcggcagcatctcaagccgaaatggaatgcttttgctatacacacctgcgtttctagcagctgcgtcttctttcttcgtcgtaccttctgatgatctcaggtttcttcttctcaaatccgcacttgccctccatttcttcaagagggtattcgaggtaaacaaaacccttcactcactctctcggtgacgcatttcgtcgaacacgttatgttcattcataagtaaataaacatactttgactcattaacaatcatcatctaagctagtgaggtaccaatttcatgggttttgattagaagctgtcattaatcatcaaagaagtaacctttaatagctatagcagtatcttcatctctctgacgcatttcatcgaacaggttctgttcatacataaatacagtggagggatggctatagactcagctctcaccataagtagcagctatttctcatccacagcattgatgttatacagtcaaaatctcaccttgggacttaccgagccgagtttcgatatgaaactcgccggagttgtgatgtttgtggtgggaattgttgggaatctgtatcaccatgttttgctggctaagctaaggaaagaagatgggaagaaagagtacaagataccaaaaggaggtctctttgatataatcatatgccctcactatctatttgagatccttgtgttttggagcttctttctcatctctcagaccatttattcattttctttcgctatgggaacaatgctctatctcattggtcggagttatgctacaagaacttggtatctttccaagtttgatgacttccccaagcatatcaaggctctcattccctttgtattctagagttttgttgttgttgtttcaagtgtctgaataaaactaagagaccttataggttcatttgtttaagttgaatttaataataaatcattagaaatcattgaatcattaacacgtgttttcgacaaagatttaaaaatcaagaatccaataacacaatatttttgtgctttggattacaaaatcaattagaagccatggcccaattaactcgcctagaagttttgatttgtatgttaaatgttttagtgagatactcaaaatactctcataaaataaaatttatttacacagaatttagtaatcggtaatcaccaccacacgcggtaaattcgagtggatgcgatttaacactgaacggtttgcagttcttgttctaaatggataaacggcacagtgtgcgaatttgtagtaaaccgttacaagcagtactctctgtttcggagtaaatttgaagaagtaaatgaaacgatggttcatttccgttcaccgtaagttttcccctctttctaatgttttcgtcgatctcaagttacagagattgataaaccctaagtactactttcgaccttattatgattagtctggatctaatcgtatctaactactgcgtcgaattgatctcgttatgatgaagaaaccctaatctcgttggcacacctctctgcaaaaatctgcgacaatggtggcttttagattcgtttatatccccttacccttcttcttcttcttcttcttcttcttcgtcttcttctccggagtctctcaattacaaggtaaagaatctctcaattacaaggtaaattctttctcctgccacatgcgacagtttttatttcccgcaaagaagtaaaatagtttaatttcaaaatcttcagaccaaactgcgactaagaaatctgttcgaatcctctcgaagatactcattggcgatgacggcagagtctacgcttgctcagacaacgacttcttctccttcgagtctaacggatcaatcgcttggtcggtacacatgaatttcaaatgtaacaccgattttgccccggtttactctggtttcaaccaggtacattcatgaacaatcactctgtttttgttttttcctctgaatttcttcttaaagtgatatttgttttttcagatgcttcttcttgcagaaaatcgtatcctgagagtcatttttccaagaaacggaaccaaatctgaaccggaattgttcttcgatcctggtgaaacgattctcggtttcgcggttagcgtatcgagttcttccgtgtacatcacggttaagaatcacggtctctacgcttataatatgtttcggcagcaactctggattgcagagcctaaaatcgaacgattcgggtaccgactaggttgtcgaaaagattttgataattgtacattcaattctcgaccagtgattgattcttgcgaaggaagcatctatgtaagagatctctgaccctcttgttattctccattcacgtttcttcaatgatttttgctctgttttaatttcttcagatttcaaacaatgaaggagaactctactcgttatctctccgtggcacttactaccaatggattcaagattttagtctagtggatcgattcttcactgttacaccggggaataacggtctagtctacgtcgtttttcctatcaaatcactcgttttcgcattagattcgttttccggcgacattctatggcaaaaaaccattggtccattggcagaaacttctgcttcagaccctgtcatagactcaaacagtcagtttcataaacaaatctatcaagatactttcacctctaaaaccgatcttttatcttcttcttctttttttcacaggttgggcatcgattggttcactagatgggacattgtactcgttctcaagaacaggggacctttataagatacctaaaaatgcagaaacagattcagtgatccaaatagagccattactcgattgttcgggctatgcggtttatgtttctcagactaaattcgaaggaatgatcgatcgtgtcattgaggattacacttatgtgtcggccaagaaaccagaaacagcggtgttttcacttgtagtcccagagacaagatctatctactggtctcagagttattctggtaaaactcaaatcttaactaagactactgttagtctcttagtaactatatatagattgttatgatttgaaaataatggtttttgtatcagatcaaattccgggtttgttattagacgaagatctacaacattttgtgttggacgagaggattgctcttgcgtttgttgcagcctctagttctggaaatccatttcgatgtcgttctaaacacgaaaagctgtcatctagttgttcatttgcagaaccagagcatcttgatatctacattggtaaacttaactaaaacatgaacactttaaaattccagtatctttcaaatggttttcttggtcattcaaatctctaagagagactgttatttttttcttttagggaacgaaagagcgatcatttggtttttactgttcgagtttgtgattatggtcctctttgcggctcttgtgaggttctgttttatattctggaagaaaaagaagcttcaagatcgtcccttcagtactttcttggacaagcgagtaagaaaccctagcttgtgtaacaaggatctttaacttcatttacatttcaagaatcctctgttttctagtatctcacagtccatttttcttccagcgtttgctacacaggaagagtagagaaattgataaaacgataacgagacttcaaaacgaatcaacggccaatgaatccgcggttgataaaatcggtgatttgattcaaaagagggaaaacgtgaaaaggaaactctcgtcgacctatagtcttgggagagacatagatgagtccaagtctaagttaaaagattatgttcttcccttgtacggaggaagttctagaagcttctcttaccgaaatagggaaaatgagagtattacgatttttcaaacaccaagcgatgagtcatcctcagaagagagctatagggacgaacattatgatgatgtagctgatgatgaacatgatgaagatgacttggaccgtaagcaaaagggaaagttgcttgctcattcagagggttcttccaatgatggtgatggtattgcaagcagtagaagaagcatatatttgaagcatatctttgacgactaattaagggattgaaaatttgtattgtgtatatttgtagttatatctttaacaaaaaaatatttatagctgtgtctgatctattttatagtaagaaaaccatttgtctttatctttcgatatttataattcaccatgttagttgtaacttgtaattatcaatataaaacttgaatccaatactagataaactgataactatcatcactgattaatacatttgaactcttaagcacatgatgaatcagtattaaatgattgcatagagtaacattagttttaagaaaaacaaccatcgatcgaccggttgaggccattatatatacaattcggtcgaagatcacaaaaaaaaaacataaataaccggttttctccccaaactagcactaatctttcccgcacgtaacaagccacattcacacatgcacacacacacgtgtatacataaaataatacatttagagttggcattgataaaactttgttttttaatcaatcatgcgaacaaaggagcatgaccatacatcttctgatgatgtaaatccttcccttttgttccttcatatacttccccaatcttctacttattgatctcttcttctcctttgatctctctgcagagctcatcatgaccctcttcatttccattttcaagctttcaaataacccgtttgatatataacaatgcttgaggaaaacttttaggtgagaaagttttggtctttaaagactaagctataaaaagcagaattgtttaatttggtagctttatgctgatagagaagaaatgagctttggagagaagagagaattgatttgaatgagaagttacttgtggtggtgtgtatttatagagagaactagtggcatgcatgcatggttacagcttttattaaattatatgtatcccaaaaaatgaaaagtgtactaatcaaaaaaaaaaaaaaaaagcacttgtgtgaagaaacacttgtaacaaaatgaaaaaatatatatcaatgacttcatcaaacccaacaaaattgaaacttgtgctgattaccgattatttattactctagtttttttcaatcaaattaaccaaactaaaacaattaccaaaccaagttcatataaaacacaatcccacatgtcttttctcgtgttccaccatgcaaccaaacataacttgaacctggccttgcttgcttcaaagtccccactaaaccatacaacttaacctctttaacttatcatacatactgtattgtttgttaattaatcacatttcaaataccaaagcttagattaccggatactgtttaaccggtggtcaccacagctctattctccctatgtcctatttcaagacagaactttataatttacggggcggaaatataatctatatatccactatatatacaaaagttgccagtatatttatcttctaatataaaaattatgtggacatgtctcaagtagatgttacgtcgcggggtcgtttagttgagagagactataaatttatccaatatcccaaagacaaattatttttcaatggcttacgttcaaattaccctaagaagtatcaatactcaagagtccaattgaactttcagaaagaaaaagagaaaaaagaagcaaacatattgtaatccgaataagtttctataaaattaccaataatgcaatgtttcagaagtaaaaaagaaagtaagtaatcagggacaagccttgaaattatgttgtttccaaagttcatgttccctcgttttccaatccattagtaatttattttataaatacttgttatttagtaggaaaaaaaaaaacagtaggaaatgaaaaagatgtggagccaaccacacgtgacattcgcgtgactgcatatgcttactgtttggcataatccagacaaccttgtgtatcttgtctccttgataatattgatgtgattaactactacagtattttcttatttgatacaatattttgttgctcattgcttaaataactatcgattagagatgtaacagtgaacttgaacatcatttatgtatcattaggccctatctttgccttggattaatcaaagattgtgtccgtaattaaaaacagtactgtacggttcaacgaatcaagtactagttttggctttctaatactagcttggtaaactaatcattgattatagactttataatagggtgattagtttctgttttatgaagcatccgatatcttggtattagtgattttagtttggactcctcatatatagatattgatacatatttctctctaattattaattataggactttctatgtgaaatcattttacaaaaatattttacttacaatcatataaaaatactttatagaaaaaaaaatttgttcgtaccgaaaaaagagaaaaacttttgtctaggatttcttcatcgagccggtgtgattagtttacgctttcatggacgatagttttcactgatacatcgctaatgttatatctctgaaggaccaataataaaaataaaataaaaaataaactgtaaaattggccctttagaaaactattgtccattaatagctttcttcaccgttgcgattagtttcactaatactgaacaactaataaattcatatgcatacaatctaaaaaaaaaaaaaaaaatcatatgcatacaatctaaaattctaaatactgtatgttgttgactgttgagctaaagtctaatctcacaatcaagcatttatatgggctaatgaacatttacttattgggcttttatggactcaagacatcttgaacagcgttacaagtcactccaagttttctttttttaatttggacattgggtgatgatgacacgtttacaaactatttaaatgttgaaaagcaatatttgaattacgattgtaatcataattgatcactttaaacagaaaaaagttggcggttcaaaaatttcggagattaatgttgactacgtttacgaagtctcaaggttatagacaaaaaaaaaaaaaagttaagtgttgtatcccctataacttagttactaactgaaaagttttaacgcacctcaaagtgcaggaagtcactagcctaggccacggatcttcatgattacccgttgaccctgtccaggacctccaggtaagtctataacttactaattgaaaagtttaataattaatctcgttttgtattcaatgggatattttttaaaaaaatcaagggaatattaaattttattttcagtatagtagttcccttagtgtgttgtgattcttttttttcaaattaaatctgaccttgcattttcatgtttttgtttttactagtcttagttataggaaataacatattcaatattttttttaaaaataaaaaaacttcacatggacatgtactatctcctgcaataaatcttagattggtgacattggaaaagcgattcataaataccttactctatatgtgtaaaaagagaaatggtcatgatttgtactacaaaccgccaaaaaaagaaagaatcggctcaaatttgaatttcgtgggtaaatttgttttgagatgaacaacaaaatagacaaaacaaaagacaagaagtgagaatataaataaatcaaaaataagaagagtgaagaaaaaaagaagaagataatctgcaagaagaaaaagaagagacaaagattataaaaatgaatcattttccttatttcacctgtcacaagtgatgcctacatttgcatgcatcttctgcccccaccacaatcattagtttctattgtgggttcgccatttagttgcttaaccgaccggttcaatcaatattccttaaaccaaaaggttttgaaactatataacaaccacggatttatatatctttaatatgcacaataacttggaacgtttgatattttgaaatgctaaatctaagtttatctttctgttttgacctaataaaatctgagtgtttttttttgtgtttatttatatcagattggtttatgttttcagttatattacatttcaaatgaacttaagtcttttagttttaaaaaaaaatctaaagtcttttaattattaacgatcatctaagattcatttagtccaaaaagataatataaatttcatagtaaaatattttcatcacgttgaaaaaagcataatgaaatatgagtagagttcagttttgatataacaatgatgttagattatactaattcgattctaaatgttaaacatccattcttttacgttttaacttctaagattcgagagatttacttatttgcaaaaaaggatagataaaatttcatagttagtcatcttcaccacatgtacaacaaagatgaatgtgacattcacatggacatggatatatattgatatgtgtacgaccacaaaccactatttgtagattccctctatatagagtccactcgatcacacttcaaatcaatttgcctcactataaccaaacaaaagaagaccatgttattgaaaacaacttcactctatactctatagacacatacactactttacattttaaaaaatcaaaataaaccatatcatcatatataactccatatcatcctatccattcttcacattctgccaactcctttaccatgtgccatcatctctcttctttggtccagctctttttcagacgttggccaacaacatttttcgttggtccattcttaaaactttcattatttccccacacacacacataattaattgttactatgggataataccgtatatatagtagtacactgtaaacatatatattctattcttataaattgttaattcacttcattagagaagaaataaaaatattcgattaattagcaactacttgatatgtaagatagtttcgggttagtgatgactgatgagtatcaggcctcaagtgttagctaggattatcgaaacttctagttatcggtatttcttttgtaagtccaccaacaaataagttaatgaaccgtaattcataatgtaatcttaaggaccctaaatttacgtaggaagatcgaatcctaagaagattttaagtatgcggtcggatagaaaaacacttgcaactacgacaagtcaaactagtttgcattacttttcctttaatgtatcgaccaactaaagttagtattaagtcgttttctatcagattgttcaaatttttctatttacatcaaaggatttcaacatttcatatcaatgaacattattatatttggtgaaatcacatgtggttattaaccactcttaaaagattttgtgtccaccgttccaaaatctgtgccatttttttcaactcataaatagtgtgtaccagtagtaatactactgtcacttgaaaactacgagctaaaataaaataaaataaaaatatgcaaatataattttcaacaacagtaattccgtccaaatgaccaatgtttgacaattcgttcatttgttttttgcatttggtgtctctcaataagaaattaatgcaatataaattgttcaattaagctaatatcgactggaccaacttgttaaaagcagtttaatatatgttttaaaaaagaaattgaactcaaaacctttgagaacaaagaaggaccatatttttaaaaactactacaaaatatcagaaaatgccaagtgagtttgattcctataaatggattacacccaagaaaaaacaaaactgctatactgtatttttttaaaaatacagggcaagcagtcaatttgattaacaacctctatatattctagtttttttaaaaatatatatattttgaatctttcaagaaaaaacaaaagaatttaaatatgagtaaccaataaaaacttttgaaaaagataaggtacaaaaataattcgttttttcataaagtaaaaaacatctttttataggtactgcctgatttcttcattctccctccttggctcaaaagtttttgctttttcaaaaaattaaagaagaagaaacatctcgtttccatggctttgcgaggagatgagcatgagtttatgaacttaagagaatgggatcgaagagctcgattaatccgcgaaaacccgagttcaagaagattctcagcttcatacattggaagcttccgagaagatcaccacaagtcttcttttagaacaacaaacttcaacaacatctctagtactgcctcttctcctggctacactctcaaaggttttataaatacctctctctttgtcccaataagtttatgagaattacttcttctgaatattttttgaattttcaaatctttttaccacagaagagattgacccatcaacatattccttcaccaatgcactcaaaggtaagtttttgcttttctcctattgaacgttcgaaaggacagaacaagagagtaatgttccaaatgtgttttgtcttgtttcttttgtttgtagcagcattacaagcaaagacaatgtacaataacagggaatggttagcacaagaagggtttgcattgaattcgaagtggaacgaagcagagaaatatatctgcaatccattgtctggagaagtaccaatggagtgtttgtctgctaaaacattaagtgcaagatccttcagaaacttatcaaccatgtctgctcctcttcacttccctagtcccaatccattgatgaataatattgctcaaaacaaaccaaataataatcctaacgttagagtcattcacgaggatctttatgctcctgatcctgaacttcttgctctaggtgattgactttaactctgtcccatcttttagatttttttttaggtttcttgaagtttgttcttgattgggttttgctgatcaaaagtaaattatgggggggtgtttttagcggaaaagaaagttgtggggatgaagcgagatgtgggcatacagagtacgacgtcggtggatcttagctccggtagccctagtccggcaaaaacgcctccgattatggaaaggtcgttaaaacgacacgtggaagctgatgattggccagtggatatcaatctcaaagtgaaaggtcaacaacaggtatatataatatcaatataacagtaattcaaaaagaatttatttcatttatgtttatttgagtttgatttaaacttcttaaccaaggattactctaacaaaatccagtaatatttaccgtagcctaaaatattaaggaaaaacagtatcaaatcaaaaaaaaaaatctattaatttggtaaaattataatttagagagaaaaaaatgaaaacttttaataaaaaagtgagaaatatttagtcgctagcgtgaggtccatgcaattgaaaaggtacggaaaaaaataataattgcataaaattttgaattgttcgtgcatatgcatcaataattagatactctttcgcaagataagaaaagcatcaaagaaatgatagtaccaaatgttttcatggaaagagacaatgataaaactcttctattattgtttttgtagatatgttacatgattcattttaagatttaagattctttcatgatatatgaaacatagtacacatgaccgtctatgactatatatgagagtattaatcatagaaacacaaaaccgtatttcttgaaaatatatctcattaggccccatttcatgattttgtctccaactcacgtgactaccatccatattctgtattttctctgtacatttatctaaatatacagttatagtcactcttatgattatgagtaacatgttatttaggagtaagtttttgtaacttgataaggcactgatagcaatctcattctattcaaactcgattagagaccttagaagtttgtttcatcaagtctcaccagtccccaactttacatgtggttttacctttgagaaagaaaagagatgatttacgtttgtataactattatcaattgctgtttttggacatgaaactgtagataatttgccaaaaggccaaaaacacttgtaaggaaaataagtcttatctatattatatatctaagccttgttcttctcaagatattacatgttaatgaagatttatttgagctttgaaggatgtgaagttggaagagaaagaaaaagaagaagagaagcaagatatgagcaacgaagaagatgaagaagaagaagaagaagagaagcaagatatgagtgaagaagatgataaagaagaagaagacgaacaagaagaagaagagaagaccaagaagaagaagagaggacctggatgtttctcatgggtgagatcaagacaaagacaagcaagaaaatcaaagtatatcttccctatttgtgttcctcatcttgtcaaaggttgttgaaaaacctttaaaccgagagaatcaataaaggtttaaaggtttaaaccatcctttcaaaggttcctcttatttgtttctctttttcaatctattttatattatcaaaaacaaaatcatgatgatattatatttagttcttcctctttcatatagattcatcattcatgggagtgtcaaaagcttaaccatatgcttttgctccccttttctctataacaaatgcttatctctagagtccctcttgtgtttttgtttttttgctcgctctatcttcttcatggttattctgtttcctcctgatcatacttccattccacaattgctagagtgtgtcggccaccacaagctacatgtttagctatccattttccatcgtcttcttcatcggtgtggttgaaccgtccttctggtggtggaatgtgtataggaagctccaatggttgtcccgtagttacttttcttccatacccgagtctaccgtggtctccccgaccaaactgatcacaggaatcaatataaaggagaggtttatagattgactttgggtttctaaccaacaatgttttatactctctaagaggacttaccgagaagatcctaccgtctcttgtcaaagcgactgaatgagttccgccacaagagacctgagaggaaaaaaaacaataagagctttcaaagctatgagaagagtcaagaactggtggtttgtactttttacctgaatgatgtcttctccagctaagagattaactttctgcggaagcattttactgctcttatcattgtcaccaaacccgagccttccatgctctcctcttccccaaccataaacctaatattggacatagccaagttacaacatttttagagtaaagatctacatcaagctcagaaacaacccagtaatgactcgatcaagagccagatggaataaaaagtgagaccctagattagtaagagaatgtatgacttctaatacctctccttcattggttaaagctgttgaatgccatccacccgcagcgatatcaacctaacatgaattcagaggaggaattaaactttaacataggcctttatagttcacatatctgaaggcatcagttataataatgagtgcttaaaccagaagtcttagactacataccaaagtgagatcgtcaaggccttggacaggaataggatacgatctcggttgtgtgtctccagttccaagttgtccatattcattattaccccaagcccacaaagtcccatcttctttcagagccaagttatgaaatgctcccacagcaatcagacgaacgttttcaagaccctgaactcttacaggaacagaaatttgttttctgcgatacacaggaaacaccatataaaccaacagaagacaagaaaatgcaaatgtcgtatccataaacgaaaggaaatttggataatacatgtcaccgggaggccacggttgaccccaagtccatacataaccttcacgggttagaaccacagagtgagtaccccctgcagctacctgttattttaatcatacaaacccgagaacagatggtttagacaggaaaaaaagagaactaaaaattgaggtaaatgaagagaggttagcagcataagtaacctgtcggactgtaagttgctgggcacaacgcttaggtattacaatatccctccgcacaggcctacctgtctcatccttggaaggctcttcaccacactgtccatattcatttccacctaagtagattatataacaaaaaggtgaacaacttaagatcattaagatcattgaggtcacaatcattagaaagaagctgagagagaaaatgcataccccaagcatatgctcggccttgatcatcgacagctaaacaatgccagccaccaatagctgcctatgatcaattacagaaacggcaattcagagtaaatcacaacgaggaaacagcattagagccaaaaatacttaaataattgtaagaagttttacctgaacaatcttgacgttggcaagagacttaactagacttggggtgctttctgtttttgtctcaggtgggtgtcctaatgtacccctttgattccaaccccatgtaaacagctgagaaaccatttaagagaccatattatttctatatgttggtgacacatcaatcataaactacaccatggagacaagaaccagagtctgatgatctattcgagagtaacctcagacaaacatattggttgcattttagttggacttcaggacaagaaaaaaaatacgagctttaaaccctttttaattggtcctacagatctcaaaaaccctatgtaaagcgaactaagaaaatcttaaagacatggcttagaatcaaatcgcaaaatcaaagcaaagcattgtactttagttagttctaagcgaaaccaaccaaagaagacacaacaaggacacataaaggaaattggataagtaaccttgccatcatcgcaaatggcgagggaattgcggctaccaccgacgacggagcgaacgttgaaaggctcaagagcgtcgacgacggaagccaattccttttcttcatcggttccaagtcctagttgcccatcttctccagaacccctgtgccaaaaaatcaaacgaaggagcaatagcacaagtcagaaacagtaatggagaaaaacaaagaggtagaatagaaagagaaatgaccaggctatgacggaagtagctgaagccattgaaacaaaagtgagagatacaattacaaatgagagagaaagagatatatatgaagaaactcagtggaaaagcagggcactctcggtgggatttcaattcgagatattattatgtgaatgtgtcattacattaattatttattttggaccagttaatgttacctcccattcccatgtcatttattaattaatccaactttttagcttatggtcatggaggatttatgatttgtaattccattatatgtgttacctaacagttgttccaaaccgaaagaggctttatctttcgtttaaagttgtgaaattccatttctatttcgtttcattgaacaactctcttgagtcttaaccaattccatttggggaacattccacctagagaagcataatctaaaagacaactaaaccccaatcagagaaggaagcaagttttcaacttttagaccggaccatgtaatgcaatgcagtctaatagtgaaaccggcaacaacgacaacaaccaaaacatgtgagaagcacacaaagagttttaaccatcgataaccaaatcatgcagctacaattactactacaaatccatgtttaaggaaactacagcccatgtttaaggaaactacaaggtttttttctgtttaaaaacacagaaccaagccatatatttttttgtctgcaaatcattccatggatctgattttatcactgcgaaggtggtggttgggcttgttcatcaactttctgcacctctttcggggcttccttgatatcatcaccagcttcgtcctggagattagatattagacacaaatgttatgcgaaaaccaacaagaatcttaactgcatgatgcaatcactaagatattgctaacaatgatgagtgtaaagagagacaagtacattgaggtcagaagtccagagggtgagattgtcacggagaagctgcatgatcaatgtactgtccttgtatgattcctctcccaatgtgtctagctccgagattgcctcatcaaaagcctaccaccatgaaaaatcatattagtaactaaacaaaaggtacttgaatcaaactagaatccgaatgtgaaggttgtccaaatttcactagtgtatggaaccattcacaggatctagtttcccaattctgcccatcatcaaaattaactacaaccctatcggtcaggctatggtaagcaatctacaaaccattactagaacatatggaaagtctacccacatggaagtgtaacaagttaactacgtaacacgtttttgccacattatgaacgatagatagaaaaaaagaacctcttatgtgctaagtttaatcaagcaaaacagttggaatataggtttgttagttaatgacagaaagcatagcataaatgaaaaagtaacacagacctgctttgcgagactacacgcacgatcagatgagttgagaatctcatagtagaaaacagagaagttaagagcaagccccagtctgattgggtgagtgggagccagatcagcaagagcaatatcctacataaaaacacaaacaccaatagcatgagacaacatgttatcttagcactctatatggttaagaagaagaaacaagatgataacctgagcagacttgtaggcaacaagagtgctctcagcagcttctttcctctcagcaccagtcttgaattcagcaaggtaccgatgataatctcccttcatcttcaggtaaaaaactttggactcagccaaagaagcagcaggaatgagatgagcctcaagaaggttcaaaatgccatcacaaatcttgctgagctcagtttcaatcttgcctctgtaatccttgataatcgaaacatgatcactgttgcccctgctatcttccttctgctcaatggaagagataatcctccaagaagctctcctagcaccaatcacgttcttgtaagcaacagacaagagattcctctcttcaacagtaagttcctcggtctccacggtctttgcaactttctccatgaactcaaccatttcctcgtaacgctcagcttgctcggctaacttggccaagtacacattctcttcccgggacgaatcagaagacatctttgcaatactcttttaaaaacctgttttcaacaagaaaatatcaagcagcagcaataaacaaagagcacgaaatagaactcagtaatgctgcaacaatcttgcattcaagagcaacgataacaatcatctctaacaaaattaatccacgcacccaaagaataaaaaactttgacaaacgatttacactgctagatctatccaaaatcgatagaacgaactttgaatcctacagatcttgaagtgatgaccaaaacgcgaagatcaacaacatatcaacaataaacgcagaaaacgagaagcagaaaaaacattgtcgaagtatgagcaaggaagatcggaaccgtaccttgagaaatgggaattttcgaattagggcttttgaattcgaagcgaaattaggggaagtgagaaatttgggggagacggtctcgtgaccattaaatgggaaaagagtaaagagagagagaggggcaacgacccaattaaaatacgacacgtgctaatctgttgaccgtcaaaggacttaattctcgtccataattttaaattgaagtgggtgaaatgtgacgaatcataagttaataaggtcattcatataatacaaaaatattaagggggcaaaatggcaatataagttaagtttccttggggtaaatgacggatttaccctttgccctgaacccatttctagtcccctttgcccttttgatcgaattgatcggagaaggccggaaaagctcgaaggtccgtcgtcaatgggtagctatgtggagcaagctcgtgaaaatcacgtgaagaagaaggtcgaagaaggtaatttgacaatgtcgtgacttcttcatctcgctatgttttaaaaccctaaacccccaaatggtttttttattgcctcgaaaatgagatcaaccatatcgatactatttaagcctggtttcttatcatagacgcagattcttttgctagattgaggattagggttctcataaacccttggtagtaactccatattttgcatctgatctagcaagctctcattgagtgtgtcaaattgcttctatgaattgagcttatagattgtgttgaagttgaaatggtgatggtttttttttgttaaatggttgtttgattgattatgtatatactttgttattagcgctgcgtagcaagatgaaggcaaaggcattaatggaatgtgatcagtacgtctccaagtatgctcaatgcgcaacaggaagaactttttctgtggtatggacatgtcgtaagcaagctagggagctcaacacttgcctccatcaattgtaagtttttcgagtttttagtgctccttccattagaggtgtcatctttttttcactgttacgtataaagatttgttgtgtatgggggcatctgattttgattattctttcttaatacccttcactggtaagtctgatatgatgaaatgagacaacttgtggttaggagatgcataacgttatcatgacgtaccagtgctagtatatatatgtaaccaaatataagcttatagaaggggatgattgatgattctttgatactgcgataaaagagaagtaataactatcttctatatcggtgtagcacagtcttgttcttggtgcacaagttctttttatgtgactccctaatgaacgtctcccttgttgggccgatgcttaaatgttgtctaaccatgaaactattttgttgattctgcagcaccaatgacaatgtcttggaggaaatgaagagagcgtatatggttcaagaagagggtaaagtctcagcctcggccatatagatgtttgttgaacaaaagatttgagtacgaccaatataatgtcctcgctttgtttcttgttcattgcgaaccaaaatatatccttttttataaataaactgtggcctttcttaaatatgggtgtattcactaaatctagagatcagattcaaatagattttgtattactattttttatcattttgcaaaagatccactacatctaaagatcagattcaaatatgtttttcattgccaaaaagaaaaaaaaaacatatgtttcacaatattcaggatttacaccaagaaacaaaatttgaggtgcttacaaattagaaaccaagttaaaagcaaaggacttcaagcagtaggcttcctcatatttctgcctgcacgaatcacttcgtccaccaaaagtaattgcgacgcaatcactggcctgcaacacaaacaaatagccggttattgaaatggtttcaaccgaaacccaaagcttttattagaattgactagttgggtcgaacattaccctgaattgataagttggcgtttcactgagtaattatcaaaaataccagcaagctgcgggtcaataggttcaccgtcctgaaggttcagtcccacaacgttccctttgtcatgctcgctctgcataagcgcatcacaatgagcaattctaattctttgttccttcaacaattgatttcagtttgcagaagatgataagagagatgaatgcataccgtaagagaaatgatcacatcttgggtatcaagacctgcattttctgcaagtgtcttaggcaccacgagaagggcattagcaaaagcttcaacgccaagttgggcacgctgcaatgttcatgatagtattagcaatttagaatattgggatgcattaagtaatgttgcgagaattagagtacgagtgaagaaatcaacttaccccttgaacggttttcttgacttcattgagtaagtgttgccttgctgcaacttcaaaagctcctgctccctacagaaacatgcaaccacacattaacataacgcaaaacatatacaataggtctatatgctaaccttacccagggttttgatcacgaattaacaatttctttgatattgcggagaaacataaagcaatgttaacaaaaaaacttcaagatatataaggtacttactaacacaacacactcgtcttctatggtgttcttgaccgatctcagaccatcacgaacagcgtccttaatttgggcaatagtgtgatcattaggccctacaaaacccaagaaattcatgaatgaacactaaaactactaaaagaacaaatgaaccatcaaaacttaatgaagacataaaagtcgtcctaataccttttatgaggatggtacatgaattaggattcttcacttgctccacaaaggtgtacttttcctccccaagaacgtgctcatagacaagtccagcccatccaagagactcaggggtcaagtcgtcaacagaattcacagcttctccaccacaggccaaaactaaacgttccatgttcctcctctttgctcttctaagaccaataatctggacacatgaggaaaggtaattagattcaacagcttctaaacaagagaaattaggtacaaaagaatagacaagctcagtcagtgtcccagaactaaaaactaatgctgccaatcgtctccatggattattgtatatcgaaggaactactcttttaatattactggcaatttcaattcacttaataacacattcttccctagtatctttcttcttgttcctaaatatcacaatttcagcgatttgtaacataagtttaaatgcaagaaaacacagaagtagcttaccccttctctagcaagaagatccaatgatggtgggtcaatacccttctgatttatgacaacaaagttgtcattatcaccacacacctgcacaagaaataaaacatgtattagtattttttacagggttttaaaataaaacttggagaaatggtcgcagtcccaccttcttcttcagctcaattattttcttaactctttcatcaacagatcgcctctctgcggtaaccatggcttccctctgctccgcattagagtagaaaaatcctgcattgatttcactgatagataaatagaaatattagtccacatcaccagaaacatccaggcctttactttctcttcgccaaattgaccaaagaattatattacacacctcttctcatactctagtgacacattgcaagttaagatgtggcaattttctgcgcgtcgtttcatgtcagggtgtctcgaaccatgatccagaacaagcccctcaacctaattcagaattaagtcagtgtttccaacaggtccatactataaaccggcaagtatttcatatataaacctataatgagggaactattttacaataaattaagtcaagacataccaatcgtgtgtcaacatcgaatttgtgacgcatgtgcattatttccaccataaacagatcaatagcttcctcaggctttcggatgcaaagaacctgtaatgtgaggaaagtagataattagaagacaaacaagctcgaaaaccaatattggtgcatagatgagtcctcatctgtgtgaacaaaaaaaatgaaaagaataagtgagattccattagagaacagttaactcaccgaattgacgacaatgtcagtcagttgatcagctaagccttcgtacaactacacaatccacaagagtaaatcgaaattagaaaacgaaaagaaaaatcaaatgaaaagaaagataatcataaaatgaagaatacttttgttcttagtgtcgttcttgcaaccatttttaggatctctttatcaacttcatcacccataacaacaggggtcttgaagttgtcaagaaattgaagagtagctctcttagcaatctcgaaaccatcaactaggactcgtggatgcatacctgatacagtataaaccttcattaggattctggctacaaaactagataccagttgtgcattttctatacccaatataaacaaaacttggcaaatcaatgtcgctgaatacaaatagttggtccccactaataacacatagattgagaaataaaataaaaacaagcatataggagtataaaactaacgaactctcagcaaacaattagcgacttaccttcatcgatgcagcgttcagactgtttcataagctcaccaatgaagataacagtggaagtagtaccatcaccacttatatcatcctgtgcaacagctgtcctcgcaatcataatggctgttggattctgaatttgctgcaacagttaagaaatcagagtgtaagcatcatcgaaccaagataacttgtaaaggagcataccagtagcccatatcaacaccaaagattatccggcagtatcttaatcctttcgtctatcttatctagcgtagtactaaatgacacaattcacgggcttctgagcacccttcaacactaaaaagccaaaacagagctcgattctaacagatcaatacgatctagattgattttaaaagatcaaactcaccatttccttcaatagcgtgttcccatctttggtaagcttaatatccccagaaccaccaacaagcctgcatcgagtgagaagcacatgaggaatttgaagataatgaacagtatatacatagatcagattaaatcaagaggataaaatacattttgattgttcctttaggaccgagattcgacttgagtacatcttgcaaacccttggcggcgttgatggtcatatgaagcgccgcagatttgttgagaacctcggcattaggattcagaactcgcactgacattttcgataacctttggtgcacagattcaggacacgaagagaataacttgagactgaactagagagcgagcgagagagagggagagagctttagggctttcttctgggttttaaaagtgaagccgatgttgagagactctagtcgctctagagactttaatattaacctgaaattacaaaatttacccagattataatatgttttacatttttagccatatattaattgattctctaaaaatcatatattctccaacattctgcaatattattccgatcatcatttgaagaaagaaatttaattataaacgtaatataaatttagacctaaaattagtttttttaattaatacttagtaagagtaatggtatttcaaaatttgattgatttgatcatttagttttgtagtctatttaggattaaaaacaaattcgttcgttagcaactggctgatttgactatgcttaaaacaattttcagatgaaccattgcgttagctgaataatctattattggaatcaaaattctagtcaatgtgtaatatatggcccaacagaactaaaataaaaacgggttggggatagtgatggtaaaatggtttgtgttttggaccattaacaacttggtatacacacacacacgtatcgaatttaagttacagatcttgataccaacttttttatttccttgttatcaatagtgattcgtaccgaacaatccatatgaagaaagccccgtcaaaaagtggaggaaaagaaaagaagaataaatatcgtcttcttttatgtatttgggagtttatgaccatacattacttgagtcaattcctttttttgactcgattccaaaaaaaaaaatcgtgtgaaatgtacaaaaacctaacctcgtggataaataagcaatatctagatacatagttaaatattacagtgaaaatagcttacactcaaagattttaagcaaaagattgagtaagtagtacaagatttatatatcttgatggctgacctttattattttaaaaactgtaatgaaatagtacattttttatccactacaacattttatagttgtatggtctctgtcacgaaggcaaatttatcaaagtcaactatgagaaaaattattgaagtgctagaaaacaaaaggtagattctaatttccaactcttttcaaaataaatttttttagtaaaagaaaaaaaaaactatctttctcataaacaaaataggaaataaaattacagtggtcaagctaagattatattcaagcattggatacataacttaacttaaaagtacaagtccatctattgtattacataatttatactattcaccttcactgaaaaaacactacaaagcaaagcttactttaatccacaataaaaacacaacatttcaagtttttatctcttattatttttcaagaacaacattttaaatcaattaaaggtttcagaaaaaggtctttagggaattattatgatggatgtatgaagttgtgaagacgacacatcatgtcgtggattcgatcacgtgacaccgacgagttgtcgagaatatgaaaagcgtgaccaacacctccatgaactataccttcaactctcttcccatggcttctcatcactttacacatctccaagtttcgttcttttagtatatcaaactccgccatgaacaccatcgtcgtcggtaacttcgctcccgccgagctcatcagagggttacaccatggatggtctctactcgctccacgtggcagagctagacgccaatatgcgtcggaagctgaaagagtaagcgccgatgacttggtgtgatgttgttgtttctccgaagacgttcttgattcgccgccgaagaaagggtggatgagaataatgcccttgaggtgtagagtgtttgcgtatttgccactggccatgattcttacggcgacttggtaagctatgttggctccggcgctatctccggccaagaaaacgtttgagaggttacatttactcaaccaagaaggatatccaccaccggtagatatttgttgcttgactagccacgagacgacattaacgccgtcgtcgtacgccgccgggagacggtgttcaggggctaaacggtagtttacggaaacgatgacgcaacgggctttaacggcaaggctggtcaagaagtcatggtagcaactccaagcggcggagccaacgcagaaaccaccgccgtggaagtaaacgaggagagggagagtaacggacggcgaggctgctgcggcatcggggatgtagacacgtgtccatgtgtcgttggatagtttgatgtcaaaggctgtggctttagaagatgggtgaatggttggtgagacgatgggaactatgggaggtctttcgacgcagccgtcgttgaaaactttgatgagtccttcgatctcttccacgacggggccgtgacggtggtgatgggatccaccacggcggttgtcggaggattggtggttgtgagagaaggaaatggttgccataggttttttattttttaatgtgtagcgttgtgggttgagtttggattgagtgagatgagagattcattgaacttctttatatagagaagtttgtatatatatttatctaagatactttcaaataggaatatatagggggaaaaaataaaaattttaagaaatatagtataaggaatttcaattgggaatcaaaactataatctacggtacttgtaaaatgccggattttattgtcattgaaagcatatctatagtgtaaatgagaatgatccatgagatcaagtgggtgaatcttcaccacttcatatccgtcaatcgtcatattacattacatcacgactagagtgtttttcttttgtcaaccactcttttgtttaaagtgtttgttttaaaattaaaagaaaaagaatgtaaaattatattagcatatatatgaatgtatacttgaagtatactagaatcgtagcagatcattatacactagtatcgattttggctcagttatacaataatcccaatttcagaaggccggatacaaaatgaggattgaataccatattactattaacgtgttcacattacaaaaggatgtgtatttcacgatggatttttcataaacgaggaatattacggttcaaaataagtatgctaacatgaaaacatagaagagttatcccaaaagaataacattattgccagtcgtggtattatgaatagtaaaatgattgtaagttgagtttaagttgatttgatcccaagcaatttgtgttgttccatcacttcttgtttgtatcattacaaagtggaactcaagactattgtttgtccttttcgaacaatattgtttttagattttcatccctatatttatctacatatttatcaaatagccagaaaaaaatggatataaaaaaagaaatattaatcattctcaaattgtaatatttttctttcttctttacattttccttttttttttgtcgactcattttccattttttaagtgtttttattgtaaaaggtggatatcaaatattattgactttactagaggacgaataatgatcactttaaagttcatgagatgcatatagttcgttaggtgaacaaacataaaaagagagatgcacagttagttatagccacaaaaagctttcagaagctatggaagaaaaatctttggctcacctcatgtattgataaaataaaaatgaaatcttcagttatatgcatgcataataacagtgtggaagtttccttcttttttttttttttggtttttatataaatagaagtaaagaagtcaaaagaacaaaaagtcggcaaagattctatgggcaagtacaattcacaaatcttctaaaattcttatgatatattcccccttcgatttttcttttccctttttgtaattgttttattttgtcactgtgaattgttattgtattcattcaaaagtgaaaaacaaatgttaaccatttaagcttattacgatttattcactaatcctcatactttttttctctctaagaatgaatacttactaatatttacgtatagaactcaactgtaacccgagtgtggcttttaactttgatcatctttttatcaagctagcgattttgtcatacggcatgataaaaatcaaatgagaagctaacgattttgactatgtagtttatcttcgtaatattcgagcttttcttatattctctttgaaggaaccaaattgatttttcattcgataagaatatttacttctcttattcctcccccctgtcctaaccgtggcagagaaaggatttttgcccaaattattaaacacgcaaaaggcgtgtaaaactgtagattaatacagaatgtagcaagttcgtggaaaataatcatcttcgaaaaatactttgttttatagccaaaatatgtaaacaatagtttttaatatctagatacaagaacttggtttttcttagccctacatgttcatatgaaagctgcaaagcctcaaacaaatatcttgtaatgtttttttattggaaatgattatagtgagttatataaactcatttttgtaacgaaaggtaggtacaattacaaatcaatcaccccaactgtgtaaaacagcaaaaagtaaccataacaagacatttgattctccataacatgtaaccactttaggaccccaaaagaaaagaagaaaaacactcaagtttggtttagagtggggtgctattagtggatgtgatcgagaagaaaatttgcagccaactgttcgttcttgttgcaagctaagaacacctccaacaccacccttctctcgaatcccatagcttccagctgttttttccaaccaaacatatatgcacacaatcaatcaaaatttcatttaccaaaatagaactgaaattattaa

SEQ ID NO: 1438 - DNA, 77311 bp, Arabidopsis thaliana
aagcttttacgaataaaacaaaaccctgttgattgcttcatcatccacagctgtgacttgaagttgcaacaaatcctcttcaggttgtgccaattcgttgtcactgtgtatcataccataaaaaaaaatatcaaataagttgaacaaaagaaagcttagtttctaatatataattttatgcatttttacccatatgttccttcaatgtgctcatggaggtggagtaatctagacctatagcggtggatatgcctcttaccatcgccacgttccggtctacacggtcttggtgtgaaggaggccgttccgattgattgcgactaaatcatataacaaaaatccgaaaacgtcaaccaaaagctatagtttatctaagtcttcaaaccataaattaatgagaccatcttaattaccgttcaaaggattccttgtttagcacaggtacgaagccagcactgttgtgtcgaatcatctggaacaatggcgggttttgcttctccatctcctctagacatccctgcagcaaaactcatcattacccaaaaactcaacaaaacacttttaacttctttgttacaatcattcattaaacacaaagtataaactattaagaaacagactgcattccagaatcacaaaatgcaaaaggtaccagaaactcagcttaaatggtaaataaaacaagtcacagtactagcccctagatcacatattaataagctcaaacctccataaccaaaacccaaacgcaccttggtgataataatggcaataacacttttatcaaaaactttgttcgcctccattgttgtttcatctctaagcttttcccttttatgaataagtatttgttgtgcagcaggatattcactagctcccatcacagtctctatgttcttcttcacttcagcaacctaagcaacaaaccatcagctcatggaaacgaacaatcaaaaattcacagaagaatagacgttccaatcgaaaagcaatacaaaagagacgaaaccattcaagaatcgtcagcttaagaaaatatagtaacgccgccctaataaatcacccacactagcaaaacttgcagctcaagaaacgaatgattaacagagaaaaccctaattaccgccatatcaaagaaccagtgaccaaataacttcctcatatacgattcttgagatttgccttaccgaatcgttgggttttacttcgatctcgaagcgaatccccttcaatgttttgacaatgatcttcatcttcttgcacaatgcacaccaacggaatatgattccagttcccgaaaccgattctccggcaagaatctgttccgatcaatcgccgccggtaacaaacttccgtgtagagagagattagagaagagaagaagcgagtaaagagaaatgagaagaaaacggcagaatttatacggtccctcaataactacagttaataatccaactaaaatatgacacgtgtttcgtacctgaattcttgtaaccgtatttccctgacggctgactagcgtcactattgggcctatattttcatttctaagcccattataccacaagcttcgtgcaacaatatgatcgaaaacagaagcagaacaaaataaaagagaagagtgaatgtgttttatttgaatttttcaagaattttattgttctgctggaaacgtcaataattgtatactaaaaaaatataattcaactatttgtgtatcaaaacgtaacaaacgataaaatctacgtagtgtatcaagtctttggattttgaatgaaaaacaaattacatatttttgagtatgtcactgcaaattttgtctatttgacgttgtagcctctcaatctcagcttcagtacgagccttaacttcaccatcctttgccgtgagtaacaaagtcttcaatgcctcgatttttgcctggaggcttttgatctacaaatcaatttaaaaagataatttgttaaactacagagaaagctaaaacaaacttttagaaagtgagacttgtttatagtgttttgattcaattactttgcggtgaggccaccgaggaaggcctcctttccgacagatcttttttagaactgtcacacacactttcatctccttcgccgcttgttcaattgggagatcaaaaagcttacaaacatccttcagtgtcatatttttagttctttctctctgttcttgtcctcggcacatagaagataaaccaaacaccggaaattagtgccttctctaataaaaacctacaatgaaaataatttcttgtagcacaagtcacatactacaaatgaaatgctaatcctaatgcagtctttgtcatctttgttctaggaagactagtggttgtaagtctacaataagataatttgaactactcttttcaaatcttaacgttcggtcactgttctctatatagtcagattaccaaaagactttcttataccaaaactaccatgtcagcaacccaaaatcaaaatatatctatcactccctctatttttaaaagagttccttatagtgcaagtaacgtgtaaccctaacaggtcatgtgttgttattagtggctatatattaaattgagaaactagagatataacctgtgcagcaagaggtgtttgtcgcttttccctttgtttcggcaacctggtggtgggttcctcccttagttcaacatgtggtggaactggctgaatatctagggcttcctcaggcgaaagcaaagacagtggaacatcgtgatcttcgttaggcgaaagcaaagacagtggaacatcagtgcttgatggtaatgtcaacataggtggtggctggttaaagatggagttggcactcattgcttgataaaaagcagcattagtgtcttgcaaaagtgataaaccatttgctactctctggtagcaataatcttctatgaactttttaacttcctccatcgttaaatgctgcagatgaaatattagaggttgacgttgcatagaatcaggagccaacagttgaatcaagagaatagcatggcaaatgaaaccaattcctccatagatgtcaagcttactcctttcctccccttctatataatcaaataaaatatataagcgatcaataatattgcaaccaaaacataatttcaataaatacaaaaatatcaatgatagatatttatacccttgagatggactaattctcgaagcaatctgcaacaattgcatgcgtgaactccatcagagattgtcgttgtaaccgggacaggcattgttgctgaaccaccaatttcaaagtctagaccattagcaccaccaaaaactctagtgctcaattcaagtcgagtactatcaccaacaacgtttttaccattatcattaccaatctctcctgggacatcattgttgtcgttatgttcatcattaggttgttcgaacatatccaaggggatggtgaaaccgtcttcaacgaaagacagtgtctcgaactcatctttggagtcgtagttactgatcgaaagatcgagttcatgaaacaaatgagtttcgtccacgtccgatggtaatgtaggtaacacagacggaggcgtgtgttccgtgaaagacatgtccattaagtttgggtttatgtcggccattacattaattagatcttcgtccgtaaagggcccgaacccatcaaatggatcattaatgtagggatcttcatacccatcgtctttaggagcggatgattttggatcatcacccgccatatctgtttatcactcttcttcgaattgctttctctctcttttctcaaggatgaaacaaacaaacaaaaagaagaggagaaagtctctctcaagcacaatgcgatatgcttgagagttgaagaacaaagcgtgagggaagagacttgttacggttcgatcggcaaagtttttgtagtgagaggcgcgagagagagggagatagaagagagaaagagaaatttttggcggttaataatggtcgttatagtaagtttgtggcggttcatggtcattacaagacaacgtagtcaacatagttttatcgttaagaaatctattacattgttaaggaaatttatttcattttaataccatatatatcttgatggtgtagtttattattaaatagatttatacaacataagtgatagtgtaaatatatacaacataagttcttacaaaactttgtaagaagtaccataggtcgcaagttcgaaacatacatggaccattgacataactgatttttacgagaagcgaaaaaatggaagatgactggaacttagaatcgaaacatctctgttaattggaagagacctcatttgtgtggatcaaatgcaactgtttcatatttcacatcagattcgaaatgtgtatggtgtggataaacaagggattctcttggtgtttggaaatgctgaccaacaaaactatgcattagaaacaataagttgatggacgtgatacaaagtatgcaaatatgatggccacctacatgttctaagatattgcaatacggtgggggttcacgagaattgcagattttttgtacccaacaacatatattcaccatcactttgtatgttcgagtggttaacaaagtttaaagttttgccagttttcttgtaagacatcatatatgattgactttagttaagaagcattgatatacaaaggtgagagagaacttagaaatcaccaagaaaaataaacattactatatacaatggtgaatctgaaagaagataaatccaagttgattatctatattacaacgagaagatagaaaccagagttttcttcccaagaaaattttacagcttcttcatcttctaatcttccctcttagttatatatgaaacagtactaaagatccgcccgacccagaaaaacaccaaacgaatacatagattcgactcttcttttaaatactgcatctttatatacaaacactaacctgaataaaacagttaaacggtgaccggcgacggtaactgatcttcatcttcctccttcctcttccctctctctctctcttaggagaagatgaaaaacaaaaacatattcatttactttcaaaaatggtagtagtaatagttgcagcagtagtaatcaaatcctcctctgttaggcattggcgaacgaacgattccggaatctctatgtacacttgtttttttgttgtttgtctactaagccatggcagggatgctcgagttttgacggtcacggttcaagcaatcaaatccttctactctaactgcaggcgagttgagtccaaatttcattctaacacaaccacgggaagacgacgatgatgaggaagaagatggagatggaaacccggttgccgaatatggctgaaggaaaggagagtttggtgagattggattgagtttctcatctcgaaaacgagcatcttgggctaatgggttcgccgctctactcggtggtgaaccgggaaaatacggtggggatgatgatagtaactgccctattgttccattatcctcctaaagagatcacagcaaagtataatgaatcagaatcttctgaagcagaggcagatcaaagtacaaacttgaggtgtacaaaagttaatcagagaatattgactatcacaacatgtagcctgaagtgattcatgtaagatcaaaagcatacctttctacgaatgatttccaaaagctcagcaccagctttagaatcacacaagtcggctgcagcttgactacagatagcaaaacagagtttttataaacacttttgtttctaatcactggaaaaacttaaaggaggatgatttaaatcacctcatatgtaatctaagaggacgaataacgttgttggcgagtaaaccaacacgtcgaggcttaggacaaacaacaagatccttacggtcaaatcccatcatctcctcacgagacatgaaggcgttctgctgaaggttgcaatgattcatctttttcacctctgatccacagaagaacgcctgaattcaaatcaaatcagatcagatccatcacagagcaagagatttactttataagatctgagaaattctctcaaggaaaacgaagaaaacaacggatctgaattcagagtttttcctctttgatttattagccaaattcaacgaatcgctttgtgaggaagaaaaagtagatcattcaaagttttcagagagatcggctataaaaaggatttttgaaaaaaacggaaaccattttcggataaagccaacgatgaagtttgaccgtatggctaagccgaaactcagatccgagaaaattcaaaattcatacgaattttaaaaaaaatagaacaacacagagaagttttgactcgaattcaaccaagactcaaaaaacgatgggaattaaaaaagcacagatctaacatctatgagaaatgattgtggatgaacaaaaggtaaagtaacttcgatctgtaaaatccgccatgaaaggaacttaagaaacgaagaagaagaagaagaaggagaatgagagagagatgtacctgagtaaaaatctccgggagaggagagagagagaacgatgacggagaagatagaagaaagagagagagagagagagagagagagagaggcgaaaaatcgttagaggaaatggggattttataaaaggatgagaccgaagaaagtgtgggtgaggttgaagacaacatgaaacgacgacgtttcgtggaattgggaatttttgctttaaaaacaaaatagtatatcaaactggaaagttgctttttctcggcgtcgtaatagtgatatttgtggacagcttaattttcatgcatttctaatttttataagtaactatctttctctttattctattggtcaacattactaatgattttgttttctctttttagtttttaacatcagatatcattctcttgttttctctttttttggtgtttttttttcttttttcctctaacataagatatcattccttagttgataatttcacataattattgtttttgtttggtaaaaaatctaattaattgcacctatataattgtatactaaaaaatacatagaattaaaaagaataagtttgacaaaaaaaaaacgaataacaaagaatatatattttcctataatattgattggagccatgaaaatatttacttataacgtaccaaacaaatatacatatatatctttgttattaccattccttatattacttactataggttaacaagcctacattcacatgggtatctagggtttactttgttactctattatttttttctagtagatcctaattttttttagattctatttttatttatttgtctttaatttgttaaaagtatattaaaaacgcatgcttgtgtggcgctctcattagtgaagtttgacattttgaccagaactgtctaccggctccgatgttttctttattcatttgagaaacataaatttgctggcttccatagaaacgtgtccacgtaagcaaatagttatactatcatagttgactaattgtattatcggaatggcatcattgtttttaattttaacgttacatttccagtgaatgctaactcgcttaggagataattttaaagattagagattttcgctatctaaaacaagatttgatctaactgtgtattttcattgatttatcaataaatattgtgaacttgtatgttctacacacaaacacaataaatcatgagaaaccctaaactatgcactcgttacatgtgactctttatttgttcatgccatgtcctctttctcgataaaaccttctgatctctctttctcttttcaccgaagaagctcataagtggtggcataccttgtgaatgtcttttctaactcgatgcaactttttatttgttttccattttacttagttgttgaccgaatttcttgtttaaaatactgagatatcgttcatttttttctgaaaccactacgttaggactttgtctatcactggaaaaactttgccctctaatagaaccccaacatattctactatctaaccttttccgtatcggggtctaactagaattgatgtctatttagaaagacgtatgaaataaacccataaatagaaaaagttaagcaaataagtcacaaaagataaaatatttgccaaacggatggagaacaaaagaaaactataagcctgtaattgtggagaaaatgttgaaaattaagatgctgtaatagtggagagagagagatgttttgtttgttttagggaaagaagggacagtgggagagacatgcgagccatttacgcattgaacaaaggaagaataaagccaattgcattgttttaaaattctagtatagctgattaatacttcttttccagaaataaagataaggacatataccgtgtggtggggttagattataaaattcaaacttaaatcagtagttgaatcttaaatacgtttgatatctgtcaggagtttcgttaactacttacgtaccaacagtgccgtaaacaactagctaccttgtagacaccaagaaacttttattatacatgcgttatagacaccaagatacgtttgttttagttttacgactttaaggtttggtttaatcctaaaaacaaagtaaatccttttttatattaagaactttttgacaaactataaattgtataaatctgtgaaataatgatattttatataatttatgattacatgaaattacatattttattgacaaaagttattggtttttctttctttttatttacgtaaaacttattaagtaattaaacaattgatcagttgagaaaacgaaataagctactttatgtttaagttaataggttaatccttcacatcgtttgtcaattgccattataagttacgaaaattaagttaatctttcaaaggtaattttcaaatggatataatatatgataaatcattttttacctttttcatgtatcactcacaagtatggtcatatcattcttttgtatcaaccctatttgatgtggttttataatttatacttggaagcattcaaattgtctggaaaacaccaaacaaaaatgtaaaggccgatctatattcttacatcaacagttgaattgatgtggtttataatttacctttggaaccattcattttgtttttttcagaaaatttcgagaaccaaaatatcgaagaaggtttttgatataaaatccattaaaactttaattttgccgatgattcttctgatgtttgtattattatttttaattttcaaataattcacgaagactatttaaaaatatgaaaacctagtttgttgaatctacccatataaaaaaaaaaaaaaagatcaggaggtttccttgctaactcctcacctaaatgcacgtgacctgactcatcatgtacacgtggcatcgcattaatggattgtcgtctatctaacgacacagactcgttagcatatcgtcacagaatcattttgaggatccaatctcaagctttcagacccgacagcattgttcacacgatgaaagcattactcaaagacaaagagaagacaaagaactctcatttgatcttaatcataattgcgtaattctaatgatttctaatactagtacattattattttcttccacactttcatttcatgtattcttatctttatcaaaaacaaacaaaaagttggaaaataacaattttgttggtttttttcttataatacttaaaaaaaaaaaaaaactgaatgattctttttagaatttttgtttatggctctgagatcagcaacaaagcttacgcttttcagtcctttacacggtagcactagtcactaattatgattcgtaattatccatattcatttttttcaaacttgagatttatttttcagtggaaaaataaaaagttgttatctttaagaataacaataaaaaaagatttttttagaagataaaattttggtgttgcgtggatcaatttgattgatctgcaaaagggacaatctttgtttatcttagggtttgtagataaaggaagaagatcgttgtggcaaagaaggaaatcgatggctccgacggcgacgctggacaacaatgaggagctccggcgactcagggaggttaatattgacgaagctccggggcgtcgtcgtgttcgtgattccttgaaagatattcagcttaatctcgatcatatcctcttcaaggtaacgaaaataaacgaaattgaatatcttcgtgtgaatttttgaccaatttgaagtgggtattagaaaggttgacactttggaccactctgcttcagctttgtttgagattttgtggtgttttttaattgaatgtgttgttgtttttttggtgatgttgcagacaccagaaaatgggattaagacaaaggaggtataaaagagaaggatttgttttgttgattcatttgttcatgaatcaaagttagaagaaacaacttttttttttggtgttgatgtatgatttgtgtagtcttttgaggtgaattcgagaggagttgagattttctctaaaagctggcttcctgaagcttctaagcctagagctttggtttgtttctgccatggttatggagatacttgcacatttttcttcgaaggcatgtttctttccttataaggtttctttatgaagatgagacttgtttagttgctcattagcttgattgttgcaggaattgcaaggagattggcattgtctggatatggagttttcgctatggattatccgggattcggcttatcagagggcttgcatggttatatccctagctttgatctccttgttcaagatgttattgagcattactccaacattaaaggtaaaaactttaaatcacatcgagtgacacgaaagggtaaacttaaagttcatgttttaggtaccgatagattctgaatcactttggttgcagcgaatcctgagtttagttctctaccgagctttctctttggacagtcaatgggtggagctgtgtcactcaaaatacatctcaaacaaccaaatgcgtgggccggcgcagtcttgttagcaccaatgtgcaaagtaaagacttgtttttccttgttattaatctctgggattactaatcataacattaacatgagatatctattcgttctagattgcagatgatttggttccaccacctgtattgaaacagattttgatcggtctagctaatgttctaccaaaacacaagttggttccacaaaaggatttagcagaagcagggtttagagatatcaggaagagggatatggtaaaaacaaacaaagcagattttgaggaacgtatcgccttttcttcttgcgatttccttacttaagccacctgtttaatatatgcagacaccatacaacatgatttgttacagcggcaaaccacggctacggactgcagtagaaatgcttcgaacaactcaggacattgaaaaacaattgcaggaggtaaaacgtatgagaaaacttggaagaatcaaagcagaatcagaataataacattctttggtttcatctttgcaggtatctttgccgatattgattctacatggagaagctgatacagtgacagatccttcagtgagcagagagttgtacgagaaagccaaaagtccagacaagaagatagttttgtatgaaaatgcttatcattctctgctcgaaggcgaaccagacgacatgattctccgtgtcttgtccgatattatctcgtggctcaatgaccatagcttgcaagctgagggatcatctgttactactatgtagagattatgaactcatttgtttcgtttttaggttctcatttacctagtgaagagtatttctcaacgaataagcaaataaatggtcattgtttgcgatcaagtttacaggattgttccttttgaggagcagagaattgtttaacttcgcaactatatctgcaagtaggatgtaaattcgtgtcaaataaattattttcttttgaataatttgcaaatttagtgtcatcttctatgcttggataagttatgacttatgagacgtcagtgaaagcaaagatagtattgtatatatatttttttttatcagaaagaaagatagtattgtagtcggaaaaaaacttagcgaaagttaaacatccatatatcacacactaattctataacattgaccaagaaagtaatatgtataaataaaattaataaccaaaattgaagttatatattttgttagtagaataaaaatattttgtttccacgaactcatatctgatttaattttagccttttaggtgcattaagcatttttcaaactaatgttgggttcgtggaaacgagtttgtaaatacatgggcttacgggctttaagaaccttttaacggcccatatttggtcacattcgaaacaaggctaccttgaaaccctaatcatcgaacattaaaacctgattttactgaaactgtgctgcgaaggagaagccgcaaaccattttttgtcaatctagggttcttcttcgtacttgcagatttcgcctccgttttcactacggttagtcgcaaatagttgatattcctcatactctcttgtccgtagttttatgttgagtggaaatgctgatgttttgtctgaaatcttgtagctcactttaggtgtaagattttagctcttgtgattggtctaattctgggttttggtctttaagagaaggatactctagttcagtttaagccactattaagtaatgtagcaatgtcgatttaagaactcgaaacttgctccagagtattattgcatagaactagaaagctgtgttttttttttcttgatccaaaaagccttaactttggttatgaaacttactggaaactgttactcgtcggtttgtgataataatttttcttaatgttaatcctggattttaatggtagcaagttcttatgcctaatgttatcactgattccattttttttgtttcctttaagatctgtgaagatgttctccgctcagaacaagatcaagaaggacaagaatgctgagccaacagaatgcgaggagcaagttgctcaggtactaacatcaactttgatgtctttgtctttaaattattcttcatcatgaataacttggaattttctttctcaggctttgtttgatttggagaacactaaccaggagttgaaaagcgagttgaaagatctctacatcaaccaagctgtgtatgttgctgcgttttgttttttccccgtttcactccatggttgcattacctttctcgaagggaaactaatttgattttgtcattgcagtcacatggatatctctggaaaccgcaaagctgttgtgatttacgttccattcagattgaggaaagctttccgcaagattcatccccgtctcgtcagagagcttgagaagaagttcagtggaaaggtaattttataacattgctctgtctttagtaaatgcctaaacaatagttgtactatctctcttacacactctgccattctttttcattttcttcacaggatgttatctttgttaccacaagaaggatcatgcgtccccccaagaagggtgctgctgttcagaggccacgtaacagaactcttacctcagttcatgaagctatgcttgaagatgttgctttccccgctgagattgttggaaagcgtactcgctaccgtcttgatggttccaagatcatgaaggtatcgtatcatttactatgagaatatactcagatattgatacgaatgatattgagcttacctttacattctgttttgactaccatgtcacaggtctttttggatgccaaggaaaagaacaacacagagtacaagctcgagactatggtcggtgtgtaccgtaaacttactggcaaagatgttgtttttgagtacccagtcgaagcttgaaagaagatgatgaagaaccatcaggatagtgaaagagagcttttgtttatgttttgtggtatttaggatgaaggaaactctcttgattcagttccttgttcacaatctttaatgttctatttacaatgactactttttgtgtttttcaattttgaaacctctatgatttcagattcgttctcaaatttcaactgcaacacattgagaagaatctataggtcgatgatgaagccccttcttagtgaaactgagtattattgggatagtttctcgagactgaattatattaatctaagaaacttcatacacttcgtaacgaaagagtgtctcttgagacgataaaatgaaagtgctaaaccaatctctacatggttgcttttattgcaaatcggagtctatactttatggaatttatatttctgcacaagattaaatctcgaaattccttgattgaagccattaagcacaagagtcttcactgcttcacttccttgctcgagtgcttcctcgatctgtttctgttccaatggactaaacttctgaagaagaaaagctttcatatccatgtttccaggtggtttaccaatgcctgacaatcgacaaaaaacataagagattgagagagaaacaaagaatagtctcgctttgaaacctgaatcaaaccaaaaccgtacctatgcttaaacgaggaaagtttcgacgaccatccaaatgccccattacactcttcactctgtaacagatataaaaggtgacatcagttaatatatcatagaacacatttagatgttcaagaggtatattcatacccgttgtgatagccttgacctcctttcggttgaagtctcaaaaccccatttggtaaagccatctcatcgtaaatctagtagagagaaacaaaagtgttcatatggaacatagttctggattcaagggatgcttaagtcagtgactttaccattaaaatgtggcgcaatggtactcgatagtgtgaagctagagatccaacctttaaaacgacaacagaacagtttcaggtatgatgattatttgatcacgcagctgatctttgcaaagttatgaacagaaaatacaaaccgattcgccgctgaagttcatataagtctgaggtttagccaacaagataggtacatcttcaatagcacctgtactgattcatacatagaaccaaaaagtcatcagttttattattcttcaaaccaaagaaccaaagcaagagaagtagaacctattccgattagagctttggactgtatagtgttcatcaacaccccttcttttctagccaacacatcgatcatctcgaaaccaacctgaaaacaacacaaagttgtagcattgccaagatcaaatccagcaattaagtaaaagaaaaagattgtgtatcattacattgtgtcttgttccatgatacttgtttcctggattgcccaacccaacgataagccaaggagtgtactctactttgaatctatcatcctcaccaccagaagtagatgaacaaacccgaaacctctgtttccggaaaactggcttttgcgtttgaaaatggtaaacacttggtgtatacgttgggcacaacatggaactgttgttgattcaaagacctattgaaattgaaatgactagaaactttgagattcaatacttggaatatacataaagataaaagcttttcaggatataatgaaattcgaaatcatataacaactgagaatcaaaacttaatgaaacccattaacagagatacagcgcagataaaaaataattgaagtgtaatcgaacagaggactcagcaaaatttctggagaatcagagattagcaatgagctacaaggattacacaaaaatgtatttgtggtttatattatgttataaattttcagtagaagaaggataagtgagaaggaaaatagcttacctcttcttcttcaggatttttcgaaacaatttcggaattttcttttgcgaagacgttggaacgagatagaagtagaacgatgaaatactgagacgaagatgttagaaattggtcccgttttgtattaatgggcttactaatattagcccacaaaaatgatgggttaaataatagtggcccaagttactatgatttttatacgtcaccgttactatgctcaatggcggcacgtgagtactattgaataacacgtgcggctatatacgtcatccaaaatctaatccagaaaatccaacgttgccaaatcgccaatcctgcggctcttacgtaactcttttacttctttttttcttacccttttatcgactaatttatgtcgaataataattgtaaataattttctcaatttataaactcaaaaaaatttcctaattagtcccgccacttagttcgatttagttgatactggttgatttattcaaatttcctagcaaatattacaaaattaccaatccaaaattgaaagttgcatcacatgcattaaatttcatgatttctttaaaataagaaatgaaaatactctattttccgtatggttttggataaatatgaattattacacaaaaatccaaaactaataaggaaacaaaattgcattatttattttttggtgcgttttaatttttttttttaaacgacaataagctccacagtgagttcttctcagcaatcacaatctatctggtttaagccctcactatcctctctctcaaatcgcggagtctccgaagtttctctggtaattttcaaatctgaagttttgctttggatatcacgatttttgttaatcagccgcgatcgagaagagcgtttttactctctcgttcgcatcaatgcaacatatttcccaatttcgtgatgttgcgtcttcatcgttccttacttctctctttttgagttctgtttggtataaatgcgatccttttttttccttccttgcctaatatttctcgtttccttgcaattacggttataaaaagtcagacaaaatgcagtcgtcaacgtatgcggttaaaggaaacgctgcgtttgcgtttcagagacggaccttctcttctgacagatcgacgacttctaccggaattcgcttcgctggttataagagcttagccaccaccgggccactctactgttctggttctgaagccatgggagcgacgcttgctcgtgctgataacgggatccagagcgttatgagtttctcttctgtcaaagctcgatcggtcagagctcaagcctcatctggttcgtctcttctaatgctcttctatctttgtctatcattagattctgtgattgcttacaagttcttaaatacaatttgaagaatctaatgtatagtttgggatttggactaatcatctgatggtttgaggaatgaaatgtagatggagatgaagaagaagctatacctctgagatctgaagggaaaagctctggaacagttttgccttttgttggtgttgcttgtcttggtgctatactctttggttatcatctcgggtatgactaaatactacactgtttttatcttggtgtgatcatggatgatgatgttctattggactgaatcagggtggttaatggtgctcttgaatatcttgctaaggatcttgggatcgccgaaaatactgttttgcaaggcaagtatatgatgatccacttctttactcctcctgtcaacggtaaaatgattcgtgttttgattagtagccaaactcataattggtattctctatgattggtgttgagcaggatggattgttagttctctgcttgctggtgctacggtaggttcattcactggaggtgcattagctgacaaatttggacgaacaagaacttttcaattggatgctatcccgcttgccattggagctttcttatggtaaattttcaagcactaagccatacctattggtgagacgttaattgatttcttaacgcattggttctttttttattgattagtgcaacagctcagagtgtgcagactatgattgtgggacgtctgctcgctggaattggaattggaatctcatcagcgattgtaccactttacatatctgaggttgtttaaatactgattttcattatttttgcacttttagcataagatgttagatttgtttatatgttatgtctctgaagcgtttgatgatggttgtcagatatcaccaactgaaatccgtggagcactcggatctgtgaaccagttgttcatctgtataggaatacttgcagccttgatagctggattaccccttgcagcaaaccctctatggtatgtaacatcccttttttattcatcatcttttattttgggttgcatactgtgataagttttgatatcgtggtcttctaggtggaggacgatgtttggtgttgcagttatcccttccgttctattggccataggaatggctttttctccagaaagcccaaggtggctcgttcaggtactctcaaggaacagatctcaacacttaaaatgagatcaatttttgacaagtcaaggaaatcaattttgcagcaaggaaaagtctctgaagctgaaaaggcgatcaaaactttgtatggtaaagaaagagtggttgaactagttcgcgacttatcagcctctggccaaggttcttctgagccggaggcaggatggtttgatctattcagcagccgctactggaaaggtatagcaagacttggtggagatacattgtttagtttgtaataaaagctgacggattcctttcaaaggtcatatcggattgatcaatttacatagtttcttgtctgttcttgttgtagttgtaagcgtaggtgcggctctcttcttgtttcaacagttagccgggataaacgcagttgtgtattactccacatcggtattccgtagtgcgggaatccaatcagatgttgcagccagtgctctcgttggagcatcaaatgtctttggttcgtttccccgttatgttctcattaaattccaaaaataaccaaaaaaataacacgataaaaatctggtcgcaggcactgctgttgcttcatcgttgatggataaaatgggaaggaaaagtcttttactgacaagctttggtggaatggtacatgtttttattaaaattcttagccatattcgaaaatctcaaccctcattagtattaccacaacaggactaacttggattttatggttttgtattgaaaaggctttgtcaatgctgttactctccttgtccttcacatggaaggctcttgctgcctattctggaacccttgccgttgttggaactgttctgtaagtcaatctcctcttaacacttccttatagtctctctgtataggacttgactgactcttatgctcggttgtttaaatcagatatgtcctgtcattctcacttggtgctggcccggtaccggctcttcttcttccagagatatttgcatcccgaatcagagcaaaagccgtcgctctttctctcggcatgcactgggtatatacatatatctataggttttatgggttcagaacagagtttcttctctctgtttctaatgttttgtttctcttttgccctaacagatatcaaactttgtgatcggactatacttcttaagcgttgtgactaaattcggaatcagcagtgtctacttgggttttgctggagtctgcgtccttgcggtcctctacattgcaggaaacgtcgtcgagactaaaggtcgatcactggaggaaatagagcttgctcttacatctggagcttgaaattaaacaaaagaaatcagcagaacaaaaaccagtttgtttcatcatttagtttgtgagtctttctctaatctgctactcttaaattgtacaatggacgacgttatcaataacgagaaatcttttcatgaccactacatgttggctttcctttcccacctctccctggtatctagcctgtttcaaaacaaaaaaagcatggcattagcacggttttctcaatatgaaaaagaattctaaaattagcgaaataagctcacccccaaaacagtttttgtggcttcttcggtactgtgactactgtcttgttatgattctgttcttctaaggtagaagaagaagaagaagttggttctttcaactttttagagctttcgccatcttcgatcgctttactctgagaattcttgctcgctgcatttcagtgtagagcttttagtctagtgaatatgaactgagaattctcaaaaaaagagagctaaatatatatatacctttaggtttcttcttatgaatctttgcattagcttttatttgcatacgtctcttgtgtagctcctgtaatctcaacacaaccaaaatggcttcaaattcaaattgctatgtacatagtaattcggttgaaagaaaaaaaaaaaaaactggattgaacagttgatagaaattcgaatcaagatgattatacgaagtcgtgcttacaatctcattgggatatctgaagatcagaaacattaaaagtcgaggcaaagaatctgacctgtaatttggaaatttgtttctgggtgaggttggatcgattaaaattgggttgaagagatagtgttgaagctaatagagcttcttttcgattctcctctgcttctctgtcaatttcctcgtttgtcctcgtcgtcgccatggcttctccgtcggcaactttgagaatgttaagaaaccgacgtcggaaactttcctttcctttttgttgggggattaaataccgaaattaccctaaaatattatgctagtttaactaactacccgaatgttttgaactaatacataattgacctaacactttctctaattatcaattacacccaattgttttggaatttttggcgttagtgagttactatattaatgagaaatcttaattaatgtatcatagatcgtgccgaaaataaatggtctatgtctaacagctttgagtacaagtaaaactctcaagcttggtctttaattacttttgtgccttgactaagcaatgtaattagaccttacgacctttaaaaatccactaatctagcatgccgatcacgaccgcaacgcttactctctgtattaatgatttttgtaatcaaaacttcatatttgactatttagcaacaaaaagaaggttctggcaatgtgtcgtcaagtgcacctaaagttaggcatgaaatattgttccttccatggtttgtgggtcagcaccgaacatttcgcactctcttccatctcagtactgcaacattttgaataattaactcgtccaggttatttatgaagaattccttaactttggagtaatcaggttagtttttttatttgatattattttggtttgagttatttaatttgctattgtattggttcggtttaagttagactttcaaaaagaaaaattagacaaaattgaacccacgcacacagataaacaattcaatagatcattcaagtataggtttgaaatacagaactgctcggttatatccacctctcaccaaggtgttcaatgtgattcggttaaattaagattagattcaaatattcatattttcaacagcaacagaaaaaaaaacatattttgacaacatgccacccttagcttattttgacaacatatcatcacccttacttgaaattgcaatctcttactacactccgtcctatgggcaagataaaatttcgtcaaatcgtgtaaatgttaagatctaaaacctaagttttgtatctaacacatgatcgttatatacatatattgacctgagaacaactaaaagtcaacaggtcacgtcttcgttccaaagtctactcttttaatatacatttatataacttgcaagagagctccttttgacgttgtccaatacactccaaaaaccttgttttttcttatacaacttgtaataacacatttataacaactggttgcaaaatccttaacgatcacaacaacctctctctctctttttctctctctccctctccctctctatctctacaatgagcattagtgatcataagagcaagaaagaagaagaacagtacccaatgatcacaaagcccttgagattgattctcttacaaaagggaagttatgtcttaagctcactcttttttgtattcggtttctcggttggtctcttcctttgtctgcaactaaaagccgtacacatgtctacgacgacgacacaacgacaacccttatggtctaccttattattcaaccacacggtccacaccacagagatggatatcaaacaagagttgcaactacaagtacttcaacacaacatgagtgatcaagaactcttcaccaaggcctcgtcattatcatcaccaacatcatccttatcgtcatcatcatggttagggaggagacataataatgatgggaagatggctgtgaaggtggctttcatgttcatgacaggtggaagactcccattggctggcttgtgggaaaagttctttgaaggacatgaagggttttattccatatatgttcatactaatccatcttttcaagattctttccccgaaacttccgtcttctattcaagaagaatcccaagtcaggtgataataacagctttagtttgttaattatatctttctcttttcttaaataaacctatttaggtacccctatatatgatcagtatactactaatcagaaattatatcactagttttccaaaaacacatcactatacttttccaaacatatctcttcgatttgacaggttggttttttcacatggcacgtgcattgatcttgattcgacaattgcataatggtccattaaggcatgaacccatttgatattattctaccataaatacatttctttaatcatgttaataatattcaaagatagactattctcaacttttgtaagaacaaatgaacaatacatagaacagtttcaaaatgcatctcaatataaaatttctagatgttatataaactgaaaaagggcgtaggaatgctttttatgtttattaagtttctagatattctaactaattttcaagttaaaagcgacaacaaatctaaattcaataaatctaacaaatttaaaaggcttaaatttgtataaacaattttttaaagattattttaacaataatattgatgttgatttgtgaaactttttgtcaatcagccggtgtattggggaacatcatcaatggtagacgcagagaaaagactattagccaacgcacttctcgacgaatccaaccaaagattcgtcctcttgtccgattcttgcatcccactctacaatttcacaaccatctacgattacttaaccggcaccaatctcagcttcattggctcattcgacgacccaagaaaatccggtagaggccgttacaaccacacaatgtatccacacatcaacatcacacattggagaaaaggatcacagtggtttgaaacaactcgagaacttgctcttcatataatcgaagacacggtttactacaaaatattcgatcaacattgtaaaccgccttgttacatggacgagcattatatcccaactctcgttcacatgttgcatggagagatgagcgctaaccggaccttgacgtgggttgattggtccaaagctggtccacatcctggccggtttatttggcctgatataaccgatgagtttcttaaccgaatccggtttaaggaggagtgtgtctattttggccgtggtggagagaatgttacaacttccaagtgttttttatttgcgaggaaatttacagccgaaactttagaaccattgttaagaatttcgccaatagttcttggttttggtccatagttacattttttcagttagtatatattatggtaatgaagtgattataatttagattttaaattcaacaataacaataaattttgtgttctaattatttaatttttattgtaaaatgtactaatttaggaatttatgagaaatggaataaatattttatcttatccacgatttttgtcgttttgtgaggtctttgttctgctcttgtgtaacttcagcgataacccaaagttgcagacttttactcaaatgctaaactctctcttcctctcggcgcgagcttttccatctttgatcactaactcttcctctcggcgcgccaaaagttcccaatttgatcagtttagggaaaacagaggagtctctgatgctgcgattaaggttcctactgctccatggatgaaaggtcctctcttgcttcgacccgatgagattctcgacactaagaagagaaacaagccacggaaagttgaagagaagacgttcaaggcgttgaatcgtagagagagtggtgtcagaggaaagaaagcgatgaagaagatcgtgcgtaacgttgaaaagctcgatgaagatagtgattctgaagaaacccagatggatgatttgagcgaattcgagtatttaggtcgaattgaggagaaagttgagtccaaggatagatttggcgggaaaatgccatgggagagagaagaagagaggtttatattaaggaggatgaagaaggagagcgttccgactactgctgagcttattcttgacgagggattgttgaatagactgagacgtgaagcttcgaagatgagaaaatgggtgaatgtgaggaaagcaggtgttactgagttagttgtgaataagattaaatcgatgtggaagttgaatgagcttgctatggtgagatttgatgttcctctgtgtcgaaacatggagcgagctcaagagattatagaggtttggttagttctacttcatgtcaaacttgttgaatattgatgtttctttgaagtgatttctcatgttttcaacaatagatgaagactggaggcttggttgtgttaagcaagaaggagtttttagttgtttatcgaggaggaccgagttattcatcagagggacaagatgagattagctcatcattgtacgagagagaagctgataggttactggatggtttgggacctagatatatggattggtggatgagaagaccgtttcccgttgatgctgacttgcttcctgaagttgttaatggatatatgactccatctagacgttgtccaccaaacactagagctaagctaaccgatgaagagcttacctacttgagaaacattgctcaacctttaccgtttcatttcgtccttggtaatttccttcactattttagatgtctttctcactctgtgttgtgtgtgatatagagttaagcttcagggagagttattcatatgttcccgaagaaatcatgaaagaatgaggaaacttgctcaaacttgatatttttttaacaaaagatgaaacagttcttgagtagtttaaaatttttgagaagagatagatcgggaaatgtcttgctttccagaagttgcaacatttaatgtttaaactctctggctttgttcttgtcatttgcggatactatttatcgacattctcattgcgttggtattgactaagtgctgctatctttgcatttgcttgcggtttactctctcgagctctcaacagtcttttttcttcttcttaatttgcaaagggaggaactatgggcttcaaggtttagcttccgctatcgtgaaactatgggagaaatgtattattgcaaagattgcaatcaaatggggagctctcaatacaaacaatgaggaaatggcagatgaattgagggtaaatgtcttttttcttgtggccagtttttgaatatatattcattattgatgtggctgatgcgaattttttgggctctatcatattttttcagtatctcactggcggtgttctgattctacgcaacaaatacttgatagtactatacagaggcaaggacttcctttctgatgaggtcgcggatttggttgaggacagagagagattactcagcagataccaacattttgaagaaactaaacgcgagagcgatatagaactcttggaggtggtaacaaatggtaaacagttgaaggaaacaaacaaaagtggaactttattagagtttcaagaactgcaaagaaaattcggagaaatggacccgagaaacctagagactgaagctgagaaagcaagactagagaaggaactcaaaagccaagaacacaagctttccatagtaagtcttttttagcttcattgcatcttttaaaatttcgctaaggtaatataagttccatggatttgttattttcgggttttgtttgcagctaaaatcaaagatagagaaatcaaatatggagttgtttaaattaaattctttgtggaaaccatcggagggagatgatgacatcgagatattgactaatgaagaaagagaatgcttgagaagaatagggctgaagatgaacagcagcttagttcttggtaagcgccaccggatccattcttgtcttcttcttattctgtatccattgtctataagattatattacacaaatctcaatttggtatttgtttcatttgtaggtagaagaggagtcttttttggtgtaatggaaggtctacatcagcattggaagcacagggaagtagcaaaagtgatcacgatgcagaagcttttctccagagttgtctacacagcaaaagcgcttgaaacagagagcaatggagtactaatctcaatcgaaaaacttaaagaagggcacgccatactcatataccgtggcaagaactacaaacgtccttcatcgaaactgatggcacagaatcttttgacgaaaagaaaagcattgcaacgatctgttgtgatgcagcgactcggcgtaagtgaaatgaatgaaaacgtatctatctctttcatttttgattgagagaatgctctgaaccccatttgaattaatactttcattgtggcagtcactgaagttctttgcttaccagagagagagagcaatagaagatttgaaggtgagtttggtaaatcttcaagactctgctttctgagttctgttgatcccaaatggtttgcaaggaagagctgaaaaaagtttacctaccaaagcaaatttatttacttaacttgatcacacattctttttcttttactgtggtatatgattcacattttctgattacctgattattatgtatataaattcacattttcttaattaaatatataaccaaatttgttagctttgctaataatgtaactttttaaaattctttttgtattccaaatagccagcctaataaggtgaaaataccctgagtgctacgcaaaattgggtccaaaagaaaagcattctgcagtgaattattgattggcgttatatactaactgagtacactagttgaagctttaaagttggctttttaaggatcgatccaaaaacatttcccatacttttcaaaagtaaataccccaacttttgtgctgtctaaaatatttttgtcatgtgctacttgatcttcacctttttactattttttaatcttattttttcacatttttcggatcaatgaaaattttaatgaacatgaaagaaatggaggaaactaatgatcatacaacaaattacaatgtgcgtactcaagaatcttacacgcactatataaacatatggactaattaacactgtacaaaaaaataaagatattaatgaataagaattgtattaaataaaataattcacctacttattctgaaatatgaaaaagaaaagaacgagaatactaacggatatataaattactaattacacttatcaagttcctataaaaccaattccggcaataataaaagcaagagcctgcatgtaaagatagatatataacactgtcttcccaaagacaaggttatatgatgcacagcacaatatgtatatccccaccatcatctcttttgagtttatcctgcaacaaagtttggagataaatcatatgaagaaaaaatcctaaactgattattatttgcttgattgattacctttcgagaaacccgttgcgaggttttcttacttggggaagtaacttagtctcaagcgcatcacctaatttctcggtgacgacccattcgttaactctccctccttcaagtaaaccgatgaaagtgcctttggtccgatgcatagccattacattctcgaataagacccaaaaaatcacgaggtagaaagatctacatgcataccaaatgtacttcataataaattcattgttgtatactataatctggctagttactactatgatgtgaataaatgaacatagtactaaccttggtgtggcaatggcattgaatagagtgatcataaaaggaaaataaacggttgaccaagtcggaatgttgacttcgggaaagaatacgctcgtaggaagaatgaaacaatagaagaagaaagtgaagaaatggactatgatcttccttacgaaaaagaaactatagatcacatacaatttcttccaaatcgtcactctctgttcaaattaccaaatcaaattcgttagtaccaacattatattattacttaagatcatacaaaaaaaaacttaaattaaattggcatgcatcacaatggatgtttgtttctcataatggacaaaaaaaaaattaaaaaaaaaaaaaaagttggtgtgtcttagaatgaaataaattaagatagagaataaaagtatctttcgttttgattggtcagatatatagaatgaataatagtagtagtgtaccttattgcgaataatttccatagtcatttttctgaagagattagctggaccgcatgaccatcgatgttgctggaatctgaatgccttaaattggcttggtagctcacttttcacctacaaattattaaaagtttgtttatttgatatccacacgtaaaaatacaaatcatattatatattgtcaattgaaatcatgtgcataaagtgtgtgcacagcaacaacaacacatgtgacgaatattaattaggatttggactggttttatacgatgtaaagatttggacacacatttattagttatagtccaaaagaattggaagtaccgaaacatcgttgacaaagacaaatttccagccgtgtagacctacacgaacggccaagtccatgtcctctacggtggtccggtctttccaaccaccagcttcttccatcgccgccagtctccatacacccgcagtccctgcgaacgtccaattatattgtttaaagtctaaactatattttagagtaacgtaccaaaatatatttgaaaggagagattttgaagattacaagatagatttgaatgtatatattttattgttattggaaaaacttactggataatcattatcaattggtttggatatttttattcaagaataaaagttagaaattgaagctacacataatataaaattagaggatctaagaaataaaatatgaagttttcgaccataggataaagtattttaataaatgttgataagggtgcatctaccattaaagccaaagaaggcatgtctagtggatccggattcttgctctgccgtgaaatggtaattgagggacatctcctgcatcctagtcatcaagcacttctttgcgttcactataccaagcaataggttttcttagatcatatgactatgagtaaacaaataatttatctcaaaaccaattgacaataaattgaaagtgtattgtttgtatcaaccgcaaatagtcataccaaatttccatcgagcttgaacaagagcgagttcgggattgtggataagaaatgggacagtgcgttcgaggtagtcgggctctggctgaaaatcagcatcgaagattgcaatgtaggtgcatgttttgacgtaactatgcctcataccttgtttaagagctccagccttatagccatttctattgtctctcctctcacattttatgtttatgcctttggttgcccattttccacactctgtgcttaccatttcctgcaattaacacattagccgcttgactttttcttccgttaaaaaaaaaaacagattcctttagtttgacaaaaataaaataaatacagattcctttatatttttaatgtagatataatattattactagtaattaatagcatgcgtttagaacaatcaatgtgtgtaccatgatggtgggatcagtggaatcatctaaaacttgaacgattagtcgatccaatggccatatgagtctgcaagcagcaccaatggataacttaaacacctgtgaagtagaactttacttaaaaagctgcatcactatatataattgaaataacttctttgaacaaaaaaaaaaatacctctcgttcgttgtacattgggatttggacaagaaccatgggaaagttttgatttccgagctccaagtcctcttgcattgcctcccatttgtaaatcttctcgggtttgcgtttacacaacttgacgtagattactacaatgttcatatataaactttctacgaaaactaatagtgagatgaccaaacatatagccaccaaacacttgaacattggaactataagtagacttctcatatctctccaccacatcgtcttcatgcttaattatctttactctttagtctttacaccattatatatgcttcaagcttttcgaaagtcgcagctgcatcctgaactattcttcgcaaaagaaatttaactattcttcttagaaccaagaagtgggagtgagagatagagtttttgaaggaagaggagatgattttagaaatgggtttttcttgttctgtctataagtgtctgacttttacagagattctctttttttttgttgaattaagtaaggaatttgtcttagtttttgtttctattttgattcgtcgtcgttttaccggaaatctgtggacctgatctagaacatgatcatagctagtgggaacaacaagatgagaaaaaaggaccaaacaatgttttaactttttaactcagtctcactatttttattcataacttccacgtgctacttacatatacctaattgtatcgtatatcttttttgtaatactcaatcacgcacatatacgtcatcttttaattttcagattattacttcagtatatggttttccaattacatgataaaatagtatacttatttttaagttttgtcaatctttctattttttgggatttctttttgtatttatactaatttttaagcgtaaataaaagggatcataattaattaattgttttaagtttgtcaaactcttagttaatggcaaccacaatctcgacaaaatcaatgtaaattaagaaaacaaccactgtgaagtagattagtatactaagcactgtaatttcgagaacaacgacaacaattaatgatctgtctgtgcaatataaataacacaagttaacaaccataattatatttcttgacctagttctttcgtaggaaagagtcaaatcattgaacggaaacatgttttttaatgtctcaaagtgatgagaacgtaaccggagttaaccggtacgattgggtcaataaggacgaaatggatttattgctttgagtaaaacaattgtttccctaattagtggaattatctccatagtttgtaggatccacaaattgtcttctctttctttttcctttgtaaatattatcacaaagctcatcaagtgtgtgaccgactgatttgatcagtgtgtttatctttcagtggtgtgtattgcattgattcgtctggctgttgttgcaactaagttttggttgtaaaaaggtgcgttgcaactaaattttggttgtaaaaagagttcacaaacttctatgttccgtttttttttgtaatccaaagctctttgaataatgtcattacaagacaagggaaatcattacttataacttaatcttacatatgtctacgcctttatactatgtccaatgatattggcgagaaacgaatttggaaatgtccaatgatataagtaaaaagaagggaataaagaaagaaaggaaaagtcagatctggaaaatgtctttgcactatgagaaaaaaatgttccacttgactgacctttgtccctatcataagcaagtggcaaatgtcaactatttaacgtgactcgactagagttgtattttttcttgaacaaaagaataaaaagactcgaagttgagttatgcgcagtgtagctcacgctctttaattacggctgagaaatgcaaaacctgaatgatggactggtatgtgtttgcaccaagacaattaaggcccattaacatataggctattacgaaacatgaagctaagaattgaacaatatagtataaggtgctaattacaattttacagggatactgggagaccaaaatacgaaaaagaagaagagaggtgaactaaaataggaaattactactacactttccttaacattcggaattttagataatagtattatagcgatgtcctaacttttttggtagaactttttagggatcaattacgagatcggcataattaagtatatgcctttgtttaattaggtactttttcatatgcttatagaaataggtacttttctttctgtttatgttacgcttttacctttctgcattttttcttcatttttccagtacttctctcaacggtgatgacaatgaactccgttgacaataacgaacaattttttggtttagaattagtgatgaattggggattaattgatttgaatcgtttttaagagtagaacccttgggtttcctagatagtatctttagggtttatatttcttccataacaaatcgtttaacttgattgattggattaattggagacgacgtgttggtgatggagaaagttggaaacgaaagaaatagtgtttttgatggacttaaaggtgatggtgttgacaaatatggtgtttatgaagcaagtgcggcagtgagaagtgaggattgaggatttgagttgcaggaaaatttgctgaagacaatggtgttttatcaacattataacctcacataaggggcaaaaccgtcatttctttaccaatatatgcttatttccataaacccattcaaaaaattcattttttctaattattgggccaaaatgtgtccaatcttacgaaagccctaactttttagttcttatagtaacaaattccatattcatgtagggcttaatatttttgtcagcaataaatggtattttcttcagctgtatagtaaagaagacaaacttttttttttttgtgcaataaaagaagacaaactttaagaagcagcaattatgtgtctccttgtcatggctacctattttatcattttgccctccacaagctaaaacccaaatcatttctattgactctaaatagccgttgcgaaaatttcaacactccttttctaaattatgtaatattttatgttacacgccaaggaaaaataacaatagaatataatttaccacatgtggtaagtttgtcctgttatattcaaaagattcactagatccaatgatttaataacgtaactcgaacatttgttctctttttgctcttattcataatctctaatttttaattaactaaatcctagagactagagagtaaaggttatagtctacaatatcttaaatcgcagtaagaacaaataaacggtcattgaaaaatatgacattttaagaactggagtattaaggatttaaagatcatattttgtaacaaaattaaacggagaaaaaagaagagaacaaaaaggtgtgttttttttatttattgctcaggaatagaaaccaggactggtcgccatggttttcttaaaatccttaaccgaaatgattgaaccgaaccggatgaaccgaatcgtcgagccgttaactctctgccgtcaccgtttgaagtgacgtttaacggcgaaatctcgcttctctcttctccaattccgtctatatcttctctgcctttgtacggcggcgacggcgatgtgaccaagagctctctcaatttacgcctagtagcacggtggtttcccctcttcttattcccggaatttccatctgattccggagattcctcaaggatctgacggagattccgtctgcgactatcggagctcttatcgaacaacatccgcagggttttgcgtcgtcggagattgaatacagggctcttcgttggactcatcgtgggactccccgcggtggacgcttccaagctacgatgtgccgcgaagagcttgaatttgtgtagacgggagagtgacatcgtgagattcaacggtggatcgatacgatcgcgaattcgccgtctgatcgctttctccttcacttttttttttctttctttttctgtcacatttatagaagatgcgagaatttagcaacttagtaacggcgaagtattcatagtaataatcattttagcgtgattcaaacatagatttatgtatttaaccttaccaaattgcaattaaaaagatgcgccataacgaagaaaatgttaggaagcacctgacacgtgtatataagccatagtctccaccggactagtctaattgcatgtttacgaggccccctctcaatttgtcatttagcctaaccacgcgtgcgaggcccacatatacacgagaaagcccaaaatatgtggacaataataattgagccaatttgattttgacataacgcgcttttattagtctgcatgattcttgtcacaacttggtaaaattgaataattctagtctcatcgaatatgtctgaacaaaattaaccaatacatatatatatatatatatatatgggagaattcaagtcgcaccattttatattcttgtgcttcacaatacttgagaatgaataacacttcattacgtaaatgagattatttatagacagatcacctaaggggaaatgacaaatgagatggaccaaaattacccttagctccagctactaaaaaattctgaatggatcttcttcctaagtaaaaaaacaaaatagctaaaagagagataaaaataaagcaagccaaataacaaaagaacatgattttatttctgtgtatttagaatatatgcagtagatgtattaaatgaataaaaacctggtctatatttagtgattttgtggctgtgtctcatcttgggtcttggctttactccttagcatctcagtgaagttgcctctcatgatacgtctgaatctcgtgtcttcacttgctgcagccacaacctttggtgactcgggtccctgacctgtcggtgatccaggtgccgtgctttccgttgcttctttcttccccaacaagcctccttctccaaacaagctcgtgacggatgatgcaatccccaagtgagcacccatagctttactaattgcttcaaatgtcccacctgatctctccttcattatgatctctaacgcttccttgtgagctggatctagcgcatctggatctttcagtaggttttgaatcgctggaaggaggtattctttgacacttgtttgagacaaatcttcacaaccatggttcaaaacaaaatcaggttaaacttggaacattgaaacatcgaagaagaagaagaagaaagttatgattttgatactcttaccagttgcatcgagtgcacgaatggcttcacagaatgcgttagctctttctcgacgacgatttacgtctgttgaagagcttggacttgctgaaagttgtaaaatcttggacaaaagataatctcgaagccgttctgtcgtgtgaggaatagcaactaagagtgcacgaatgactgcgattatagcctcatgagatccatcttccataaaagcatccatctggactaggattttatcaacaatctgcatcatatacaatttaattagcgcataaaagaaaagatccttacgtaattccagagtttattatgcattattaccatgtcgactttgaaatgctgtgctacagatccaaatgcatctatgcttgcgtacttcacattcaggttctggtccgagccaagagtgatcaaggctggtaaaacattggcggaagcaacttttgcgtcgatatatggaacctgttgcgcaagtaaataacaaagcttcttagaaaaaattgggggaaaaatgaaagtgtgtagtgttgttgagaagcttacgatggtcttcaacaacttagcagcgttgattttgagttctgcagtggaatcaacgaccatttcccacaaaatgccgaatatcatgttatggtgtacctcaaatgtgctgttatgtttgaggagtacgttggtaagaagaagcagcttcaagaaaccataataaacagtggaagctaaagaaaacgcaccaaaggaagcgaactgcatccaaaacctcgttgttgtgcttcgatgactggttttccttggttttgctctcaactaaaagttgtcgtaagaagatagttaattcttcgcgtttacttggcgcaccaagaactcctgccagcagaagcggtagaatacaaagagtggcaagtctattggctacagcagttcttggtttcaggcctgaagaaaggaatcaagaatcatgtcaggtcctagttgtagaaaattttgtgtagctatacatccagcaattaagtaaccttttattcttggatggattgcagaaggtaagaatcgaagatcagcctcatcatctccagcggccaccaaaaatacaggtaactcaatgtgagttaggtaggaacttccaaaacgttcagatacagccaagagaaactggttaccaccacagagaatttataaagattagtgtaattaattacccctaagatcaatacaagataagagagcagttgtcagcacaaatcatacctttgttatccgatttctcaaatggtcttccttctggggcaacatgcatgccagttgcaacaagttagcaaagcaatcaacatgcatccactcaaacataggccactcagaacgtcccctggtcagaatttccagtcagataagacgtattaaaattacatacaagaagacgtcagaaacttgaagaactttttgttgcccagagtgattgagggggttgagaagcttactcggcatagatctcaagcaaggaaacagagaatgcagattcctctgactttgagatggaagaaaacggacatgttgtcattgccttctggtgtatagctggaagcaactccatgagcattcgtagtaggacatcaatgttccatcgctcccgttcacctaagactcgtagatgagactccaatgacccttcaactccagaaagaggtgggcagtgctgcaaatgaaaataacttaatatgagctattctcagttacaattttaaaaatggataatgtattgagtctatacctgagctgagctcaaagtgtgagagagaagacctctcaagatatgatccagcctgttaccccattttatcactgcaggaagtagttctttcaatgtagtttcaaccaccaggccagacggatcgcatatcagctgaaacatcatctcctctacctgataaacaagcagaaagctggtgttgtagcattttggttttattaatatcaacttaacgtctgtgctattgtctcatgccaacctaaggacactaccatatcttagaaattctgtaatcagcctattttagagctgcaaattcagtaaggcggaccttgaaatatttgtctgtgttaggaaatagtggaagcagcaatgccagattatgagccgcagcctctcgaacaacggtggcagaatcttctatgagttgttgtacgatagacaaaataagagagtcccgtatctcagggcggacatattctgcaagctccccacatgattgagcaactagcagcctgcgttcttcatatgtatgatttatctgaaatagacacaacaagcatgtaatcactcattttaagaaatatcacaaaatgtttaaagcgtagacaacaagttgtaaaagcaagagtagcattcacctgttcccagcactgcggaagcaattctgtttctgttctcatttccccaacattcctcgataggctaacacatgcctgagataaacagtaaaaggagtcagctcaaaaccttaaacagtcttattatacgttatgaaagcttcaaagtttatacagtaacctacatccataataatccgcctctgctgttcatctggacgtttgatcaggttgaacagtgtatgagtcaaggaatctcttgtactgctaactggatgccgctcaattgcacacatcatcaggggaaggagttcctatcagtcaaagaaacaagataattaatatttcgccaactgtcttagctggtaaaattgaaaaaagaatttaaacctctcgatggtttatcagaacatatggaacaatattcggcaaagcatctgcaagtatctgaatcgttcctaaaccctgtaaaagaatgaaaaaaaggaaaattcaaacatcccatataacattttgtagacacaacattagcataagtatagcgaaaggaaagcagacagctacattggctgctaccatgtttctgatgacaaaagatgagcttatagagtactcaaaatcattaagaaaaggtgaaaatagcagacattcacgatatcaaaggaagtacttgccatttcctcagaagcagcttcaccatttgcattgtctgattttgagttagaatcacgaccaattccaggatccactttcaagatgcttccaaggtctctgggtgagaaattaccgtttgatggacttaacaaatagtttgagacttctttctggttctccaacgtaccattgttggcataagatatattgccggcctctcctgccacctctctttgatcagcaataatattcttaacctcttccaccaccatatcgtcttctgtttgtatgtgccctttctcagccgatatagaaactttagaaatcaaaccaccatccttttccactgttggatttacaacttcctctgacagagtgcttatctgttcctcgacttccttggattgtaattttacaggatcaccttcattcagtgacacatattgaccagcgcgagacccttcaatatgcattttaagagaagtgatctcagccctacagtcattgaggttcctcctctgatgctctgaggattgcttcaaactttgcacctgaatactatcagtgtcatttcaggtatttacattatcagatatgaaagagcccgtttctttaagaaatccagtctataaaaaagactacctgcttttctctgtcccgaagatccttctgaagtgattctgtagacttgttaaaagcacctatttgctcttcgaaattttctttgctcttaagtagtccgtccttttctttgcttagcctctcaatctcctttttcaatgattcattctcctgaagcatggctattttctcctgcatccaagaaattgtgaaccatgagaaattcaaattcaaaatgcatacagaacattctggtagatttttattctcgcaaatgctcaaagtgcaacataaattgttaactatgatactcaattttcttacatgtaaagtgagcttccattctacactcaccccacagtcaaaatagcatcaagtttcagaaaataaggaaaaatacagagagggcaaagaagatagaagttggttctgtataagacaacgtcaaaaatctaagtttcaaggtattgatctttctgacagcatcagttcaatttaaagtattgacatgcaaattaagcttcaggaagtaacctcagctgcttctgaagttgatgagaggtactgatagtaataatagcgcaaggcatcaggtacgtgtgctggactgtcctgccaaacgtccaagttctggtctgtcacctgagataaacacagacacaatatttacaaattgctctaaatacaataccatcacagacgataggtcagacacttctgtttctccttctagagttggagtttattcagacataaaacttagttttggtctatcaactaaattaaaaaaaaagaaaacttaacccaaaaacaaatatattaacacaaactcaaacaaaagacaatgtcagcaacttcagaaagaacatacaaagccgaaaactttttaaccaaaaacaatcttcagaagagtaaaagtcatagacagcttcaccaatcaccatagctacttacaaatctaagtcgttgcagaaatggaaaacgagaaaaataaaataagctactaaacagctcccggaactttttaattattcttcaatacaactttcctaaatggagtagcaacacaaccagaaaagggtaattaagattccaaaatggtgtttgccaatcagacaagaaaaacagaagatcaaaaataaactattgtaaactatgcacaaaaaacggtaaacatatagacataaaattaagatacctcctcataaaatgtcatagccgtaagcctataacctgctagaagaagatattctttcactgcacagtttaagtcttgacgttcattgttcttcaaaggccctatatcagtgaaggaaaaatctttctttttccgttgaatctctggcctgttgcctccaaactcatccgaatccatctctgagaaataacaaacactatcaggacatagtttggtgattaggttgctaccatgctggcactgatgaaaataacaaagaataaaactcatatgcattataaatgatgctttcatacctaagcagaaaatatctccatggagaaaaatgaaagaaaagaggagatggctggcgtacaggaactggaaacttagactaacaactacttattgcagagaaaaattctaatacattgaagagtctgcacttcagactaagatcatcactgaagtttctgaaaccctaataaccgacttcatgccacaaaacccgaactgagtgtttatatatacacgtttatctaagtagaagattaactacgagacgctaaagatcagaataaatatttcagtaatggattaccttctgacttgtcaatcgaaggaacagatttcttctgtccttcagttttcaatcttgcaatatcctcctgagctagacgaaattcatattcgctgatagctaacttctcagctaaagcttctttctcctccaacaaactttgtggatccgcaactgcattgtagggtaacaattactagctacgctacaaaccaagttgtctaagaaagcctgacactatagaatcaaaaacctcagaatgcgacacaagatccgacatgggtttgttcttggtcataatagtataccccatttaacaagctgaacaatcaccattcaagaaaccttcaattatgattgcttttcaaacttagactatgagaagaacatcaaatgcatgaagaacaaaaacatgactccaccattttcaggattctccatcattttatgaactactgtgcttttcataacttttaaaacatgtccatgatccaacctgaacactattcaactgctttctgaattaagaaagaccaaataagatagctaatttattcacatcatacaacagatccccaaaaagatcactaaaatgtaacgcagctcaaccacactgagagggacgatttagctgacaatttcggtagcaaacaaaataacaatgtgaggcagaatgcggaaaattggcgaacctcgaattgaattataccgagaaatctgatcaggagggaaacgggaaggatcggaaaagaactccttaagacgaattgcttgggcatcgcggccatcgtcgaggagctcgtgaagaagctcaaacgccgtcaagaggtagttctcctccatcaggaagttgacgaaaaagttgcacaacgacgatcgctccgcgtccatgttttgttttcttcttctttcacgggaacactaaaatccaatcagaggaaacacctccttcgttccaatatcactgagcattccaaatgaaaattcaaacttttcctctctcgattcgatcggattcgattcaccagatcgtgtcggtgttctcgccgatgaatctctccggaagcgagtgacggtagagatcacgtgcgacaatgtaatggtacatcgtggattagttgaaccagattgtgtaaacagtaagctataagacacgtgtacggttcacatcacaagattatggcaacgtcgtttgtgtcacgtgtttgcttaggccatattgagagagaaaagtcaacttttccttgcaaaaataagaaaattttaaacttacaaaagtgtttagtctttttgctaattgggcgattgctggtaaaacatataagataagcataattattccgcagattaaccaatacaatcatcaaaatatgttcatcttatgacatcaatgaattctcaccaatcacaaggacaacaaaaatagtactccaatatcataaatttctttataaaatgtttctagaaagatgaaaaaaccgtaaacttcttcgtgttattacaacaagagtgagtaaagaaggtgaaacaaggatcacttgaatgaaagagacgaaaagcagaagcatgtatattgtataatatgtatgggaaccaaaacaaaattgtaaagccaaatacctgaaagtgcagcaacatgagaatggatgggattcttagatctctcaagcatagtgtgtctgtacctgactgaaagcttcggttaccataatggtttaatactgagacggtaatgtgggagctggaggctgagatttgtaaatttgagcatgagctatatcgttgtcgtcatcgacatcggtattatagatgaaagcatctcttgaagtagtattaagagtagcttcacttgatgtctgtaccgatgaatcaacgggtttggatagaggataaacctgtgaggaaaactctggcgctagagggctgctggtgcggaccaccggggaatcaacttggtgatagtttaaaacggtgctcggtttcacaggcagtgcttgaacgtgcctcgaactgtactgctcgactggaatgtaatagattgggtatggttgtggcggacgctgataatagacgtggtttgtgtgatggtatgctgtggcaggcaatgtcataggtgagtttccggtaatgtaaggttgtccagtgtaaatgacttggatatgttgttgttgagcttggttcataaatggtggatacccggaaattgggactggaactggtctgtttagctcagccacatacaagtttgaagacggtttgttctcaaaagcatgtgagtgtgatggtagctcgtgggaaggtattggggtgactgcagaattgtcgttgctgttcgtagagtaagaacaaaaggaaaaatggttaacagttacaaaaaggctttccaactaaacaaggtttagaggattggcaccttctctaccaatacatataattcgaagattacattcgtagctgaataccaaatgaggaacaacatatccccgagactcggagcacattgatccgaattgagaattaccataacacaatggcaaacgagacaaactcctgattgcctaagcctatgaactcattcacagatcatatacatgaagacgagaacctaattcgactacaggatcattccaagaattcagtttctgtttccaatcattacttcaagagatagcttatatattaccacatttaaactcgttctgcaacactaccaaattcatttgtgtcactggctaaacaattcaaaaactcatagcacattgcatttcctagacaacaaattgtgtacataagttttagaacgcttacacctaaaactattcgataaagcaatcaaatggtgaaatcaaacagttaagagcatagaagaataccttgtcactgattctattggcgcaaatttgacttgcgagttcgctatgttgtcctcgccggagctttttatcggaggtaaattgctcgacgaaaccgaggatgatgtcgagccaaaggatgaattagtctctagcatcatcgactcctgtccacaaatcccgccgttaccatctccacttccgctagttccgctattagttcgtctagtctgcatcatctccacgctcttcaaagcgtctacgaaccacatctccgtcttagggtgctgaagtaccggctgagtcaattcttcacgaataggcttattagactcttcgattccaagccaatcgatatcggtctccactttacactgatccgaatctccctgactcgcaccagcttcattcgattgttgtgatttcaatgggaaaagaaacaatcggatacgcgattggggaatcgaggactcggaggagagataaccgtgttcttccatcatgatctgaacatcctcatccgcctcgacggagataagcgaatctagttcctgatcaggaagctgatatttaactttgaaaggataagagattttgagcgtaaccgtaaggtggctaacaagagaagcgaagctcgtttccgcggaagaaggaatggcgacgattcgagtatctccgcctacataacgcggcgatttcgtctgcggaggtgaaactatactaccgccatacctacacatcacccgtaactttccatttctttcattcttcttccatctcggtgtgacaaccttcgcgccttccgctacggtggcgaaagcggaggagacggtggtcatggaggtgcgattttggtttttttttacttctgagtttcctacttttttgggcagacgccgtttataagcggcgagtttttttttaatcgaatcgaagttgtttagctttactgtgacggtaacgttatcattaactgaatgtatcagcatagtaatttgggcccatgtactgatattcccgagcgcgttacttttaaaacgggtttagaaccgggtcgggtgaatgataatccagaccgggtttaacccggtagagtaattctgctttattcgattttttagtttcttcagtgtcgagaaatgttaattagttcaatcattgttgtttctttagtgtattatagatttgatacaattttggtttgatatatagtgctgatttgaggtggactttatatttatttcggttatattcggtttaggtgttacggtaagaattcgattagaaatttgcgagtgataagaagatgtaaaaactaaattattcagaaatagaaatctcatgaattttttcagggttagtggtactaaatttaatatttataataacaataaaaaaaaatgatactaaagtatcaatactaacttcttctttctcactaacttactaattagagattatcatatttatttaattagttgtctaaatgaacaggttagaatattgattcggtttggattgaacaaaagcttaaaagcgaacggtctgtgctgagttgggttcgtgttggatgaaattaagtttgtttggttcggtttggttaataaaatcaacactcgtaaatcgtaataatgccgtttgctgatatgagaaaaaaaaaacaaatttggttaataagatactcgtttggctcattctatataacgtggatcgatttgaggtatcatccataaatacatttaccgaagtaagatcaaaaccaagcttctttttatttgtgttttatgccccaaaaccgacgaaactgtatgttcaaatctctgagttactgtttttataatgaaaataaacattaatacttacttagttactttttacccaaacaaagctaattgaaaaaaataacaaaagtttaattgtaaaaatcatattgcggaattcatttagcttatgcacgtttaggatactcatgatttttttttcttcataattttcattatgatcccggaaacagaagttacgtatgggaagataaaagcaatattgtatacttcaacgttttttctataaccagtatattttgacaaattccaaactagttttcaaaacctatgattaaaagattcatcacaatattggaaaccaaagattcgaatttttcttcagtaaacgtttcagatactttcactttagcgttttctatactaatatacttatttcttttgaaatttctttcgtagacacataccctcttgaagtcttgattggattggagtaggtttctggttaaagtatagttggaaaaagaaaagaaaaaatatgtaacgcttatacgttagaggaccaaagataatataacgtacgtcagagaatcataattaacgtaacactaaaaatcatcagttacctaaaaagaagaccaaaattgtttttatgttaacatgatcaatagtgtttaagataacagaatgtcatggaaattaatctaaaatacctttctctcccgattcgattttcaagtgcaagaaatcttgtgatagtattacctagttggttcttagtagaatagaagaaataatatcaagtgacgaaatttgagagatatatactatatagcggtcaataacgttgattagttttgatatttggtgatcgaccgtgactttattcctttgctgtttatgagtaattaggatctatcctattctgtttactttataacattgcgattcttgtgaaggaaaataactaattagtatttacgtctccaattttgttgtcttatttctttctttttgaaaaagtcttattttctaactctgaacagatttccatggtctttcgttttatatgtacatttctttcttttttcttgaatagtactcaccatcattttagttattttttgaaaattctcatagaatttttgacttgacagccaatgaagatattacttaaaatcaataagacttaaacatcgtgaattggattaaaatccgcatataattaatgagatattctaagaaatatactttctttaaaaagtaacacaacaacaatttggaaacgcccaagaaggtttgtattttagaatcacgactgattaattaaatgactacctttaactcgtaaataccgataatggtaaattgataataaggggaggtttttcatgtatttattacacggagatttataattaatgttgttcaagtacacgtactctttaacaaacaacaaatgttgtgtaccttaccaaaaaaaaaaaacaacaaatgttgtgtaagtacatattttttccacagacaactagctttttatgcgggagttatctatttctccatagataaatggctttttctacgggagtaataattcggaatattagatgaatcgttcaaaaaaaaaaacgaattaatgacaaataacctaaaacttaacaaatgtccatggttagcttaagggattagtataattaatcacagacgtaaataatcaatgagaggagagaacactccaactcaagtcaactcttcttgtatatatatagagacatattcctccttgtaacgcacagcaacaagtacaagagagagagagaaagaatcaaaaacatctgtcgcggagagagagagaaagagagaaagagaaaaatgtcgatggctttgcttttgacatcgccggctatgaagcagaagccggcggtgataacttctcctcgccgtggttcttctccttctcgtcgtcttcgagtttcttgtgttaccacaaaccctgctaggtaacgatttattattcgctttctttttaattatgttagatcttcgatttcatttctatagtttttttttttttttttggtagtagagatgtatatgaatttgcgttttcgttgtcttctatttatcatgtgattatgcgggatctaaatcgttaatccgtcgttttcttaacacatatagattatttaaatctatttcgctcgcagttactttaaaagttttttactggctattagtttaacgatttatgtcatttttttatttgcaagattttgttgattcacgagtcttaatgtttattaacatgatgagcattcattagtgctatgtccaatgagactataatactactttcttaaagacattggattccatgtatcttcgttaatcccattattcatattcgtatcatgatataaactttttttttggtccacctgaaaacttttctatattgcagaatcactacactttttttatgtacactttatgagtgtgtatgcataagttggtgattggtttcacacggatcatgacattagctaggtgaccttaagatcctatatagagagataagtttggttgattcccttatacagatattatttgagtaaactttaatcattttatgcttgaacttaaaatcgtttaatttgtttctttttctttttgtttttctgtttttgggttcatactgagacataaaatcgtttatttaagtaaactttttcttgtcagacaaagtacgattctacttttaaaaggctgggttgtttttcacaattttatttttaccccaccatgcaaaattattgaacaaacgtacgttgttgtttttttgtttgtatttggtaaaatattgtacatacgttagttgacatattaaaatcaatatacacatcaacaacatccaaaattccaatctggttatggtgacacaacgtcttcaaataaaaacgatgggactaatagaccaatcaatatcatcacaattttatatatataaaatgaatacatttcataattctttaaataaaactatagaaatacaacggagttgtttttttaagggagtttatgttaaaattacatgttgtgaaagaatacgtatatataaccaccacatttatagagtttactgtaattgtactattattaaccctttttatagttttgtactataaaaagatatcgcaaatcttttttaacacgtatccatgactaatatctgtttggtattaaaatttgttcacctcttttttttgtaggaagaaaaacgaaacatgcaatcattttcgacctatcaaagaagtaaataaccaattaacacacacaataccacaggagaagcttgagatcttcaaatcaatggaaaattgggcagaacaaaaactactaccttatctcaaaccggtagaagattcatggcaaccacaagacttcttacctgcgccagagaacgacgacgaattctacgaccgagtaaaagagatcagagaaagaacaaaagagatacctgacgattactttgtagttcttgtgggagatatgatcacagaagaagcacttccaacgtatcaaacgacgttaaacacactagacggtgttaaggatgaaaccggtgggagtttatcgccgtgggctgtgtggattagagcctggacggcggaggaaaaccgtcacggtgacttactcaacaagtatctttatctaactggtcgtgttgatatgcgacatgttgagaagactatacaatatcttattggttctggtatggtaagtatttcacatttatcgttactattgatttggttacattattaatattttttttggcaacgttacgttttaggattcgaaatttgagaacaatccatacaatggattcatctacacatcattccaagagcgagcaacattcatctctcacggcaacacggctaggctagccacaacatacggcgatgttaccctcgcgaagatctgcggcacaatcgctgccgacgagaagcgacacgagacggcgtacacgaagatagtggagaagctattcgagatcgaccctgacggatctgttcaggcgttagcgagtatgatgaagaaacggatcacaatgccggctcatcttatgcacgacggaagagataacgatttgtttgatcattacgccgccgtggcgcagcggattggagtttacacggcggcggattacgctgggatacttgagtttctgttgcggcggtggaaggtggagagtttgggattggggttatcaggagaaggaaggagagcacaggagtacttgtgcaccttgccgcagaggatcaagaggttagaggaaagagctaatgatagggtcaaacttgtgtcaaaaccttctgtttcgtttagctgggtttttggtagagatgtgaaactatagatagatatttaaaataacaaacaaacaaaaaaaaaccaaacaaatataaataaataaattatgtttgtgatcaggttgcaagttgtcacttgtgaatgtgagtaaccaaactatatagtatattttaataattttatatggacatctcacaagttttcatttattcaccactatatccatcttttattaactttataatgttttgatcagtcttgaaacaacaatgaggataattataacaatgttgatcttctgtctatcccagtcgagccagtttgatcggcttcacgattgttaaaccatatctcgtgtgaacaacttgaacaccggtaaaacgattgattcaatgatggatatcatgattcattgtgtaatgtctttcgacaattgaataaatccactactagttgagagtctcttttgaagatgacacatctattaataacccatattgtttgcaaagcatggagctaggagcatggtcacaactattaagagattgtagttgcatgcagccgtgatgacataaagacttggagaaattcgtgtcataagaagagtttattgttatgagttatgacgacaattcagtgacacatgaattgttttgtaccgtcatactaaaagatctttgtcgcgtaatatgattttgctttgacagcatgattacaatacgacaagcattttttgcgtttcaagctgcagcggcccatgggcctctttaacaaataacgacagaagtagacaaaacaggtaaagaaaatggcagtgatgtaataaaaaaaacctagaagggacatttaagagactttcaaacagagtcgtttatgcaataaatgcacacacacttgctgaaataatcacgttccagagagttttctgaaattgatcgttttggttcttcacctttccttttctttgctttctgcttcctcccttaaatacatttcactctgttatcatcgatttttttttcttatatctcaatcttattttgtttgtcttttctccatttttgtttcgttaagaagaaacaatggttatggctatggatcggatcgctttgttctcttcctcatcatctgtttatcatcacggttcttctcattctcatggctccaaatcttccagagttttcactattcgttccgactctacgtgagtttctctcttcatttccagaaattctgtttatttttctgtttccccaaaattttcctgattttgaggtttcgttctttctggggtttaagtttgttcagcgatgatcattattaacattggctttttatatgcaatctcctgcttctatcaaatttgtatttaaatgcagatttatttcgttctgtgattactaatctaaagcattggcttttgatcatacgcttgtgtgtgctctgttcttacgtattgcttaaaatgatcattatatttatagttagttacttttatttaaagcattatagttacttttatcatatatatcttctcagtttgttttctgctgaagctatggacatgtcacatgtttgcgatcacatgtttgacatcgcaaaactcttaatttttgcatttaaaaaaaaaatctgatagggaaattgcaatctttgtctttcttgtacaattcagtatttgtaatcactagtttatggagtatatgcatgcatggattgttccctttttttgactaaactattatttaatttggttgttggcctatcaggctacaatgttccatcaatgctttcttaattgattgctagtgtaagtctttttaaaatcaaatcacattccacataaattggttaaggctttttaatattgtcttgactttttgtagattgcgtttactctatgtttatgcatatgcacacatctatgtatgtgtttatatgcactgtagttggtcaagttaggtctgaaatgtttttgcttgttgttttggtgatactgttttggtcagaagaaattttgatttagagcatgctttgtcttgtagtactgcaagtgccttcactgttgttatatcatctatgatgaacactgaatcacacattagcttgtctttttcttttaagaaactgattattctcgtgttgggatatctcctttttggaggtgtcttaaagactataacttgtttgcagttggttacctgaataacacgaaaccctatcatctaattctggtggctgtgttaaatgttaattataacagtattttcagtctctcaagtttcttattctattgatcattttggaatcttctttaatggaaaaattgcagagcggttggaaggaaactgtatattcctcctcgagaggttcatcttcaagtgaagtattcaatgccaccacaaaagctggagattttcaagtccttagaaggatgggctaatgacaacttgttggcttacttaaaacctgttgagaaatcatggcaaccaactgattttctccctgaacctgagtcagaaggattctatgaccaagttaaggagttaagagaaaggtgtaaggagctctctgatgactaccttatagtgcttgttggtgatatgatcacagaggaagcacttccgacttatcagaccatgattaatacattggacggggttagagatgagacgggagcaagtccaactccttgggcagtatggactagggcatggactgcggaagagaatagacatggtgatcttcttaacaagtacctttatctgtctggacgagtagacatgagacagattgaaaaaactattcaatacctcattggttctggaatggtaagctcctttagtataataatatggctagcttttcttataaaggctaaacctacaagtctctttttttggtcgtattgattgtgttttgttttgtaggatccaaaaactgaaaacaatccttacttgggattcatatatacttcttttcaagaaagagctacattcatctcccatggaaacactgctagactggcaaaggatcttggagacttgacacttgggaagatttgtggcaccattgctgctgatgagaggcgccatgaacacgcctacaccaagattgtagagaagctctttgaaattgatcctgataccacagtcgtgggctttgctgacatgatgaggaaaaagatctcgatgcctgctcatttgatgtatgatggtcgtgatgataatctatttgatcacttctcgtccgtggcccagaggcttggtgtctacactgccaaggactatgctgatatactgcaacatcttgtggaaaggtggaatgtggagaagttgtcagacctttctagtgaaggaaacagggcccaggtaacaacattagaaccatgaaaccgtttttgttttcttgtttttgacttgacatgaaacatccaacttctattaagtttgtttactttgttaaaaaacctcaccttgcattaaggaacttacagaacctatcatatctataattgcattgtaacttctcctgtgcacttggagattcatcaaattggaatctgagttctttacactctactctgacttttcgctttgttttaatggcttcgaacaggactacctctgtggattacctgctagaatccgcaaacttgaagagagggctcaagggagaaccaaagaagcagcaaaaaacataccattcagctggatttttggtcgagaagtcagggcttaaaagaagtaatgttaagcaattaattcttccatattataatcccaagcaagctataaaagatcttcaccaacaccttgatgaagaagccagaagtatgttatgttggaaacgtgtgtagataaagtatgtgttagactttgctttgtttggatcacttaaatgacttactccaaagaatttgctttgttttgacgattttatttatttatttctgcacctctatttgttgctagtattgaatccacttctgtaatgttttctcttcttctgaatccaataagatatttaaaaagtaaaattttgtgtttcgttctctctactttcaaatttgtttcttttgtggttaacagtaattacctcactttcttcataaactggttgattttgtaaaagttcaatttttatgcatcaagttcctatgtttgtgtatccgcttaaggaaacgaagtgacaaattataagaaaagactttatatatgtaacagatcattgacgaattacatcaaacactcaaaaaacaaatgaacaaatcacaataatacccaccgaaacagaaccataaaaccaacatttgatattgatctaactcaacagttctcaccacaaaacaaaaggacacaaactttaaacttggaacggccatggccagtccttcggattctcctcactctgaaccttaccagttctcttcatcgcaacgccatcaccaccatcgacataagcatagtacttcaagaagaaagcacacacaagaacgatccaatcaagacaaaagatcacaatacaaagaccaccaccgagtttcaaaatcacagcagcatcttcctcacgcacatacgacttaagactcccgaggaatttagacgtgttggtgaagatgagaacagagacagagccttggaatatagcagtgagcacagttgcaaccatgtgagcggcgtaccaacggtttcttccgcaagatgcagcagcgcagcctgagactgcggcggcgattgtggtggcgtggaggaggatgaggaggaatccgcagatggaagggattagacggagagagagtgtgaggaagatacaacttgaagcagcgccgagaaggatgtagttggagaaaaggaagatcttgtgtgtatggtaatgagactcttctactggtgatgaagaagaaatgaaacccatgatgagttttgagtttttgaaaattttggattttgagaaatgggtttcgttttctttgatgaacagaagaagaagaagagtgtgtgattcgtggaattgagaagagcgcaacgagtttgtttatgtagaagttagtgaagagagagattgtagaaggtaaagtttctaaatatgaccgttgttgaatctggaacggctgtttttgtaacggctagtttgattttaataaggtgggcccaatgattgattataatataataattataaggtgggcctagtgggccgtgtattggtcatgtttatccgggtataatatactgtagtagtaataactatagtggggcctaatgggccgtgtatttgattcatgtttatccgagacaaggatacgattactctatatccaaacaaggtcagggtcctctaccgtcttcctcctgcttccgccattcttcggacttttcgtcgtcgtctctcgaacgcgtcactcttatagtcggttttgtcgttgtcagtaatttgcgatttttgaaggttaacgagaaaaatgtcagactctgataatctacagcttccaccatcatcgacaggtgagaccttcttcttcttcttcttcttctttcgcttattcaaatttccaagctacgttcttctttagtgttttcgcgagacgtttttttgtaaaagtcggtttcgtacaagtttcgataggatttttgttgggagggatttcgaatttttcttattggtagagagttcttagggtttagaggagattgatcagataatgaaaatttgggatgctcatctttatcatctgtattttgttaattctaggggcaacagttgcagctactgatgttggttggtacattcttggtgaaaatcagcagaacctgggcccttatactttctctgagctatgtagtaagtgttcatgttaacagattccttgttctagtaaggtttataagaaatacgagctattaagcgctgtactttacttgtttgctttgattgggcagaccatttcaggaatggttacctactagaaactactctagtctgggctgacggaagaagcgaatggcagccactttctgccatccccgatttaatgtcaaggatatccggagctgagattgcctatccagctgtaggtaagatccttctcaccattgctagataattgaattcttggtattttttctagtatcccatattcagggcacttactatttggtatctgaccaggttcatctgggttgataaatggatctaatgctggaaccaggcaagagaagcaagattatactggttagttatttatgtagaaaatgaattcttcaatgttataatttgcaaaagtgtcgaccatgcttaccacggtatgttgttattgtagcctctgctagtactgaggatgaatttgagaaatggcagagagagattaaagacgcagaagcagaggctgaaaggttgaaaaatggttctgtctctggtactgagcttgttgaagatgatcatgaaagggcatcttcaccacctgagggcgaagatgagttcacagatgatgatggaacaaaatataaatgggacagagctcgtagagtatgggttcctcaggtaaggctttgttttgtccaccaaatcaaccattctttcccagtttcaactattttagtgagctcaggtgtccacctgacttccaagtcgtgagtggaatcatttgtgtgtgtcatcttgcttggtggctcatggctttaccttttctgaagaaattctcaattaatttgactatctccaatatttttatctgtgtttatcaaaattgactaccaggaaacctaactagcctactcattgtattattttctctttactggttttggtttttccctaaggagcatcttttggaagagaaagtaagaacttttttaataacctaattgatgatgctgtttattgtaggacgatccaccactgggtagcgttgacccgtatggactcgaagagatgacctttgctaaggaagacgaagtatttccaacaattaacattcttgatacttctgttgataagaaggatgcctctaaggatgacgtggctggtaagaaagaagaagatggctctgatgaaaccgctgaaataaacagtaacggcaagagaaagctaccagagccagaaactgaaaagaaggtttttctttcttcttcttttgtcttcctttcggtttcgtaaattaacctttgattcatttctcttccttgaggtcatacatgttacgtcatgtttggtctcacttagctcaacctcgagctgtaagtactggatttcttgattgtggagtcttgatttttcttcagctgctgaattgtagtgggtaaattactttttttactgatgtgcacatcgtaaaggggaaagaaaaaccaaattgttctaagacatcatacttatattgggactagcagaatacctttactatttttttgtattaactagtaatggttgtttgtgttgtatgaatcaaagaaactaaagttgcaattcctcatgaaattttctgcaaacgtttctaagtttcaaattcattttcaggaaccaaacaagcctccagattcgtggtttgagttaaaagtaaacccacatatttatgttaatgggttgcccgatgatgtcaccatcgaggaagtaagttgtggtcatacttcttctaccattatgaatatctgaagcttttaaatggactgatagtaggtatatcattacaggtagctgaagttttttctaagtgcggtataattaaggaggtaaatctcactatctgaagattcttcctgtgttttattttggaatcctgtgtaagtatcccctaacaatgtggatctggtaaacaattcaggatgacactggcaagcctcgcataaagctatacagtgacaaggcgacaggaaaattaaaaggcgatgctcttatctcctatatgaaggtaatggctatatttgaagttctgtcctcatgggatgcataaggttatgattttaaactttgtctatttttcatcttcatgtgtatttgtttttgttttcactaggagccctcagtggatctggcaattaaaatcttagacggggctccgttacgtcctgctgataagctcctcatgtcagtttctcgagctaagttcgagcagaaaggttaatactattgcacatttgttgtataacaacttatcggttatgtaaaacatcccatctgtggctttagtttcggcaatattttacttatggtttttattggctttactttttttttactcaggggagagatttataactaagcaaaccgacaacaagaagaaaaagaagcttaaaaaggtcgagcaaaagttgcttggatggggtacgttttcgctttcgtgtactaaaaacttaccttatctctagaaagacgcataatagagaaatatactaggagatgctagagattcatttccttacgaccataggaaggtttattgttaaaattataatttcttttactaggaaaagatgtatctatattgtctgtgctttaccagatctttgtggaactctctaaacttaaccattacttagcaaaaagactgcactaaagacttttaacctaatcaattttggaaagaaaccttttaatgacgagagtttagaaacacgatataggggttacagacatatcattcttttcttattctttctggtgacttgtgatatcttaactgatgagcgtttcctgttattgagccattttttcctcctactatgtttatttaggtcagtggccattgcggatgcatggatcaaaagggaacatatagtcatgtcaatattatctatttctgattattcctagttgattttgagcatattaaaatcaaaagaaatgaccattttagttgttgaagttggagattgttcctagtggattctaaattttatcacatttcctctcttttgttgacgtaggtggtacagatgattctaaggtctcaatacctgcaacggttgttctgcgctacatgttcagtccagctgagttgatggtaggtcttgtccaatagttaatatgagaaatgttgctatttttaagagtagctgatatagctttgagcatttactctgtttgcaggctgatgaggatctggttgctgagttagaggaagacgtgaaagaggagagtttgaagcatggaccgttcgactcagtgaaggtaataatatgatttctttttatcttaagctggtggtcttgcttgctgcatatagctttgtggaaaacttgagattattttggagtaccaatcgaatctcttctttacaggtatgtgagcatcatccacagggtgttgttcttgtaagattcaaggatcggagagatgcacagaaatgtatagaagcaatgaacggtcgatggtacaaactctcctgagtcatcatttccgcctaattgccattagagtcggtattgagtctgatgcttacatgtacttctttctgtttctggatgaatgcaggtatgcaaagagacagatacatgcgagcctcgatgatggatcagtgaaccatgctacagttagggattttgatttggaagcggaacggttagatcagtttgcagctgaactggaagctgctgagtaaaaaacaaaagcacaatgatctaaagctgggaagatttggattattattctgggaaactcaggtttctgatgtaaatcactaggcacagacacatctgaatcagaccaacgcaaacccagaggaccggttttatctagtactagtagtattacctgtagtgaaattaacgaataagactgcacttgcaagtgtattttgatattcgttgactaaaaacctttactactatgtaatacgattttcttctagaaatttgaaaaatcggaatttaaaagttatgcttcactatattttttccttatttgttaaatcatgatacttagcagtttttgtgtgacaccatcacatgaatttttgtttctatcaatcatttgtttaaaatactttgtattgtagtttggacctaaatttcatacttttacagcagaatgttgtcagatgatctctaataacagaatctttatttttctgtttttcttattaaaaagtttcgatttttttcagatttcccgcaatgaggcaaaagaagccgccgagttgaaatattttgaaaaaaatggaaaaacccaaaatattttcaagtaataattaaatgaagttaaatactgttggggctagttgacgaaaacaaaaattgttgaaaaatgatctaaatctaaagctatgcgggacccgctaatctcttaaccaatgagagaacgacgtatgtcacggaacatgtgtttctttgccgcaccaaatccctcatttaatcaaaaatcaaccaaagatccaaatttcgaaactttttagttttttttgcatatcgcaatttccacaaattttactgttttccttggctgttgttgtgtctgaatctccaagaagaaagagttgtgtctttaagattctgcttttacccaaattgggtgttctttttccaagtttctgagaattagggtttccgcgaggactctgttcaaatcgagctgttttggacttgtttgagcttggtcaattctacggtaattgatctaccctttgctctctattctacttaccgaagtagtctagtgtctctgctcagtggcaattgcgagactttgttgtcggtttgagctatttcgattctgttgtcgaaatttggaaactttttttgattctctatagacgtatctttggggctgaagaaagggattttgttatctgaatagtttttgaagctcaattttgttacggtgaaattctaacaagttggttcctttttgttgaatttttttagggttttttggtatagaggacgaggaatgttttattcgcagtttatattagctaagaaagggccacttgggacaatatggattgctgcccatttggagaggaagcttcgaaagaatcaggtcgctgatactgatattggagtctccgttggtgagtattttgctaccttttgcttttgtgtacaatacctctgattcaggtctcagttcgttgtgctcactagggttagcagaagctaaagtttccttctttttcagttgttatgtggctaaacaagttcatctaaaatatttcctaatataactaatttctttttctgagcagattctattctctttccggaagctccgattgcattgcgattgtctagtcatcttctgcttggtgttgtgcgtatatattcgagaaaggtgaattacctctttgatgattgcagtgaggcattgcttaaggtaaagcaagcttttcgctctgctgctgttgacctaccccctgaagaatctacagcgccgtatcactctattacgttgccagagacatttgatcttgatgactttgagcttccagacaatgagatctttcaggggttggtttctttatgttttaacattcaaactcgtattccactcttactccaatttgcataatttgtttatttgttgctccttgttttcctgtctagcagtaattacgttgatcatcatgttagtacaaaagagcagatcacccttcaggataccatggatggcgttgtatactcaacgtcacaatttggattagatggtcagtggttgtttcatatttgcttgtctttagtttgtagatagctatgccgtagataagcaaagtcattttaaaacttttgcagagcgatttggtgatggcgacacttctcaagctgctttggatcttgatgaggtatttttgtgtttataatagatattttctactttgttcaagtcattttggaacaagaaataggataaccatatagaaagctgaatatgaagaggttatctgtagatttcatttgcttttagattttgggttctttctctcctctgtttgggtagacgcagcagctggaagctctgattggtatccagttgcggagtcctagaccgtgaaaagcttgtaatttgaagtgttaggttgcagtcatgttgtagcgtcaggataatgttgatgttttctttttctagtgaagctttgcatatttgcaatcagaacttctctcttattattttggatgtgatcttttatcattcctctcttgttgtgcaggcagtattccaggacaaggatgttattggatccgacgatgagggagttccagggtcagtttttgttcattatctttggctatattctttgtagcataattgcttttatgcttccctatggttcctctcaaattaactatcgaagtgtcagcttgatcttcttttctggagctgttcagtaccttttctatattttcataccgctacttcagattgttatcatagattttaaatgctcacattagggaagatctcgagttgactgaatgataaaaagctttgcgttttggcgcttgaatgtgtgtgtttcaagctttgtaaccatgctttttaagttccatgacattcataccttgagtttgtgtttgttctgtaattggattgtgaattagaactgcaattctgtgagtcttatccttcttggatgtggacctttggtgcataatttggacgtgcaaattatcaatcaaaagttttacttatgtaagatattctatttgttgatagtattgatcacaacgcgtatctggatgcggcagcacccgggataaaggattcgatggaaggagtctctgaagccatgcccatggattttaatgaagagcaggtgcgtaccatacataatgcacgagggcatacctatagttgcttaataattgtcacctgagtcacagtgcttaatgtgatatattttactttgcattatgtctgaatgtacattgcagttacagactccaaatttacaatttgtttacacagatttattggcttacttttctggtaagactattggatagtattgtgaatctctctttttgataggttgaagatcttgctatgaataatgagttcatcgaagatgctcaagctcctcaaactcctggattagttgaggtgccaaactcgtctagtgtgagagagcagatggcatgcgatgatcacatggacgtagaggatctgaatgcagaagaaggtataaagtcctctggggagctgaatgctaatgagatgcctaaacgtggggaagacctgtcttctgaatataatgccccagaatcagcagttactcctgtggaggtagataagtcacagatagatgaaaatgtcaacacacaaaatgagccggaggaggagagggcagagcatgtacatgttacatctccatgttgttctcacatcaccaccgagatggaggatcctggtcaagtaatgaatgaggcaggagctaatgttgtacctgataaacccgatgctgttcctccacttgaaacccctggagaagagaaccgaggtttgttggcaaagaaaattgcaaaccttatacgacatcttagtgcctgccttatgcttataatttttattgttgccagatcattttgccattgccactgaggtcaatcaggaaacagattctagtttacaaggagatgagcaagcgtacagtagaccagatgggcagctgaataatgcacacgaaactgatgaacagttgggaaatttgactggatttaccgattctgatttccctccacctgagaaggtattagctgtacctaacagacagggggatggaaatgatttcatggttgaatctacaccagataaagaagaccctggcacatgtaatgatgatgcggggaataataacattactgggaaaaaacgcacttttactgagagcacactaactgcagaaagtttgaactctgtggagtcagttggactgattcagtcaaagagaactgcagattctgtccctgatgacgatgatttgttgtcttctatcttaggtatcagtttattttggatactctgtctgttcttttatacattctattgctctttgagctagctttatggatcaattatcgttgaattttttttttttttcagttggaaagtcatcctttctgaagatgaggcctacccctgtgcttgaaccagcaactacaaaacggttacgatctgctccccgctctactgccacaaagaggaaggttctaatggatgaccctatggtcttgcatggcgagtatgtttgtcttactgttttcttatatctgattttcttataccttagtttttttgttccactgctccaagtggacctttcatagaagttcttgttttagctacttaggttcaagacagctagagtcagaagtaaattaatgtgaatcttgaattcgtttgactactgattttttctttactgtaattggagtttggtcttcttttaagtttcacacctttaattacctaggagcgatatttttttaccttatctcaatttgtatttgttttcttctgatgttgcctacttttctgtttagcattatacgtcaacaactgacaaacactgaagatatacggcgcgtgcgaaagaaggcaccttgcaccgttcctgaaatcgtaatgcttcaaaggcaggctttggaggatggactctttaaggagccaatatttactggtaagttcatgacactaaaatgtagaccgttctatacacgttctgttgattgttcttataatctgcagttatatagctaatatgtttcactgattttcaggtatgtcagtggaattagtatctctgcacactgagccgtatgatctaagaggaatcatgataattgagaatgatgaccgtcatgcttctgttggagcggtggaagataatgaatgttctgttacggccgtggaagaaaataaaacggaagaaagctctgatccgcaagctcacccaaatgattgtgaggagcaacctggtacggctcatactcacccgcaggaggaacaaaccataaaccaacaggaagagctgaaagatgataatgagcttgctgaaaaatctgacttggaggttttgaaggaaggcaatggagctgctgatgaagtaaatcttgtagtgattgacgatgtcagtcaaataccgtctgaggaaaaactcgaccgtgtagaggatttacaggttgaagaatcccatgaaaaccatgatggagaaggcgggcaggatgtttgtgcggatcctaatgaaaaaagttgcactgacgttattgaaattgctgaaggcgatacagatatcaaccccattttcaatgagatggacttgaaagttgaagatgaacttccacatgaagatgagaaaacggatgcatcagctgaagttagcgagcttgggagagacgatcagactccatgcgataacacagttgggtctactgaaactggatgcctagaagctggtgatttgagtaacatggctttggaaaattgcaatgaacctctggtggaagcgaatagtgatgggttgaatccagagacagagtcttataacaaatacgaaccgcataatgagatgtctaatgaggaggcgtctatgcaaaatgcattagatggagagcatacttctcgtgatggtcttatgggagacaatgatgtaagtttctttgttgcgtcatatccttattcaagtaagacatgtccctgactctcttgttatcttatggtgtaggaaatggataccatggaaaatgcacatgacacaggttctaagccttttcgaatttcaattcttttcttttccaaatggtctgtatcctcttcatttgatcaatgggactgatactctggtcatcatatcctggttcaaaactggactcaacaagcttaaacttggagcataatttggatacgagatgctgctagtgctattcccgatgatttctcaatggttcttcttattaatttcttgcattcgtgtcttcaggatttttgaacgtcgatgatgatgaagtagatgaagatcatgaggaggatgacatacaatatgatgatgaaactcgtcttctagaaaacagtggatggtcttctcgtactaggtctgtacagtttatgacttgctcagattttagcttctatcatgtgagagacgtgatgtgatgggcttgaattatgaaagcttctgattctctttacttttagggctgtggcaaagtatctccagacgttatttgataaagaaaccgagaatgggaagaatgttcttgtggcagacaaacttttagctgggaaaacccgtaaagaagcatcgagaatgtttttcgaaaccctggtatgtccataacacaaccctaaactaaaaaaaaaactctgatcttgaatctgtcttattgttttgccaattttgcaggttcttaaaacaagagattacatccaagtcgaacaagggaagccctatgaaagcatcatcataaaaccgcgaccaaagctcaccaaatccatcttctagatggagaagatcagtcatatagttgcagatagctagtttggtccaatccgagaatatcattcgaaatgattctacttctccaaagttaatacactttccctttttaaggcaatgtagtagtaatagtagtatcaatggtgttgtaggctatccaagtagctggagattggtgtttgtcattatttacctttatatataatgagttgttgttgtatatgtatatattggtgtaaccatgagcaccaagtttaaatttgagagatgctaattttattttctttggataaccaaagttgtcaggtttgtgtgatattgaaacctgagaatactgaggaaacattttattcaataaatagtacttttcatataagataaagtctctacgttcttgtgaagtgaaattgtttcctcaaatggttttctagtaaatgatccttttccccattattatcatcaacgattttagagttaaaactacaagaattcaagaatagaagagtcaaatgtacgttgaaacaaggaaatggcaaatttttagccgtttagtatatatatttttttctttgaagccatttaagatattggattgtacaatgacatttttttgttgttaaacacccgattttgtttaaatttacgagaattagtgaacataatactcacatttaaactttatcaaatgcaagttctgcatttccaatttctcaagttttttttctcttttataaatcagataatctaataaaataaacgaaagaaattaactcagctattaaaatataaagtataaaacttgaaaataggccagaatatctttttattccacaaaagattcaaattttttaagaatgaaaaattaatctttttcggttagaagcatttcttgacaacaacttactacaatcaaaatttgaaacttcagacgtaaagcatacagaaaccatcaaaatgaattcacagaggacaatgactgacacatcataatagaacaattctcatgtttaacaatggagacacacccaaccattagagagaactataaaagctcactcagactgaagaacagtaaggtaataaggataaccttggcatgtccctgatgatgttgcactttcatgctcagatagctcccagttaagttcatatgaagacagatcgtagatacctggagagaaaactgatatctgcagcggtatttcggttgtggataatggctggatttggatctttgtggaacttaaacctgaccatatgaaaggaggtgagctttccatggaagatggcggttttcccagacggcttcccatcacatctgaagttagtttcatttcctctgtgatggttggcacgtagcgccacccggattggtttccagaggaagaagtagttgctgctgcgtctggtagaaaatcattcgtgttgatggtcacagatgatattccatcagatgtgtttctgattaccatctttagttttatttcacacaaggaggtcgaaaagtcgtggtgtatggtttggggaccgtctagtgaccacgagatcgggctcgagcttctgatactgtaattgaacaacaacgggattagaagtggacaataggtttgcaatctgcagaaagatatctttgcgggtactttacctgttatgacatgaatggtgagacaaaatctttggtaaatcgggaactgctgatggactgctgcttttcgccaggcgagagattaggatgaagtcaacagtatttggacttacctgtttcatcaaagaaatttgagttcaccacagttccgatgataagttaccagggaagtgatactgtgtttaagagagtaatacatatttccaaaaaaaatctcacgcacataagacatacataagatttatgaccctgaaagaggatattcgcttacctgaaccgagggtccctgacatgacctttcactttcatggaagcttgctaaaggtgagctaacgatatcgaaaagcttttcatcgtcatcctgagtatacaattttacatcagtttggctgggaggaagggacgtggtttcctcgtcttcagtcccggattttctgcaatcctgaaagtttgagcaaaattctaatttcagacttcaaaaagggaaagaccaaactagctactagaaatgcatttattgaactttctaagttccaacgacctttatcatgaagaaacaagataaagcttgcccagcgagtagaaatttggaaggtaagattgtatcaacaggctgaagcaatgagataccccaccggcacccaactgttgacaactggtgaatttggaaacaatctgacttcgcacggttcacgatatccatacgcacaagaaattcttgcaatcttgatggagatggggtgactttgaacgaggtctgtagagacggtaaaacctagatgaaagagtacgacgtagaaatggttaagacttgttagccaatgcaaatctgcctataccatagtcaaattcttaacaaaaaaaacaaatgcagccaaaaaattcatcacctgcaaattataatgcatccttagggtgcggtatttcatgcttgatacattttccatttcatagtatatcgtaaaatacaaagatattgttcctgggatggcagctcgaagccaaagaggccaccttaatgatctgtctccttgcagtgatacatcctgaaagagatcaccattcaaaaccatgttagaataccctaacatgcacattcgtctttgaggcttgaagaaaacgtttgccacagacctttggaaatgcaaatacactacttgttctattactttcacgctgaacaatattatgttcatcgcccttctttaagcaatctggaaattcggttgtcagctcttcttcatgatttccaggacttacaaatcttggatggctaatcttcattttaagattctacgaggacagacagactttgttagcacaagaataactcggtttatcgcatcacattatcaggtcatcaagcaaaaatcactatgataaaccagaccaaaccaaaccaaactcatagacaagtaacatccacacaatagtagaacagaatgaattaactggcaatacggtagagaacatgaatgataagggttgatcagaaaaagaaaactacctttgttggggattctgacttatttcttaactctaaaacaagataacgtaaatctccagcatacaatttctcaggcagatgatcaattgaaccctcaagcctgggtagactctgcacaatcaaaatttctaaacataagaggtcgcaacaaatcattaaaaaattaaaccatagaggaaagctttgcaccttgatgactaaaaatttcaaggcatcagtgggtgtaagtttgtttttccttcttcctctcgcagtttttgccttgacagacacagattggaagtaatgcacacctacgatggaaccagacaactcccaccttacaccgacaattttgaggataccttcttcactgggggtaacagtgagtctcacctagaagaaaaaaatcaaaacaataagtaagacgtaacaaacaattacaagctacattttttttttgtcgacaattacaagctacacaaaacctcagaacttcacaaaggagatacagggatcaaggaaattcaacagtgtctttaattaaggttagtagcaatgaggatagactacttggcaatcaatacagtacgacttgttcaatagtttcttcgcacaattgaccaaacaatttatttcataattgtcttctgaaatgaaaacacatgcaattcaaaatcctgattaagcagagtaaagaccaacaactacaagtgaaaacctcaagactttaaaaaaacatgtttatctatatacacaagatgaaaaaatttcaggtagacgaagattttaaatattaaaacagataaatcaatctaagtatctaatttagcagacttaccaattttttctcgcctccacctaatgtgaagtccacttcagacaaagtgaaagaagaaaaaccagaggttgtaaccctgtggtattgttgacataaatggcacatcttaatcatttaaatttaggtcaacaaatttgactgaaacctgattgaggagattagctgcttactgattatgttctgtggaaatctcaggactcaagcttgagccacttggctcattatctactttacaaagtccaatgtggagataaaatcagatatacaaactgaagaatgtaaacaaatttataaagtaaacatcaaataacagaaacagcttacctaattttaggtcgtcagaatttgcggtaagttcacagataagagacacacttgttatggaagtagagattagcaatggattcctaaactccagatccaatttcaccgactctgaaaacagtgaagaccaagtaagaatccaaaattacaaacatttccagacatgctacaccagaatatcatgtcctcaacaatatggaaatgtattgccaaaaataatcccttccttggaaaaagcacacgtgataacatttacagatactatgatatcacaaacgaagaaacatgatactccttctctctcactcttccgtatctcctccatgcaaagtatcaaagtaagtagtttctaagatattcattttcaagggtcaaatcaaaatcatatatcaaattgaaatatcctgctgctggcaccataaggcaaaacagattttggacataactgtgcctattttagctggactagattgcattattttaaatttcagacttcaagtataagttatatgaggacaactgtaaataatattgcgtgtgattcaggtaaacagtaaatgcagctaacaacaacctgcatacctccagcgacacaaacatttgattccttgtatttctttggcagaagctttgactgtaattccagccagtttgacttgccagaatttaatgatgggatgatatcatcctccagtgattgccagatgctctcttctacaagagcctgaccatatgaaatatgagtcatagtggtactaagaagatgcaaaagcaccatcaatgaaaaagaaacaattgaatgatgcacaaagattatttatttgcaagtaatccaaatatcttaaccatatatactgatgtcaattatgttgttcacaatggagtatacatcctaggaagattatgatgggtagcaatatgtacatactccaaagaatgaatatgaaacttacagaagcttgagatgcataagtgcgatggtcttcatatataacttgaagagacgacatattaagaattggtagttgaagtcccaccacctcatgcttcattccagttttcttcaaaatgaatatgaaaataaaaacgattttttttatgaacaaagaacaaagaattgagaccagaggtaactattggaagcactatatatttttcttagcagcttcagtggagcgtgtaaaaccgcaagtataggctaggcaccttaacaatgtcgaaaaagtccctgagaaaaatctcttgggttgccttggattggtagccacagtccaatactttgagcatgtttctaactgcaacatcatgcatcccaacaattgcataccacctgaacagataaaattatagcaagttttagaccacaaatttctaaacttcacatcttatgagacttaaagtgaccatatccaaaacttactgtccaatatgaaaatataaatgatctttgatatggctccatgtagttgatttataaacagagattgcacttttgtatgtacgaattgcatggttaacctggaaaaaaggcaaacaatatgtgttctaaagaatgcaacgcatgtacaaagcttgagctcttccagcaaagtgacatgtacctgattacagtttttatagtggtctcctgagagaactagatgaaatccatacttgtgtaacatcgctggcttggttaacatgaaacagtaagaagcttgctccaacatgactgcagcgtgcaagggttcctgcaaatgagtaaaagttagcaactgtataaaatgtgtatggtctgaaggcatataaagaagcacctctccacatatgcggaagtaaaccgaagcagcttctttgtgctgatctctagcctttagcatctctgcccaccaaagcccacatctcgtagcattttggaagccagacttcccaagtttctgcatgagattttgaaagcatggttcaccgcatcacttacttacgttaaacaattagtatttcagtttcatactttgcttattataaacaccaattcaagtaattgatggtcattcactaaaagaactgttatcaattaaagagtgggttataaagatataccatataagtgctgaatgcattttccatgcactcagaatccttttttggctggtctgagatgaaatatgcaagtcccctcatttccttccaaacatgcatgaaaagatgagtagtccgcccaaatcttagcaaaacaaaacaatggcccatcgatgatgaactattgaagcaaccacaggacataaagtgaagaataatgaaaaataaacaccaaaaagcagttttggtaatatggcaagcctatactatacgtaagtttctaaatacaagacgaatatcatattaaatataatgccacaggaacacctcaacattaacataaatacaaagatgtgtatctacctgaacaccagcatagtgtttccaagctttatcgatattatagtctgtatatattaaccgatagcttgacaatgcaagttcataatcatgcaacatgaaggcgtagtcacccaaaattctaatttgagattcggtcgagctatatgtataccttcaaaagtggaagcaaagtcagtagagcttataaatatgtcaaggtaatcataaaaggagcaggagttcaagaaagcatacatagaacctttggtggcatccggattatcgtcttttccttttctccacaaaaagtttttaaattgatttttaagacctttccttgttgcagaaatctagtgacacaacaaaatgcaaactaaacgataagataagagaacaacaaaagcctaagtaaaacacacagatgacttgttagagtatctaaagctaacctgttgattaagttctcgaactttctgctccatgtaaggaattatatgccttgaagcaaactcttgcatcagatctttgatctgctccaaatatgccaggaaacgaaatatgataggttaaaacattcaaaactgttgaaaggtataaatctaatcagtaagagaatgttactccagagctagcagccagaagccttttaaaatacctccacaatatcatcaccagtgagagcacatccaagtttgtcggccgaaacacttgatttcttttaagaaaaattgatgatcaagataatgaacttacaaaattgacatggattgatgtatgagacttgaaattatgttgtataaaagttctgatgagtgacttacaaatgaagcccagggattagcctgatgttccacgttcccctctttagatgaattagtgcaaagtaagttgcattcattatttccaaattgacttctcatctctgacagaactttagacgttctacagaagaaatatcatctagtcaactataacattacatttgacacccataaacttatgacgaaaatcatatcataaacttatgatgaaaatcatatcatataagagggaataaggaacaactacctctctgttgttgcatcttgattgtcatgcaccaacaagtaatgcttcaaaatgtttgggtccattgtaccatcagtaggtaatctattggagttgaaaagatctacaaatttttttataggttcttcatcttttgatgaaacgaccaatagacctgaaagcacatttcgaattatttggaactcaacagaaaactctatgagacatcatagatcagaaaacctagtttaaagacctgaaaacaacgattttctaaaatccatttaatatcttacatgccacaggatgatcgaaagcttcgtggtctgaaaacgacaatgtacgtataagttctttattgtaataccgaaaccatgagggtgcaatttcagactctggatctgcagggagcgaaaatacgacagcattagaaaagcaacaagttagagaattcggcttctcaattatttaaaaattgttagtgcacgatgttaaagagtttaaaaaacttataaaggcattttccgctaatcacagaaacaaatttggagtagtgacttactagagagtatatcagtaatttgaggagggtcagatttcaaatcctgaaaatccttctccccagcttgagtaataacacgttctagccgttgcttagcaacctagccataagtaaatacaatcaaatttgagctcaacaccaaagatgcagaatggaggagcctcaggccgtcctccaccacaacataaacaagtatacccctaaaaccaaatccatcttctttcactttacgttattcgtaaaagcaggtaatgatttcaatatgttcaattaaaggtgattcacactgttgctgggtaataactggttatcaagtaccttaactattcaaacgttaatatattcaaccgaagcaactcttacatacctctacgtttggttgctttatatcggaggcataaaacaatcttaatgtaaacttctttagccgatacagctgatcgctcgatgtccgaacaggcactgcaccgcaaaattcacaattggaatcctcaaattagacgtttcggatagtaaacgcggaacacaatcaacatcaaatcaaggaattcaccatcgatgttactaaagttgcagaatggcttgagcgtttccacaaaggataagccattcctgaggaaagtatcttcaacaagaggcgtacatagaaccatgaccactggactaatttcctccaatagcattttcccaagcgaagagttcaccggctccaccattcttccgttcgcttaactagtctctcaaacctcttcactgtgtatctaatccgatttcaggtcggatagattttggaggcggtgcgattcaataacctagatctccacctttttaagccaatcggagctacgacgccgtcgtcggcagctgccggacttgatgtaggtaggaatgaagatatcggtaaatgatggagtatgtagaatggagaaagcagtcagtacggcgtattaaccggagaatgatcggatgatcgtaatcgggatcgagatcgacgtagagggagagatgtaggcaaagttcgattggagatttggaggagagtcgacgagcaacatgaaaaaaaaaaaaaaaaaaaaaaaaaacaatttccatctatttaagttatgtatttggccctatatttaggtaaaattacaatattttccaaatagtttaaaaatgtgctcaatgagcttcagtgatcgatatggaaacctaaagtcataatcacaccagaaaattcaagacattttggtcataaagggaagcaaggaaggaaaaaacggccatcttccaacgtagtgaggtaaactaaaagcataatagcaagtaatcaaggtaacaccagaaccacatcttgaaacttggagaaacaaatatagttgatggaagaagcaaaggttacattatgcattggcactaatcaaatttgaatagagattaaactcgggaaataacaaacaggatatatatccaatggatttagccgccgagaaagcaacatcatctggtttggtttcggggtcatgtgtaaacagtcttggacatagcacacgatcataaaacaacaacttcttcttcaacttgctagtggcacgacaacgtaccttagggtattaggcatatcaacatttactaccatatatatagaatatattttgtcccatgtctgcctgaattgaacgaccatatcacttgggtgggccacttcatctcggatacgcacaagcggttgtcaagattgcacatgacgatctcctgaggatcggaattgagaaagggagctttagagatgacttgataagcttcggtgtgaagatcaaaagatgtaactttggtttcttggcactcagtgcaccaacgaagcgacccatctacaaagaggggaccaaggaaatcaacaacacgataaggagcagctggagtgacatacctccaagcgttggtgctaaggtcaaaaacttcgcaggtggtagcggtttcttctatgcctatttctgtagagttgtatagccaaacgggcttgtatgttgccgcgaatatgcctttgccaaatccaagcctaaagagtccgagtttaagtatgtacaaaacttctcatatgtcgatcatgatttgttgatattcgcaaagaggaagaggacgataccatctagttgtggggttgaccacaaaacccggttctttgggatggtagagacaaacgagaccgtcacagctattatatgatcaatgtagtagggttccttgtccttctgctcccaaggagtagggatcccacgtgcggggagtcgtcattatatacggtcaccatgagaacaactggatctcctgattgctgacgatgcgtcaagtgttttccttggaagaattgggattcaattgttgatttccattgcttcgatacagccttgaatcgaggcagagaattcaccgcaagtctctccaggattcgctctactacatcatgttgcagcagcgattcaatcctcatgcaacgttattcttgtctagtcgtctcagtacgtacgtatatatagtagcaattgatgaatagataatagagtcttatttataaaaacaagtactcgcagacaaatccggttttgtactcaacccttcctcgaggaaaatctatcttcgtattccctctttctttctccacacgacacacgacaaa

SEQ ID NO: 1439 - DNA, 77976 bp, Arabidopsis thaliana
taaatcaccacaacacaagaataatcataaccatcagctttttagattgcatgagaaagataaacagttatatcatccaaagctccaagaaccaatcaaaatagaaccaacgaagcagtaatgagaacaacaaagatactgtctgttttaggcagtggaatgtgcataagtagggaacaaaagcacagtctactcatcatttcaaaagactagatcaaaacagtcagtaacataaaccaaaaccattgaaaacatgagataatgtctaattcccatttaggtttctaaagagtaaacatcatcattacctgtggagcaaagatataagcaacagcgccaaagacagcacctcctagaagaaaaccagcaatgaaatcaccactgcttccgcttctacttccatctctgaattaagtttcaacaattttaagtcaattcaatagaagagagaacgctatagcgaacgaaatgcatacatacataccgataccctgcagaaacagaaaacttgcgagtccggtttgatttcttgtgaatagtcaaatcagaggttttacaaatagaactgagttttgttgttgtagacaatccattagctttcacataatgagattgagacacgcctgtaaaaccacagattcaagaagcttgctaatatgaatctctcttgaaatttcttacaaatcacaaagtagagctcaatagcagctagagtttgttcagttgcttactctatagctatctataattcttcgcaaataaggaattgattttgatctcaattttattttacctaagctagaaaataagcctaatttatagaggaacgatgcaacgatcaaattaacaagtgtctccatactgattaaaacgctaccgaattgtacaaaatcaaatgaaattcaatcaatctgaaacttcgacgatgaaattctagtaaagacggagcaatttgaaaattcaggaggaaacaaaaaggagcttagtaggtagagaaattaaggatcgaggtgaagctaaaaggaggatcgattaccagatagagaaagaggagcagtagcaatacacgacgccattggaactgaagacgaacaaaagagagatctgagctagaagaagaatatgtagacatgttttttttttttggatatactatgtatatcttcttctccttgcttgggaaaactatatataaatttactattctaccctcgttcttattatttgctcagttaccgaccggacgacagagtacgacacagctccaattgatcttttaccaaatgactacaaatagttgattactacttggatgaacaaatttcttcaaataatatcacatgttaaccagattgtaatcaactatagagaagtggagacagatgaaatcagatcactcttttgttcttctatagatatcatatatcaaaccagttattattttaaaaacattcggtatcctttcttctttttttaatcccatcaccatttttatatacaaaacctgtgattttatctcgttggagtcttcaccaaccataagacaactaaagacactcaaaatatattttaaagaaaaaacttgcgataataacttaactttttatctgggaaggtctctgaacaggaacaacggagtattcacattcttcctctcctcagttcccggaaatgagagtgataacgacagagaagctgccacttcggcgtcatcttcttcttcttcatctgctttctgtttttctttattcatactattattactttgttcaccagagttgctacttctgcttaagaaaggtaatagtcccattgttgcttctgttgtttcctcagctcctaatgccagctccagattcgggactgtaccgcttattaaacgtctattgttgttattctcgtcattgcctagtgggctgagattatccaccatttcactgtcgtcattcaagtccaatgggaacacgacttttggactctttttcattatcccggaatcgtgaccagatgtatcccggcagaggctgctgcttccgttttctgtcttcagcttcttattcggagatccttcgcataaaccgtcattattgagctccactttctggtttatggcagatgaattctcgttagcggggttactcagttcccaaagtggacgcttcctgtgactagcctgactactgttgagatctttctctagaggattatcttgcccatgggactggatccctgagcccatgaccgtcaatggcagatccttcctaccacctaattcttgttcctcgactttctgaaccttcctcactagactatctccagaatttgatccagtaacttgaggggggatgtgattcacacctgcttcttccactttaagagcaatatcctcctgtattaaggaacttaagagtgagacgaaagggactccttatattaagagatgaaaatgtcctacaacaagttcagagacaaaggatttacacagggactacaaaacaaacccacctttttgctcggtgatcgctcaatagaggattccctgttatttggattctcatgactacgtgcatctgtcccattccgtgtttcaattccgttgctggagctctcacgtagagaagaccctttctccaaatgcttggaaggagaactcgtttgacacagctccttggggtctctgtcacgcggcaaaacatttgaagtaggcaaagatgtgttcttttgtgggttagtctcttttcttccttggaagacaccccaaaggaaatataacatgttccagcctgcaagggtaatatatgtaagcagtagatttcatatagactaaactggcattaagttctgagtatacttttgaatcatcggtgctactttctaaagacttatcaaacaggattgtagcatgactgaggagtcagcgacaagataatcatgtgtacaaagtgtaagagttttggcattacgatctagaaaccatcaacaaaatgatcataggcacaggtacgaactacgaagtgtaagagttttgataagcattcttacgctggcaattcgaaggaagctggttggatgcaaaaatcaaaaggtcaacgttatcgagatttcctttcagggctaaatcgttcttgatcatgttatctaccagaggcttataatttctctcataactgtttcacaatatttaagagttaaacattaagaccaccaacatgaagtaaaagcaagtaaataatcatgtaggaaacctacctctcagtgtcctttgcaaagaagaatagagctatatgggcttccttagtacctaatttttcaaattgtgtaggccatgtactcttccgaggtacttcattcaaactgaaagtttctggaaatttattcaccacttcagcaaccctgggtgatgctaaggttgataaatgtgcttgaattccgctatgcatagctgactggtttatgattttccgcacctctaagtcccccctggaaaaatgatacaagaacttcaagtcaaaaatgcattacatggacatatataaaaggtatgcctcgacaaaaaaagtaataaacaccaaaaaaaaagagagcttcttcaccaaaagaaaggaaaacttactgccatataaactcatggtccggaatggctgagcttctcaacataacaggtgagggaactaaaggcaaatctctcatgacaggctttacggcgggaaaactgacttcaggttccaccaatcgtgaaggtatagtatcagcaccagggaatataagctgcttctcatttgttacaattgtctgcttgtacggatcagaagtaggccataaaatcggatgccctccttgcaatccttcgtgtgacacatgattcttatgcatctttgaaggcaattgatttcgtagagtcttttcagaactagaatccacattagctaccaatgacgcatcagattgctccaatactctgttcttgccaaagctgggctttttacgcagagcagcatctactgctgctcgtaacctattacccttatttaaatcctccttaacgtttttcgtggtagagagatcactatcagacacgcctgaggtgtcgctggattctgcagtctgacctcccttttgagatgatggtaagccttttgcaccagccaacaggctagacctttggcgtttactgaaggcttctttgcttttcttccctacctctctaggtaccctggaccgcggcaatccatcctgtaaagctacagtaccgtggtttggcatgccttcacccgtacaagaagtggatggcagttcatccttacagtcagcttgacttgaactttgctcgctggcactgcacttttcatttgtggaaatatctcctcctgctcaaggaacaaagatataacaatggagctcagtcataatatcttaaaaagggagggttcataaattaaaacgatccaaaacatatccaaccaaagtactatcaaagaaagtagcagaagtaccaatttattgacaaaaatgataagtatcatacccgaaacaactgaattttctagacggtttcggcttagattgctgacttgtttcgtcaagttacctcgtttaccatcagactgcaaaccctttaaatcacgattattgtttgcatgtgaaacagacgaattgccgcgtgactttaacttctgatcaatggaggatgctgatgcattagcttctctattacgatctttcacttgctttaagcttttgccttcttgtgaatgataaacttttgatccaagcatttttgcttgtgagtcgcttccaccagaattccctgcatctgtagttctacttggcattgacttgcctacatttctaaaaccccccacttttaaatcaagtgcagtatcttctttgccagtcttctgtcttgggtgaatagcatcatccataagttgcactttcggtttcgagctcgaacaattaaaggaactggatttcaaaaatgcacctaaagaaacaaaaaactagttattctaacctgcaaaatcgccagaaatacaacaacagagataaggtagagttgcgtttaggaagagctatcccatcatgcagcctaccttttggaggttggagctgtgaaccagcagatcgtgcactttctgtgtcatcactgaatgatgtttgatgatttagctttccccttaacctgtctaagcccttgaatgatgtttcccgagataacgcacctactctggggagaatggatttcttgggtgagccagttgaagcctcaaccacctgtcttttagcatctggagcggcctcaattttatctgcgtgccttttgccagagctataagtattgaaggttacctcagtttctctttttctcttagcttctgcatgtttcaacttcaacttcgttagacaaaatggaaacagcaaacgtggatccaaatttatgctaatttattcagctaattcttttttcacatatagcatgtcccgttaaatattcagctttaccttgcttctgcttttcagcttcctcagcacattcttcacatagccaatcaccctcaggaacttcatccagcatttcccgcatgcaatagctaagtaaaagaaatacacaattgtattactatcacagaaaatcaatggataatatctatccaaaataaaatatactcctaatatgcagacaaattccaaatggaaattggccaatagtatgctttctctaccatgaaaataagagcaggcttacgtgtgttctgccccatcactgcatccgctacagatagcgagtaaatcttcacgaccagcatctccacagatatcacaaacctttacctattcagcgaaaaaaacccctttcgcatgagaattatttcagtgaacaaatactgcaacaaaggaagaagtagacgtgttcctaagttcttctaatatgagacaaaacagcattacttacatcatgttcgaccatttcagaatcatcactctcgctctcagacacagctgatgagttggacgaagagctcttacttgacttaccatccttcctgttctctcctgaacgcgtagatccttcaactgaaggttcctgtctctctttgttacccccgggtcttgatttttccttgaaatttcccttctcagaactgactctgtcatcatggttggatgatggattctgcaaagattctaatttcacttcatctttcctagatccacccggaattggatcagaattgagagctgaaccatcagctaaatccttattgccaatctcgttattagaacaacctgacttcaactgtttggctcgatcagcagacaagatcccatcttcctggtcttctatacagttagagctctgatctaacatattagctgatgcagaaactttatgtttcatcctgctcccagaaagagatggcttagaagtcattgcagcagctccggaatcatctgatatcccagaacatcttatagtttccttactctcagcattctcagagagagcatcatgactggaattgacaagattgcttgcttcactagcagtgttatttaaactcttgtgagcattaaccatagaagaaggcaaaagatcatcctcgtttacagaacactggctgcccactactccatgacagttttcatctgatgactcgtccaactttgatcctgtgaaaccaacattacggtgcatgcatgatgaacaaggagcagaacaaacattacaagttccagactccacttttgaaaaacctctctgacccatttggcgcttaccaactcttctatcagcctgcaggtgatataacaaaatagaagctgttaaagagatttagaaaaaggaaacaataatcaaaggagtgaattcgatagttaactggtccatatagtaacaaagtctagttctagcaatagcaatatatcaatcaaaagttcaacgatcaagggttcatgatctagtgacctcatgaaaaagagataatacagcaacaagaaaaagagagatttagctaatctcaccatcttcaattaaattaaatttcctgacttgccaaacagatttctatccagccttgccactgttacaaatggacaaagaacatatcaaaaacgagatcatcaagcagctaaacaacaaatttccaattttaaaccaaacccagaaaagaaatcacgaattaccaatagaaatcatcaatcaatcaccaataaaatctcatagagaatcgtaaccaatttcttaatatgagaacgaacccataaaacacggaatcttaaagataatttttttatcaaaaaaaaaaaatcctaaaattgggagataacattacatgattcaggtctcaaaatcatctcccccttgaattcgcttccctcaccatctccatcaacctattgagaaacacgaaaccctaatttccctctccaactcctacaaaccctaacttatctctatatccagatttgatttgacaaatatctatctttctatctttccttcactggtctaagaaagattcagtgatggctctcaagttttcttctcgatttttggcctttcctcgtgatatacacaaaacaacacgagccagagatgaaaactgtagatatatacctctcaggatctatacgcccgcatatacacatatacatatatatatatatactgagtcagtcgtataaaatttctacaataaattatttgttatgacgaatatttgttggattagtctcacaatgtattaagagcttttaaacatggttacttatttaattactacagtaactaattacctttttatctttgtctctgtgtctgattcctcttaacccttttctaaacgcggagaagaagaatctgactcccttatttatcccttttttctctctttttgaagtgttctttttttgttctgctaatttctcagaaaattctgagatattttgtgtgcatttaatatgtaaaataatcactaatatataaagtattattatgtaaatcttaagaaatttaggaacattattaaattgctatttaatatttatttaggaagactttaagattacatttccattataagctttttctctagttaaaaacatgtgtggtctttatttggtcaaaacttgattttgaatctttttattaaaatggccaactaattacacccctattaaaatgagaacaccaactcacatagaaagaacacctaaattaaaaaagggtatgcatgtttttttttacaaataaaaataagaaaaaaacgaaataaaaatgaaaataagagaagaatatatgtagtattcaatttataaaccgctccaattccggtctagtctggtttagttttgagattccctatctgtgaccgggtcacgaattttcccgccaaaaagagcggcacgagaagcagtcgcgttaaaaccctaagaaacttcgtcgttttcgattgctccaccaaccgataattctcccatggcaccctccggcaccgtcgccgatcctccgcaatgttcaaccaccgattcattcaattccagcgacacagcagagaatgatattcgggtcccttctctctctctctctctctatctccgtcaaattttgtttgattactcttcactgaagcgagaagaaaaatcaaagtttgaatttttcgttctgagctggttatgatatattcctctttttcatggcagccattttttgtacttcacaaggcttcgtctggtaatcacaatgggaaattaactgggattgtgaaaagcaagcggaggatcgaatcaccttcacctaaaattgctaaaagatctgaggtcgaaagcgtggaagaggaagatggccagtttttctcaactcttcgctttaaagttttcgagactgtctggtcgaaaatcgagaaaacaattgaagtcagtctcaatctcctctctctaaatttctctcagtgtgtttgaaatcttcaaagttagtgtttttatacaccatgataaagtagcattgtaacttttctgaattgcaggatgtcctgagaaattcgaactctaaagtatttagtgggattcatgattggatacgggaatcatttgaatcgatcatatcatctggagcacttaagttatcggaagcagttcgatcttatcctgttttaactcaagcttcttctaagcaattgcttactgcaatggttctcaccagtaagtcctttaaagacttagtgtcttgacttatgacttttggatgatgttttgatgggttacgaaactttcatatttacaagcaaccagttgcaattacttggcttcttcttataaggtaattttatattgttgtcagggaatctggaaatggttgatgatttattgacatttgaagaactggagttgcacttgaagtctcaaggatgtcatgtggctaagctttcatctatggacttctcagccaagagtggtgtaggaggttgccttagaggtttgttacgccagtttgtgatgccaaccgtagatgttagtaaatctgcatagccttccatatcctttagttttgtgggctacttgaacaataattgtatccactgagtcattttcttcactatgcgaattttgaacaggtggctgatgtgaccattctcgcatcatggtacagagaaaacaaaaaccatgagaatcccgtggttataattgtggatgatacagagagatgctgtggtcctgtactgtcggatttaattcttatattaaggtattagttcatctttatgcttgctacgtttgcatcatatcatgttgaactttatctacttccacttttgtcattaccatatcagagtgtggtgacctgctctttcattttttcttgtcagcgaatgggcaatcaaagttccaatttttctgataatgggtgtgtccacagcacatgatgcgcctagaaagatattatcagtgaacgcgctgcagagactttgtgctactaggttcactttgagctccccggctgaacggatggatgcagttctcaaggctgttttcttaaagccgtgttctgggttcactgttagccataaggtggcactttttatgagaagttactttttgtgtcaagatggaacactgacatcttttgttagaactctcaaggtttcaagctctattcttaatgctgtattaggttttaaccctgtttcggattgctaactctttgttattcatttggctatacattcttttctcagatagcctgtctacaacatttctcattagagcctttaagcatcatgctcgagcacttttgtcatgatggtgttaatcaggtattcttgatgcacctgtctaaaacttccatattttgttacagaaccttcaactttctcagatatcatatttgactttggttaagttggcactgccatttctatattagcgtagttgataacaaagaactttagttcatgcttcgcatattaagaatctatgtatattactaagagtacatatgtatttatgtcaagaaattatcgaggatctttggtcatctagaacagtagccctttttgtcgtaaattttttataataaagcccgctttgttctaaggaaaattttacctgtaaagctgtcaggtgaaggcactgaactattgacagaagcaacaatgaaacatgcctttgacttgccatctgtgacgaggtacctcagagaatttcactacttttattatgttttatttccactatttgtatggttgaagaactgatgggcatgttagtggctttggacttctatgacaaggtttaatccttgttggaccctgtaattataggaaatcagatacactaatttcggctcataaacgttttactaggaataaaattactcggagtacatttgaaatgctacctcattttttgttggacttgcaaaggatgccaaacccctggagcatagtagttttggtgagttctctctaaaaaaatttaacagttcatcatcgtagaaagagccacttcattgtcttacatgactcagggatgccattgtctgttcaaaataatttctcagtttatcaacaacttggataggaaaacctgttttattgggcagagaaatattttggaactttcactttctgttctccgcttggatgaatattgagttttatagatacactgtttctttttcatctctagattgaaggcagttcttttgttgtatctattgaattagcttttctgtcagtttagttggactcccaagtcatgatgcattcatattatgcttcttctattatacatcactcgaggaaatatgaggcagatcggtttttcatctgattagagtgatttgtgctttctggataaattaacgagcagattctttgtctattgttttgcagtgcttatatgaagctggaaagtttgataaacttcgattgctagacatattctgtgagatacttgacccagaagcacgttacctgaaatacttttcaccttcggaaattgttaactctcagagtcacaattcaggacgtaataatgttatccgacgggttttgcgcaagctcaggtgagttgtgttgcaatgaagaaacgtgaaatttccccctcacacaatagctcaggacggtcttaaatttatggaccgcacataatttgtctgctggatctgttcatgtggcttagtgtacttatgctaaattgcaaattttaaggaacaagattttgaggattaataaattcatctgttcttgagttagtaggcctaaaaatcgtaggtcattgagagcttgtgtaaatatctccgcaaggagcttagctcaaaagttctgaaactcttgcattcaaattttttcagggatctttcaccttcacagctgtctagcatgttgaaaagttgggaaaatctcactgcggagttcactgaggtattaactaactaaaatctatcaagtttttaccctttctcttgacttgcatatttttaagtgatttttaatttcatttgttctgaactttttttcttttgttttccagttgttctttcattttctttggtctagagcatctgaatttttttcttgagttagagatatcacgtatgtgatatatgttagtctatcatcagttctaaatacatggtggttctcgatgagctattaacttgtttgtttgttctctcctgttagatcaatgacaaagttattgaattgcatccgttcatgagagccgtggaagcagctggtcagagacaaggacttcctaacagcccaaagtaaatctctagatattgttgtcttttcaaaccaaacaacatgtcagataatttcttgtttttctttttaatattcggcttacctccagcagatcttcttggcaagatagtctcttgaaatatattttcaattgtccccatcgttcttgtgtatgggaaaagatagatgaggaaacttagtgtcttattcagctgatatataatcattactacatacataagttcatctactcgttagtttctgttgctcatgaagtggtactttgatgtgacagaaagcatgcatctcgaagcaattcaaagcttgaaaaagagcttaaagccatgactgataaggttgccacagtcatagaattcatgctaaggtgaactctattttgtcagtctttttatctccaaggagacaacttgtttttgaacttgacattgcttgtatatggcttttgatttgctgccgtcatttaaaacgttgccatgttagattatgtacacgtcttgagaattaatcacagccttttgtatggaacagggaatatatgaagccagttgagagtgttcctttccacgaaattttgtgtttcaagaatgtcgataaacttcaatctgtaagtcgtcagcatccttcttcctctcggattcacttatatttacattacttggaagatttataatagataattaattgttaattgttgctcccgtggtatcattctcatcaactatcttaaagcaaaccggttacaagatcagttctgagagagtctgagcattttctttttttaactaattcatagaatgattgatgtggtgcttaaaattttacatatggccttctctctcttcctcctcttaatttgatatttatatctgttttaggctttacttggagacccgagaggcaggatccaattagatctactggaatctcacgatatcctccactgtgtgtgctgcagccagagaggcacaactctactgccttccatgcatgatacatcgattttgtgagcattcatttacttttatacacttgcattctcatgttgtctttgttgaaacaattcttccggtattactttttcttgtcgagtatatgatttgagagataatcggcgaggcaaacgatcttcaaacacgcatatacacgatacacatgaacacatactgtcttctttctcctttgtttgtttcaatatgtgttgcactgaaaagctttgtgataattgataatataggtataaactggcgcaagagcacgctgatgtcattaacctccatgactggtatcaatctttcaagacgatacttattccccggagtagcaaggctaaacaaaaatctaagtcatcttcaaaatcaaagaaacggaaggaaatatgcgaagaaccagaagcacccgctgaagctttaattcagtatccttttttggttaagattagtaatcggtgatccaccaatgttcatccttttgtatttgttcattttgcaggacatttacataaatgcagacgaccaaaatttcgtaacttatcatataataattttgattccttaacatttgattccaacagagctcgattttgcagagctgtgatggagcttcagataacaggacttattcgcatgccttcaaaaagacgtccagattttgtgcaaagagtggcttttggttcttaagaatagtttcaatactttattccattgtaagtgtactttaatcaatatgtgttctgtgttcataacctgtttccatgaatctattcagagtcatccgtttatagagaatagaactggcgttaaaaagaaaaaaaaaacactgaattatcttaatataaacagaatcgtaaaactcatctttcatgaatctgctaagacgtagctgagacttgtcaacacacgttagctcttaaccctttctttttccatagttgaagtttcaaaaccatgggaaagtctttctgtgtaaacattttcaagtctcctccctaaagaacctgtgacttgcgaagtctttagaattccccagctttgagttttggctaccctctgcccttattttctattgaactccctaaaatcacaaaaagtcaatagtaatcttggtcacgacttgtctctgataccaatgttatcatccatgtcttaatcagcttaatttttgcacacacttaatacaacgtgtaatttgttttcttgttttatgaaattagtatagaaacagatttttactgttgattacaataatgtaatcgctttatgtaatacattacttttgacatgtttaaaagtatctttgaaaattctcgagaaaatatacacctttgattgataaattataactaactacatttattatccggtcgattactgttttttttcttacagttaattctatttgttttctcttcaattattttattttgttggaaaaaatctttaaccatattgaacacgtattatctgctaaaaaccagaaactaaaccaacttctttgccatataaagtacgaatcaaattcaaatttcaaagtaatcaaaatcaaaaaataagaacacacaataatggcgagatccttctatttttgtttattcttcttattcatttcttcaacatcaaagctaaccacaagctatcctctctccacaaagtcacgatggatcgtggacgagaaaggtcaaagggtgaagctagcatgcgtgaactggccggctcatctccagcccacggtggctgaagggctaagcaaacaaccattagactctatctccaagaagattgtgtcaatgggatttaactgcgttaggcttacttggcctcttgatttggtgactaatgacacattggctcttaaagttaccgttaaacagtctttcgaaagcttgaagttgtttgaagatgttcttgggattcaaactcacaatcccaaattacttcatcttccccttttcaatgcattccaggtaaatttaatgatagagcatcggtttgttcgatctgaattgtgccaaactaaaccgggttatgttcattagatggactaatatctaaacgtgatctaattcgaaacaacaacaaattaaccaaaattgatcgcaaaagaacctagtctagctaagggacaatataaaccaaaatcaaaccaattcccatttgctaaatttaacaaacaaataagtgacatatcatcaattcattgtcaaatggttttgatgtgaaactgatatatggttactgttattatatgttgtcaggaagtggtgtcgaacttaggagaaaacggagtaatggtgatactagataaccacttgacaacgccaggctggtgctgcggcgataatgacctcgatgctttctttggctaccctcactttgatcccctcgtctgggccaagggcttgaggaagatggctactcttttccgcaatttcactcacgttattggcatgagccttaggaacgagccacgtggtgctagagattaccctgacctttggttcaggtacatattgctaattttaaatatataaatattcataaaagctacttttgattctacaccttaaaaccccagactcactcacatacattataaagataatttagtatctatgaatctatccaacaaacatgaatctacgtttaacaaccgacaattctcaaaattctcacacataaaaaaattagtacatgaagtacatgttaattgagttagttttcacttttcaccattcgctattgtttccacacaaaaaatagtattgtttgattgtttatattgttcacgttatcgtggtaattaattgcatgcatgcatgcgttaatggttacgtgaaggcatatgccgcaaggagcagaggcggtgcacgccgcaaaccctaaattactagtcatcctctcaggcattgacttcgatacaaacctctctttcctccgtgaccgttccgtgaacgtcagcttcacggacaaacttgtcttcgagctccattggtacagtttctccgacggccgagattcgtggagaaaacacaactctaatgatttctgcgtcaaaattatcgaaaaggttacacacaacggaggattcttgcttggaagaggctttcctttgatcttgagtgagtttgggacggaccagagaggcggtgacatgagcggaaaccggtatatgaattgtttggtggcttgggcggccgagaatgatttggattgggcggtttgggccttaaccggagattattatttgagaaccggtaaaacggatttagatgagtcttatggccttttgcaagccaattggaagacatcagaaactctacttacttgcaaaaactctccggaatccaacatgcctttaaaggtcagatcagttttttttcttcttaatcacttaaaagaaaaaaaaactcaaactttaagactcgtaattgattatatatccaggacctggattgcgacccaacaagaaccttctcttccatccatcaacaggactctgcgtcactaataatccatcagacaatataccaacacttcgattaggaccatgccctaaatccgacccatggacctttaatcccagtgaaggcattctttggatcaacaaaatgtgcgtcgaagctccaaatgttgttggacaaaaggtgaagctcggagttggtaccaagtgttctaagttgggacaaatctcagctacaaagatgcatttgtcgttcaagacaagtaatggtttgttgctatgtcttgacgtagacgaacgtgacaacagcgtcgtagctaaccgttgcaagtttttgaccatggatgcttcttgtgatccagcgagccaatggttcaaagttctttgaattctatgtctttattatggagaacatgtatttgacatttgtaatcaagactaccactgagcatattcaagaaatcattttttttaaaaggctaaaagactttaacagtaatgggctgagaatataaagagattgaggcccatgttggtcttcacttgattatcttatatttcgccacgtgtcagtcaacttagccactgagaatttgctgattatctgagtcatgagccagttgactagttggaaattaaaccactgcgaaaaatatgataagccttaggtttcaaccaagcaccaccgccggtgttttatcggcgtcagtgagccgcgccggttttatcaagcggtgcggttcgactaaaccgggaagggttggccggtttgttacaatggcgacggcggcgagtcctcttgaaatctgcgttaaagcttctatcaccactcccaacaagctcggagactgttagttttctctccgtaaactttgaaatgttgatgattagctgcaatttgatccctctttcactcaatttcgaattggagatagataatttgtgttagctccattggtgcagatagatacttagacttaagaatttgaggatttcgtgtcaaacttaattggtgtttagattgtttcttaatttcgaaaactgaaactattcaaaacatacttttaaggtttaataagctaacacgattgcttctatgtttgtggcgagtactggttttgaagtatattttttctcagtgagttgattatatgcataattttgttgataggccctttttgccaaaaggtgttactgacaatggaggagaagaatgttccttatgacatgaaaatggtggatttgagtaacaaaccagaatggtgaattcttggattctttccataacgtgcctgaagtagacatgattcttgattaatggcagtgatttccttagttttttcaatgggttgtgttcttgtttattgtttattaggttcttgaagattagtccagaaggtaaagtcccagttgtgaagtttgatgagaaatgggttccggattcagatgttataacacaggctttagaagagaagtatcctgagcctcctcttgctaccccacctgaaaaggcttcagtgtaagcattccttcttctttttttcggtcttatgatgcacttgtttttgtgcaattgaccttctagtgttctttgttgaaaaagggttcatttgacaacttgcatacttccagctaagaatttgcgtgtggacgtttaattctttaatttatgtctgtttctgcagtggatcgaagatcttttccacatttgtcggttttctgaagagcaaagattcaggagatggaactgagcaagttttgttggatgagcttactacattcaacgattatatcaaggacaatgtaagctcttttggttttgatctcttgtatatccttaagtaatagttgtgatgatcttagagtagattattctggctgttgattgaaacatatatttacttctctatcttccataatgtgaagggccctttcataaatggagagaagatctcggcagcagatttgtccttggcaccaaagttataccacatgaagattgcattgggacattacaagaactggtctgttccagattcacttcctttcgtcaaatcctacatggaggtaaataaatgtcagaaaaaccgagctagtcctttcgatgttattctgaacaaccacattcttttttggatttattttcattcggttaaaccaactgcaccataatgatttacagaatgttttctcgagggaatcattcacgaacacacgggcggaaacagaggatgtaattgctggttggagaccaaaggttatgggttaagagattttgatgttgacctcaagcttccttgtcttctactaaatgtaaaaaacataataatcaaatcttcttcaactgttaccaatgatatataccttgaatccttgattgcttatatgatgaaaactatattgtgtcatagtggggaagcttgcatataagttttaatgtaccgaccaatcactactaaaattttgaaccatctgcaaattatttaccgtaagctacagagcaattagacgaccattgaaagaacaataattacggaatacccttcccgtcatccattccttccctcctccgccttaaacccctaccattttgtgtcactagcagcttatctttattttcctgggaatttcaaattcttttctcgccccagattttctcgggaatctctgtcgggcgttttcttcagaatctgccatgattctcaaaacggctttttctctacccacacctactactactctattatctcccagctctcctcaccagctcaacactctgttcttcactcgccgacgccgtcgattaatttccccatcccgcttgaactcaattttctcgcaacgtagattctctttctctggtacgttcctcgctatttcttttctccagtgtcgaattctgtttccaatcgattttgttggaacttctcttctgttacagtaaaaatttattcgaattcctcttttgtattcagctgctgcgtcaggaaataatgtatttacttctcccgagacatccaagacctttgatttttcttcggaggagaagatatacaaatggtaaatattctactcgtgagttaatggaattattatgagttaagatatatcacaatgcaaataaaaagtgtctcattcttcccaatgtaacctatgggaacatggatttcttgtgataatgctgatgatcatttggatttgggcatttttaggtgggagtcgcaaggctacttcaaaccaaattttgaccaaggaggcagtccttttgtgataccgatgccacctcctaatgttactggttctctgcacatgggccatgcaatgtttgtcactcttgaggttgtggaatccatattgagaataattcacagtcatttgggtattctaatttatgttcctattttcgtttaacctttttagtttgttcgtctagctttagctcgtatatactaggcgctttccacacttcttaagttggcttgaaatattgtttagtaattccatgttttctttgtgctgtaactgtgttatactatagttctgctattctcatcgcttttttgttttttacaggatattatggttcgatacaataggatgaatgggagaccaacactttggcttcccgggactgatcatgctggtattgccactcaggttcatttcctcgttcaaatttcaagcttttttgcatggtatttctactagtgtttgcgtgtttgttttgtgctcactatgattcttacatcttcttcttcacaatccattgctcttgttcctataccaatctaccacatttactttgtcaaaaagttcttttcttgtagagtataatttgtatagataatatttgcattgtttggtgaatgtttctgaaatattctactgaagctgcaatatttctttcagttggtcgtggaaaagatgctagcgtcagaaggcattaagagagtggacttaggtagagatgagtttaccaaaagagtctgggaatggaaggaaaagtatgctgtctaatcactgcaatgaataaattcaaaatatctatttcaaaagtatctgtatgatactctggcggtgtttccattcttcgaacgagtcataagttattgatcttctggaaaactatgaagtattttaagcaggagatgattcctgtacatttcttataattgagtaatctgatgttcctgaaccattccaaaggccaatgctttcattaaaagataaaatccactgtacttgtatctgatgtgttaagggtaaggctggaattatagtttgtgtggtttttctcaggtatggcggaaccatcacaaatcagattaaaagactgggtgcttcttgtgattggagtagagagcgctttactcttgacgagcaattgagtcgtaaggcatctttcatagtttccatatcttctagatggtgattcttaaagcagaccataggtggtgctcaaagttgactttatatgattttgagtggtattttggaattcaaaaacttcggcaagtaaaatattattcagttgttaggtggttcaaaaagtttctcgttgctcttaatttcaaattgtatgtactttcaccttgaatttattccttgattctcttttaccttgaatttgtaggagctgtggtcgaagcttttgtgaagcttcatgacaaggggttgatatatcaaggtaagctattatgaatttatgtattttggtttctgttgtcgtagctgtaagtagagctgtgctgtactcatacgactattggtgattttggcataatgtttttccaggatcttacatggtcaactggtccccaaatttacagactgctgtttcagacttggtgtgtgatgtatttttatctaacactctgttgtttgattactttttttttctttctaaaagtgactgccttgttcttaccaggaagtagaatattcggaggaacctgggtttctataccatattaaataccgtgtagctggaaggtactgtccaactaccagtactaccttcgcctttccttatactttgtattttatggacccttatatgtagcaaaattatgtgaaaagataattttttctcacatcaatttgattatgctctgctattagagagttcaaagaagcattatagtgtttgaaaaacgtatcttatggaggctttagattatgtcgtatgatcattaaaacttgtgaaacacagcgttgggtctgtaagagttgcttcggcagtagttaaccttaaattttgctagcaaattattcttggaagatcagtgactacttttgttctgtttatggaaatggctaatctgatctttcctcgtacagtcctgattttcttactatagcaacgactcgtccagagacattgtttggtgacgtggcccttgccgtgcatcctgaggtaggtggtgatatttttttggtttcgttgataataggacatcgggaatgacagatggcattatcaaagtctgtttgacgtgtttataatttttgaatacacacagagctcagttaacaaacttagaagcaagtttttttttttgataaaaacttagaagcaaatttaatattagggaggaaaagtatataatgtgtaacacattttattttcttcttccttttgtggttttcatttatatttctattatgtaaaatttaaatgaaattgaaaatgtagtccaggtagtttgtcaggttgctggtccaatttaatgtaagcagatgtaatctacaaagtagatgctgatttttttggatctcatgtgaatgtagatcgtcttctagtcgtttcctggaataggtgctcttttttgggtatcgtttgaggattaatgttgtgaaatgtatttggcatctggcaggatgatcgttactcaaaatatgttggtcagacagcaattgtacctatgacatatggtcgtcatgtcccaattattgctgataaggtgaactccgatctactgcctatgcactctttatgatgtcttttaggatcaaatatctttttcaagtccaacaaggaaaacgctgcagttgtttttctttgccatttttcgtgctttaagtatcagtattttgctgggaaacttctaagttctagttactcagaaccaagaaactgagtacctcatagtatttcctctgctgctcttcaggcatttctcatcagtttttttgtgtaccatggcagtatgttgataaggattttgggactggtgttctgaagataagtcctgggcatgatcacaacgattaccttcttgcaagaaagctaggtctccccattctgaatgtgatgaacaaggatgcaacacttaatgacgtcgctggcttgttttggtaacattttgtttaaaacttatattttagctgaatggaataccctttggttacatcttaacgtccatggcgccttaacatacatcgtattttcagtggccttgacaggtttgaggtgagggagaaactatgggcagatcttgaggagataggtttagctgttaagaaggagcctcacactttacgagttccaagatctcagcgtggtggagaagtatctttctactgacccagcattaatttttcagttcgtttgaagttcataattttctcatgcatggtttaactggtgttaggttattgagccacttgtaagcaaacaatggtttgtccacatggatcctttagctgagaaggctcttcttgctgttgaaaacaaagaacttactatcatacctgagagatttgagaaggtatgcaagcgactggttggtgttattagttactgagctggtatctgtctttttctcctcagtttggcaaattctctgaaaggttttgatttttgattgtttacactgcatacttctgcttttgcttttatttcctgtcaccacttgcagatatacaatcactggctgacaaatattaaggattggtgcataagccggcagctgtggtggggacatcgcataccagtttggtatgtggttggaaaggattgcgaggaggactacatagttgctaaaagtgctgaagaagcccttgagaaagcccttgagaagtatggaaaagatgttgaaatatatcaggatccagatgttcttgacacctggttttccaggttagtttttcatttatttggagattacttttcttctgtgtgtctttgttttagaaatagtcactagtttaatcatgtgaaagtatcagtttcctcggaatagtcaccatgaattagtgcgtttcctcatatatgacgctgaacatagttttcctcattttgcattaacttcctatattatttatttagatgttttttttctgcagctcgttgtggccattcagcactcttggctggcctgatgtagcagcgaaggatttcaataacttctacccaacaaatatgttagaaacagggtacattcctttctttttgtcgatcaggaaaacaatggctgctactatcagggctattgttgtaaacccttcactaggaagaaaaaaatttaggaccaacaacaatttttctgttgccaagaaggcaagaactaatgtctaaattaagtaaaatctgaaaagaaaatgcgctttagttgcagcttgcggttttgaaattctcatcacttcctttaaataacctttctcatttatttggacaggcatgacatactatttttttgggtagcaagaatggttatgatgggaatagaatttacagggaccgttccattttctcatgtctaccttcatggacttataagagactcacaagtaagtgttaggctttttgcttgttctagtaaatgtttttttttcttttcttttcaagacgaggtagccactcaaaccttgatcattgaggcttttcatatcattatttctcacttttcccgatatgctattaaacgttaggtaacttctaggatttctatttaaggattctcgttctgtatatctccaagtagttaatcagattatttggaattatcaggggagaaaaatgtcaaaatctcttgggaatgtgattgatccgcttgacacaattaaagattttggcactgatgctctgagatttacgattgcactaggaactgctggtcaggtttgatctctactgtgttgaggcagctgaaccatgcttttttgggtaggtttatattaaaatgtcatatttatgtctatattccttgttttccccattacctttttgttaggatctgaacttatctactgagaggttaactgcaaataaagcattcaccaacaaactctggaatgctggaaagtttgtgcttcatagtctgcctagtctaagtgatacatctgcttgggagaatttgctggacctcaaggtttgcttgtttttccatctccactagaaagtattagggaattgtggtatatttgtcctttcagtgacagactaagtatggtataaagtcgaaagtcattgataatatgtttagactatctttgtgtttgggatcatgaaccataaaagtctcacaaaaaaacgaggtagctttaaatataggagattggtcagacctctttccaggagtatctccacctgcataccttttgccattacttaaaacagctgcagagtcgcatcacaagtgataagctaccttaggctgctctcttactatcgatttgttgtgacactttacaataaggattttttctaacattttgcttccttttttttttgacagttggacaaagaggaaaccctgcttagtttacccttgcctgagtgttgggcggtataatatttttaccctgaagttatccaacagttcaatctgcctaccaccttatattccttttgtattatttcaggtgtcaaaactccatattctcattgattctgtcacagcaagctatgagaagttgttctttggggatgtaggaagagaaacatatgatttcttttggagtgactttgctgattggtatcaccacgtcaactcttaataaccaatacacatgtttcttggacttaattgactgactagtatactctaaaggtatattgaagccagcaaatctcgactgtatggatctggaggcaattcagtttctctagcttctcaggcggttttgttatatgtctttgagaatatacttaagctgttgcatccgtttatgccgtttgtaaccgaggatctatggcaggtaacatgctctcagttttgctatctgtgtatttcatttttacttaaattggcccttaaccatttacttaggccaactgcactgggcatgattttccttataccttagagtttttgtagtggccgtttttttaccaaagcatgcttaagctgttatctttgagtttttttttggtagtttagcctcttttgaggatgaaataaaaggaccgaaaacttagttatatatggttgatactttggtactgctaccaaaaaatgatttcagcttcataaaactgtaattatgaatgcatttataattgcaggcacttccctacaggaaagaagcgctcattgtgtctccatggccacaaaattcacttccaaggaatgttgaatcaataaaaagatttgagaatttacaagctctggtcagtatgaatttttaccttaatatattctgtaaacctcaaacagaaccatacttaaaggaattaatatttatactattaaaagttcagagcatgttgacaccttgcctgttaaatcacagactagagcaattcgaaatgcacgagcagagtattcagtggaaccagtaaagcgtatatctgcctcagttgttggaagtgcagaggtcattgaatatatttcggtcagtaacttgtggcttcctaacagttaaattatcttacgaataaggttcatcagtttgccttgtgtttccttattaaaaactgtgttcttgtggcggtgcagaaagagaaggaggtattagctcttctatccaggcttgacttaaacaacgtccatttttccaatgcccctcctggtataattatctttaatcctttttttctcttttcttttcattgtttgcatcttatctcaatatttacattttcgatgattcccttgaatcatcatggtcacaacaaaacttcacatggttggtccttcaggtgatgcaaatctatcagtccaccttgtagccagtgaaggactcgaggcatatctacctcttgcagccatggttgatatatcatctgaagtccaacgcatttctaaacgtctctccaagatgcaaactgaatatgacgccctcataactcgtctcagttcaccaaaggtataccataaccatcaaaagagtctcttaaacccttgctagaaattgttttcgataagcttattaaacatggtgcattagttttagactctgcttgttttacaacatttttaacgctgaaatatgtagtttgtggagaaagctccagaagaagtggtgagaggtgtaaaggagcaagtagaagaattagaagagaagataaagttgaccaaagctaggcttgattttctcaagtctactacttctttagtgtctcagtaaattcaggtagttcttattctctcaagttcggacccgaccaatagcggcccatggaccatttaattgtgatcatttgagtcgatgagactacctactattaatatttctgttttttgaggacccaattagtttgaaaatgcccccaaaaatgatcaattgtcaactattttaccagtcctattgtcggggcccataatgccttttaagcagaaagtggattttatttttattttattttgacagcagaaagtggatatattattaatttattatatttgctggttatgttacaattgtatttactattatttaatagcctcaccaactaggtaaattttgtaccaataatcagtaatcagaacaacatagctcttttcacaaaagtttgtttttgttccaaaattgaaaaatccataaccattttattaggtaaatttattaggtggttgggcgtatggtttcgatacaacttgtggtttagtgagatgcagtttcgtttggcgaatattagagaaagctaatgacaggaaaaaaaaaaaaaatagtagtaaacccatacctaaaagcaaaagaagcaataagaagtactgtacctcgctttaacctcccttttccttttttatgtttcttttgacaaccaaatcttcatcatcacgctctctctttttgcctttagccaatttctctctccaatttcctatttttttttttaatcacatgaaaaatgataacaaaccgtgaaccaagtcactaaacataaatggttaaatggagttttttttattatacaaaacacaacattgctgtttagaaaaaaattactctactttctcattaacattgaattctcaaaggttacgtactactattatttaagctaaccaaaaaatcgaggttaaggttggaaaacttattccggtttagtttatagttccggttcagatctaaaccaacttgaaactagacaaagacagcgtcgttagcgcatgtaacccgacaacatcattctcactctctcctcttctctctctctctctctctctctcttctctcagtcggaagcagaggagccaaaatcaatggcggccaacaattttgcgacgaagctaagcagaaacaccaatagaattaccgtaatcttggtctacgcattccttgaatggcttctcatgttctttatcttcctcaattcctttttcacttactttatcgtcaaattcgcctctttcttcggtcttaagcaagtatgtcttctctgtccgaagctagatcgaatcttcgagcgaaagccagaaaacagattcacttacaaagagcttttatgtcaaaatcacatcgccgagctcgctagtctgagtttttgcagaactcacgggaaattatccgaatcggcgaacttatgctcagattgctctaatcgcgaagaagaacagagcaacattggtttaggtttttgcacatgttgtcagaagagcttagcggataaaccataccctaattacttgcttctcaagtcatcaatttgggggaaaactttgggtgacagagaagatggaggattgatcttagagatgatcgatgatgataaatttggagatgggtttgagatagatagagaatcttatcccttagggttcttcagagataaagcagaagaaggaaagaagcaagaccagcagcaaaatggtgaagtgatttcagatgttgagagttatggattaagcttgagagaagtgtctgaagaggatgggttaagatctatcatcagcaataattctcctgggaacgaagctaaatcaagagtttcagaggatgaacaaaggaatgatgacacaagcaatgttgccacatatggggaagatcaaatttcaggtagagtaagaacataaatccaaagtctgaaactttatatgtgttagttttctgggttttatagattcctcattgtgatcaaacaacagggcgtgtagaagaaaaagaagaagaaacaggagtagcagatttgttgtatgaccagtttgagagcaagaatttcactggtaagcaaaaagaatgactcttttgttatcgaaaatctcttcaagcaggccttgtgcacatatgcatacatctttggtttggtttatctaactttgtgaagcactttaagtctgaatatagttgttttctttcataggtagccaaatcgaagaagaagaagaagatagagaagaaacgactaaggagcttgatccggaaactccaacttcagtcagtactttgtttaacaagaaacttcattttcttgctagaaatgagtatgcagctgctgaagatgcaggagatgggaatgtattagtgagtgagatggacggtggcgatcctttaaggactattgaaaggttgagagagacagtgagagcagaacaagaagcactgagagatttatatgcagagctggaagaagaaagaagcgcgtctgcaatatcggctaaccagacaatggcaatgatcacgaggctacaagaagagaaagcgaaagttcagatggaagcgttgcagtatcagagaatgatggaggaacaagccgagtatgatcaagaagccttgcagctattgaatcatttgatggtgaaacgagagaaagagaaggaacaactccagagagaacttgaggtttatcgggcaaaggttttggagtatgaatcgaaagctaagaacaagatcatcgttgtggaaaacgattgtgaggctgatgatgatgataaagaggaggagaatagagaagaggataattcttctgagatggatgtggatttggagaagataacattagattgcgtacaacatatgagcatgcttggtgaatctttatcagagtttgaggaagagaggttagtgattttggatcagcttaaggtgttagaggataggctagtaacaatgcaggacaaggaatctgctgaggatccgggagaattcagcaatagttatgaagaagcgagtaatggacatggaggactaacaatggcatcaatggcaaagagtctgctacctcttctagacgcagcagagaacgaatcagaagacgggtctcaaggactaccagaatcagatgaaaagaactttggttcggacagtgagaaactggagataatcaaacaagttgatagtgtctatgagaggttacaggagctggaaacagatggagagtttctgaaaaactgtatgagttcagcgaagaaaggtgacaaaggaacagatattcttaaagatatattgcaacatctccgcgatctcagaaccattgaactcactaacacaattgaaaaccagacgacacaggaagagtgatgtttattcacaagaattatatatgaactctctctcacaccattgttcagacagatttcaagccggaatcaatgtctttgcactgctcaatggaggatctgagaattacagaaattcttagatgtctcttgtttgtgttttctttttttgtttggtgtaacaaaaggtttcacacacactagtcattgaatttgtatctgtcaatgtaaattctgtgtttcttgtagtttatgagagttttcagttggaaaataattggcacataaaactggttcgttctgcaactttagctggcccattccttaccaagaaaataaattctggcccatttagcccaaacattgaaggcccattggaaagtcagaacacgagtttcttcgtttggtctaagtttaatatcttctcaagaggatcgatcttcttcgtttccttgatttccaagctttagatattctcgaaccaccgtataaacaaacaccaaattgctttaatttgcataaacaaacgtcatgattatactttgggcagataaaggaatcattagtctcatctcatgtgttctttaccaattgtcacatgcccattttacttttgcattcctaataaataagatgtaaataaataaataaaacctagtatatatcatgacaataatagtttctttgcgataatgattgatggtaatgaattgtatagttttattttgaagtatataatgaagaatgtatagttttaccaaacaaaatcattgaatcataccaaatatttttgccaaaatgatttatatattttatttcttatgaacgcatttatataccaaccgtataataataaataggaaacacggaaacgttgacaaaaaagaaaatgacgaacaataagaaccgttgatcttgttagaagccgcaatgatatgaacaagaagaagagagtgacggtagtttcgctgtcagtttgattggacaaaagaagagtgtgggtcattatcgtcattttaccaaccttcacgttctcttaatttctattttaccattatttaatgaagctagattattagtggtttctttgtttttatacatcggatcggtagcagaataaataagcttctttttaacgagttagtgaggccactctggagacaaccacacctgccattatctatatcattctccgttacttcgatcccaccgattcgaatcattctctctctctttcttgatctgaaaattgagtcccaattccagcaaaattatcaatcgaatttctgatcaactgagcgcgacggtggtggcgacggtggtggcgacggtgacagcgatcgacggttatggcttcgaagactaagtaagactctttactcagtttcactctgttttagttttatcctattttctctgggaaattttttagtagatcgtagtagatctgatccaagttactattttgagaaattgtcaatgatcgagttttggatctactaaattcatttctacatttgttttgtcctaattttttgcggcaatttatttctttgttctgagatcgactgttgttattgtcttttgttggaaacagaactagtttgtccgaaacaacaactactactactcctaccgggaaatcatctccagcaactccaagaatagcaaaaagaacagttaataaatccgaaactagtaataataattctccatctactactactccacattcacgtctttctcttgatcgttcttctccaaattccaaatcttctgttgagagacgatcaccaaagcttccaactcctcctgaggtagttaaaagttttgccatttgtgtttatcttggagttgcttcgactgaaaatgtttctttaatatcaattttgtttgctgatgatttgcagaaatctcaagcgcgagtagcagcggtgaaaggaacagaatcaccgcagacgaccacacggttgagtcagatcaaggaagatttgaagaaagctaatgagcggatatcttcattggagaaggataaagctaaagcacttgatgaactcaaacaagctaaaaaagaagctgaacaagtgactctgaagcttgatgatgctttaaaagctcagaagcatgtggaggagaattctgagattgaaaaatttcaggctgttgaggcagggatcgaggcagttcagaacaatgaagaagaattgaagaaagaacttgagactgttaagaaccaacatgcttcggattctgctgctcttgttgcggttagacaggagcttgagaaaatcaatgaagaattggctgcggcttttgatgctaagagtaaggccttgagccaagcggaggatgctagtaagacggctgagattcatgcagagaaagttgacatcttgtcttcggagttaacgaggttgaaagctttgcttgattcaacccgagagaagactgccatatcggataacgagatggttgccaagctagaagacgagattgtggttttgaaaagagatcttgagtcagcgagaggttttgaggcagaggttaaagaaaaagagatgatcgtcgagaagcttaatgttgaccttgaagctgcgaagatggctgagtctaatgcacacagcttgtctaacgagtggcagagcaaagccaaagaactggaggaacagctagaagaagctaacaagttggagaggtctgcttctgtatctttggaatctgtgatgaaacagcttgaaggaagcaatgataaattgcatgacacggaaactgaaatcactgatcttaaggagagaattgtgacattggagacgacagttgctaaacaaaaggaggatcttgaggtatcagagcaacggttgggcagtgtagaagaagaagtatctaagaatgaaaaagaagtagagaagttgaagagtgagcttgagactgtgaaggaggagaagaatcgtgctttgaagaaggagcaagatgctacttcaagggttcaaaggctctcagaagagaaaagcaagctcttatcagatttagagagctcaaaagaggaagaggagaagagtaagaaagcaatggagagtttggcttcagctttgcacgaagtgtcgagtgaaggaagggagttgaaagagaagttgttgagtcaaggcgatcacgagtatgaaacacaaatagatgacttgaagttggtgattaaagccacaaacgagaagtacgagaatatgcttgacgaggcgagacatgagatcgatgttcttgttagcgcggttgaacaaaccaagaaacatttcgagagctcaaagaaggattgggagatgaaagaagccaatttggtgaattatgtgaagaaaatggaagaagatgttgcttcgatggggaaagaaatgaataggctggataatctgctgaagagaaccgaggaagaagccgatgcagcttggaagaaagaagcacagacgaaagacagtttaaaagaagtggaagaagagattgtttatcttcaggaaactctcggggaagcaaaagctgaaagcatgaagctaaaggagaatctgttggataaagaaactgagtttcagaacgtcattcacgaaaacgaggatctgaaggcgaaggaggatgtttctctgaagaagatcgaggagttatcgaagttactcgaggaagcaatattggccaagaagcaaccggaagaagagaatggcgagctcagtgagagcgagaaagactatgatttgctaccaaaagtggttgagttttcttctgagaacggtcatagaagtgtagaagagaaatctgctaaagtcgaaacccttgatcacgaacctccacaagagcagatcagcaatggaaacagcaatggcaacggtatggaggagaaagaagtgaatggaaaacccgaggtggaaaccgaaaagaaggagaagaaagatgagtcccaagatgatgacaaagatgattcggttgaagttatattcaaaatgtgggaaagttgccaaatcgagaagaaagaagcttttccggacaagaaatcagaactagagtcacaagaagaagaagaggattcaagcaaaatcgatgaaagcgacaaaacctcaacagagaacatcgatgaaaccggaaacgctttaaccgcagaagatcagcttacgatggagaagaagatcaagaagaagaagactttacttggtaaagttgggaatcttctcaagaagaaagcacctgtaaaccagaaataacaaactcttcgaggtaaggcgaaaaaaaaagtaaatcttatcatgtaaaacgtatatctgtataccccttttgatttcatcagtgttctttaatctttatatatatatatttgttggttcttgattcttttcttcttttcgattttaacaacaatgtcttccgatcttttgtttataaaggtttgcgtttttcttttattccgctttatataacaaaccgcagttttatataattaactgcaacaacaaaccgcgattttaaaaccactcaacctccatgaacgcgaacgagttctttgacaagcaactttgatgattcaaaagatcccaaaactccaagaacacacccgagaacaacgaaaccaagattggcggctcgtgtgaacttcgtcatcccgtcccagcaaatcttcaagtagaaagcagacggtaatgtcacagcgattgtgacgctaaccaaagagcccgtgaggctcaagacataaccgaagtaagggacggttaaagccaatgcgagaatgaccagcaacagagctgatcccataagaccgcgagccacaagcttggtgcgatcagtcatggtcgaaggaaggctacgttccagctggatggccaaaggagcgaactctaaggcgtatttggtcattggggttagtacagtggcccaaagagcgatcttggtaactactaaatgtttcggaagactgagggtaatttgggaatttacacttggtccgaacatcttcgctcctgtgatggctagtgctccgtataacgccgttaccgtagcaaaacttactattgatacctacgtattcaaaatttgacatgcaatgcataatgttttattatatacaaggcaacgcatgaaatttatatgataataaaaaaaaattatatgtataaataaaattttatattaacactcgcaataataatttaaaaaaggatatttcatatttgtaacgtacctttgtgaatttggagggatctttcatggaagtatagagattaggaaatacgatgtgtccaccgaagctaaagagatagattcccgaaaccgtcggaatattctctaaccggagcaccggaatctttccatcatcaataacgcctccaaagatggccgtgtaaaccactgacccaaatattatagccgacataagaataccaccggaagaaagaaacgagatcgaagacaaatctcttatccacaaactcggcaaggcgatagccaccgccacagccgtcagcttggccgcgggaaaatggccgtggttagaaaaagtggcgggaaaagcagcggagatgttgtcgtggagggagatggtgtaagacactaaggccatgaagatttcgaggtagatgaagaggcagacgatgaggcggccgtggcggccgaaggcagagtagccgatatcggagtaggattttgatttggggttgcggcggatacattttccgaggatgtgggaagtgtaggtagtgaggattccgaatgatatgaggaggaagattgacatccaaccgccgctttcaacggcgtatggcatagatagttggccaagtcctgtgttacgggacaaacatgacgtcagagtttgcttattgattggttataaaatcagagaagtttatgttttaagttaatcatgtatagcttaagcttataaatcattacgacgtatgaaaaatgattatcttgaaaatataagtaaatgaaattattgttaggattagcacatatatagtatagaaatatttccaaaaatgcatatttacaagaaaacaaaaaaaaaaacttggtataacacactcttgctcatgtgcaacactctagttatgtttattcataccaagggatgttttcacagcaaaatagctccacaaatgtataaattgacttggtgcatcataattcataatattaggtacgtaccaatgagcataccaaccatgttgataacagagtgaagaaatgaactattttcagacgccgcctccaacaccaactctctaaccggtttttcatgctcacattcacaccctttattttcctcaacacatgcaacacaaaccatcgttcccgacatgattctacaacgaactgatcactagataaccatataagctaattgaggtatgtatttgtgatgtgtaagagaaggagggagagtgttgttatttgtagaagaggagatacactgcacaatgaagaatttttaaataagattatcaaaaagaaattatgacttcatacattgttttgtatattcgttagccttccaatagaattggaaagtgggttctgttggttatttaattctcgtagcatattagttaggaggaatcatattacacattcgacgggaatgttcatacaccatatatatacgtcatacattcttaagtgaatcatgacatatatagaagaagaagaaaaaagactcttatagtatataaaatagtatacaactttgttagttttttttctttcttctagagttttgaattaaactaggttgataagacaattccaaattaaccagtgccagagtttagaatattgatagagaacatgtttttgttagtatttctatttatgggaatactaattatattaagtatatgaacataagttagaatgatagaagggctatgaatgaatatttctgaattgcgaattcttttgttgaaaacttatattttttttggcatatagattttctcatgacgttaaccatatattattaaaatagaaatccaaaatgattgtatcagaaagaggttaagattgaatctgattgtgctccaacttaatgaatttgatctatacctgtcgagtgccgatcgggggacctatttatatttatatccataagagttgttttaaaacattatttaggtgactgattagaagaatctaatcgatataaattttatttaggtgactaattaggcatctcctctccatgcataatgtatgacgtaatattaaaaacacatgattaatgttagttgcaactattagaaccaaatacagatgtacagagtacacgcactggtgaaaactagaagcttaattacattaagatggcttctagaacgtttcatgagacataaccttgcatatattctctccactctctacaatcatcagtatttaaagtacatggctaatttggagtaatcaagcttatctagagaaaactcaaattaatcctgaaaatttcgtagcaatctatgtaaagttgtgggtgttaaatgaactggtatctatgacacttacttatgctgtaagttgcatgttaaggagatgtctaggtagaaaaaatagtgagctgaaagagtgataagagggaataataatgggaagtgaagatcctcatgaaccataaaattaagatatgttttatgtgatgcatgacgtgtattacacagattctaattctatgaagaaatgatatactaatttggtcgactttacgttactaatcatgttcgttcccatgacgctaatatacgctgacgtaaaaccaaaaacccaaaaaaaaatctagaaacaacaaaaaggtgaatagatctttttcagctacgaaatacttttttaaatctcaacaaaaatttaaaaactaacagcacttacaacaaccaatttaggcaattacacaagaaaacgagaataaccaaaaattgggattccacccctcagatctcaatcaaatttataattcatgccatggtattgatgaagtatttcaagactcaaactgcaattacgcttccctgtgcttcggcaatgagtctcttcttattcgatttacctttggatttctgagactttcgtttcctcgaaggagtctcctgctttagctcgtctgtgtcttgttccattgcagcaatgacatctttttcttttttcttctcgtccttaggatactctgtctcaacagtctctggatcgatcacagacatctcaccaagtgtgtagtctaacaagaaactgcttcttacaaatctgtcaattctactgaaatgtctctgactatatgggattaacccttccaggagttccccaattccttttacctgttggaaaaataatcccgaaatcaatccaagcgaaaccgatactatttactgatattgatcttttcactttttatgttaaaccaaacctgaacaatttctgtgggaggaagtatgttgaaggttttgtaaagaacaaactgagcaatgtggcatagctttggttttgtgttccattctcggacatattcaaaaagtagacggaactcttctttttcaagtccttgaagagctttcactatctgttcgtctgaatctcttttcctgttacaccaattgcatgtaagaaaaggaggagacttaatatcgagaaaagaaagcaattggtacgtgttcttagatggcttttttacctgcagagaccactgaagagctcaaaaactttgtgaggcctacaaagctcaaatgctaatcttatagctttagtgtattccgcatctaacactgcgttttccagctcttgacctctcaagattgcttcttcctgcacatcggaagtgtttcaaaaatgatggtcggactaaagatcaagcacacatgactgctccacagaaaccagactattagaaattatctaatcagtgaactgacagacctcttttcggaaatcgtcttctttatctgaagcggttgaatcatgccataaattaataactgcatcacctccaccagttgcaatcatttctgtcttctttccaacagctaaagcccatacctgtaaaagttgaactgttatttgtctgaacagaatagcaagaggtctctgcgactaatggcaatgaacatattccatcaaaaggctaaaaataaatacttccaatacaaatacaggcaagccgaagttcataatcctataaatgatagcatcaaaggcagaccaagatacatcaaaaaccaaggacagtttatgtcaccttgtcctcgtgctggtcatatgtggcaatgcactcgctagtgttcacattccaaagtttcaacaaaccatcggcacctacaagtgcatggttagaatgttaaaactaaaaatgaagaagaaatgacatcagtgtagtgagtgattagtgaaacttaccacatgagacaaattgggttccatcagttataaatgaggccctaagtacacttgaggtatgaccttcaaatgttttgaggcaggaaccatcagatatagcccatatctttactgtcttatctcctgaagctgtcattacgcactgatcaacagttgagaactcaacagaaaaaatccgcctcttgtgtcctttaagtgtaacaacatgtaccaagtctggtagtctccatatgctagctgtacgatcctgtaagacagaaaccaacagtcagataagaacgtgaagcatgtctccatcagagcccagtgcatcttcattcaataggagagaaaggaagacaaatttctcaattcatctgtattagaaaaaagttcaatagaatgaattaccataaacttaaacaacaaatgtttgctcatcatattgtcttacctcagaaccagtgcaaactaagctatcgttacgagcaacagccacggaattgatgtctttatcatgggcagcgacaacacttctagttttcagattaatgggctcctctgagtcctctgaaataccatcaaggctccagaccttcagtgtacgatcactaatccaaaggaacgtaattaagagattaaaaaaatatatccctacagtttggtaggagatataacaatagatacatgtctctatgttaacaatcaagacagattctacactttctgcatttatgcacacaaattagttacagccagaatatttcactgagaaatgaaggtaacagaagtcaaaaattctcgaccacacagtctctatactactaatctgatagaaaaatttattttccagtataaggcctaacagtaaacagccttatgctgggtggctgggtaattgatcctttcttatatttcctcagttgggtggctgggtaaagaaagaacagagtcctaatcaggatttcctcattgttataaacaatatatgcataaactagaagcatcatgcttcacttatatcaaaataaaaggtatatgcaatcatttatgtagcacgtacccacttccactgacaaagaaactgaaggacttcttcgcaaaagcaaccgctaagatatcgccattatggccagtaccaactccgatacaagatttgcttgttgcgttccatagccttacctgtaaagtaatcaaatacaagttaaccgagtccacagatcactctagcagaaaaggtttttttgtaggtgatgttgtggggaatgatgtgcatgaaaaagcaatgacataagctacaaacaaccctaacgaaatcttgaacaaaaaattccatccctactaatctagctttcgtggtacgtaacataatttatgaaaactacaaggtgagtaaatggacttacagttttgtctttacttccagttacgattagaacattcccagaactagatacgcaagtgtcgagggacagaacaacttccttatggccagctaacacgtaggaacatgacattgttgcaacatcatatacacgaacctgcatatatatatatttgcaaatcttagtccatgaataatggaatcttagacttgatcatactcacaggataatgaccaagcccgtatgatacaggctgaaaaaagctcaattacctcctcgagatttgtagctactgcgagaaactgttcttcatcacctaggaacttcatatcagctatttcttcattatatccaaccagcctcttgcttagcactaactctgtttcttccacattttccacaacggagtagaaaaagaactgctgatcagcagtcacacaaagcagtccgtgatcagaaggcagcatagcagctgcagtgaatcctcttttagattcctcatcatccgagctgacagtaatatccgacgacttttgctcatagaggcaaattgaactgtcaaagtaaacagccaaagatttcaatacatttttcttacgccaggatagtttatatgactttacaccaaacattatcaacgtaacaaaacctattaaaggctcacccttcagacttccagatgcgcacaacaccacgttcaccaacagtaataaaatatgttgcttgagaatcagattccttcttcttactcttcttctgatccaaagaagctacaaatgaagcgaaaggcgtcccagaagaaactgttgtcacagcttctagtacctcatacgttgcaactgtagccttgcagctataatcatgaaggtcccacaagttcacaacctgtgattaaccaataagttagcaccagtaatcaactgaactttagaataaaggccgtaatttactgcctcataccatttaacaaaacaccaacagaaaacagtcctactcctgaagatgcaactcaattaaactagagaggatatagaactcactttatctcttccagcactgaataaagtcaatccatcctctgatagagcaattgaagtcacagctgaaaagtgcttctccataatggcaagacatttcttctcagtattctttgcattaagatcccagacacgaacggttgcatcatcacttcccgagataagctacaccacaccatcaagaacacactcttatcatcaaacaaaagtggaatatagctttacaagaataacatatctctttataatcgagaaactctatccctttataacacaaatactactcccagataatttgacccatagacggaattgttacatacaatgtttttgtttgaatcaggatggaagaggatacttgacacaacccctttatggcctctgaaataatgagtgcagaaaccaccatcaacatcccaaacaagaactttcctatcagctccagcagtagctagcaatcctccagatgcgtggcaagccattcccatcacaggtccttcgtgtccctgctcatcattaagcacaaattatagactaaaacaccacaaggacaacaataatcatatttagaaatcaaattttttaaaaaagagaaacctaattcaatatcagttagtacaatatatatataccttccaagagcgaatgcatttcaaggtttccaaatcccaaactcggatttgtctactatgtccagcagagaaaaggagcttatcatcaggactaagagctaaagcagtgagcgtatccgactcgccttcaatcgtggatttcactgatgaatccgtagaatcaacgatgttaatgacgtcaccacaggcgcaggcgatgaaagaaccatcagatgaaacaatgaaaggaccaccgccgtagaactgctttagagatcgtgagcacctgtagttcttctttaacgaatgaggagccatcacgacggcgaactctctttcccgtccggtgaagagaacgttgaaggactttgcgcgaagaaaaacggtagccggagaaagaattagggtttaagcagctcgcttttataccttgtctttttttttcaattggtaccaaattttaagacgtaccaaattaagcgtttgcgtttgcgtctgcgtttgagatccaaatatttaagcccatgaactatataattggcccataataattatgaagcaatcgcaaccgtccatctaatgaaaaagacctagactcgtcctctttcgcacgctaacacgtgttcaacattcgccacttgcatcttcacacgtaccaatattcgattccacacgtgtacaacattcccttctctctctgttatttcatctctagaaaagggcacaaaaaaccaaactttacgatttctcctctctggaatctcgattctgtatgatctcttcgatctaatcgagtcttctaaacgttccgtgtagaatttcaaatctagggtttgctaaagcttgaacctttcttacccttttctctcgaagaggttttgattcctgggcatgaatttttccctaatcttgttaccttcgaagcataacaacaacgaaagatgtcagattcaatccaggaaagatacttagttggatacgcactcgcagccaagaaacagcatagtttcatccaaccttctttgatcgaacactcaaggcaacgaggcattgatctggtcaagcttgatccgacgaaatcgttgttggagcaagggaagcttgattgcataatccacaagctttacgatgtgtattggaaggagaatcttcatgagtttcgcgagaaatgtcctggtgttcctgtaatcgatttgcctgaggctatcgagcgattgcacaatagggtttcgatgcttgaggtgataactcaattgaggtttcctgtttcagatagcgagagatttggtgtcccggagcaagttgttgttatggattcgagcgtcttgagcggtggaggagctttaggggagcttaagtttccggtgattgctaagccgttggatgctgatgggagtgctaaatctcataagatgtttttgatttatgatcaagaagggatgaagattttgaaagctcctattgtgttgcaggagtttgtgaatcatggtggtgtgatctttaaggtctatgtggttggagatcatgtcaaatgtgtaaagagaagatctttacctgatatctctgaagagaagattgggacgtcgaaagggtctcttccgttttcgcagatatcgaatctgactgctcaagaggacaagaacattgagtatggtgaggataggagcttagagaaagtggaaatgcctccgttaagtttcttgacagatctagcaaaggccatgagggaatcaatgggactcaatctctttaacttcgacgtgattagggatgccaaagatgctaataggtaccttataattgatattaactactttcctggatatgctaagatgccctcttacgagcctgtgttgactgagttcttctgggacatggtcactaagaagaatcatgtctgagaaataatctgttggggagttagcaggaacattgttggggaggatttgtaccattgcaatgtgttgcaactgccattgcaattctggcctatggtgactagctgctttgctaattttcatttggattcttgaacttgtgctttttatatttttttagttgtttctcttttgtttacttccgagttttgcaaagccatgttcaaatgcataactgttgctactcttgaaaagcattgaatctctaaattcttggcaatgtggtctgttctcaactgttggtagtttgtgatttcttttcaagcttttatggtgcctgttttcttcctcaaatctgacaagactgagatatttgattaagcattggtataagttgattagtaaccttcacttggcaatgcttttccattctctatattatgaactgtttatgtgaaaccggtgctaagtctttgtatcggatttctaagacatggagatggtttgcaagatatctccagttacttgtatcttcgtcctgtgctttcttgtctctgcattcttggtgcttaagtatatggttcttgtttgaatcatcttgagtaaggtatgtgattgtcctaacttcaaaatgaatctagtttttaccattttgcagtttcacatttagattccaagatcctgagaaattagatatttagattgctcacataagcttctctatagataaaatgaatctagaaacatttctcacatcttggcgtttctcatttcaagagtctttgtggatatgtccttgtttcacaccgctgcttaagcttctcaagcatcttatacgctctgatttgatgtgttgcatcatatgcatatatcctcctacacttatatggatgtatatattctaattggggtttggcatttatgctttaacaacttggatggagctgataagatgattctggacaaattttatattctttataatctccatgttcgaacaaattttttttaatattaaactgattttatatcctcacggaactaacaccgaaattatcatagaaccagagaaaatagtgatggatgattcgatgttttaattagattcggcaacatgtagctttcgaaaagcccatgagcttttgggttcctgctatggaaagccatcaacccataaaagaatataatccaacttcaagttcctcacggctcaatatggatctatctttttcacttgcttatttttttttttacacactttctcaaaaaagtctacatagtccttctcataatatggacttgtaccgtagagaaggtgaatcaaagacttaattacgttatatttgacatggaagtcttcgttttaaccaactatattcatctttagttttatccctaacctaaaagtacatacgtaaggttctacgacttaattagttttatcccaaaccactgcaacattcattgtatatacgtaactttttcaagtaaaagtttaagttttctctggatatcgcatgttttatgtttataaacattagttttgttctacaaagttgacgcaccatcttactaactaattgaattactaagctttaggtttctaaatatttttgcatagcaatgtaacgtgcaaatcattgtagtttggtctttttcaagatgttaggtttgactcatacacaagaagataatatatactgtcaggtaattatcatcagaaacgggtcatactgttacataccggagtttgatgtatattgtatagaatcaaagtttacttgatctcttcaatatgtgacgtgtttaagtacttcgtggtgttggtttgtgaattttggagaaattcaagtacttaagcaaattttgtcctttaatagtttttagtgaatctcaatttgaacattatatagaatagatgtctcgattttttgtgtgctgttgaagtttgggtttgcgtaaaaacaaccatcataatatgaaaacgcaaaacaaaaataaattgactaaaaattgttgctcatctaaaacataatatgagttatgagagataattttcgaagatatatattgttcaagaaattagaagatgcattattcaatcaaagattatgtcctaaataaagccgtaagggtaggatgagctataagcgtttggttagaggaagatcaactgtagcattgttgtctccttcggattagttggaaacttcttccgtacgaatatttcatctgtcttctaaaaaaaaatattgttattattagaaaattttgatagattccaattatttcttaagatatgtttaaattttattttgatcaattaatgtaaataaattaaataacgacccacaaaccaaaaatttacaaggtaaagacccgttttcggtgggctggtttcttagccgatcatgtgttcgctgggtccgtggtttcgcgtatcgatttgatggggagttttatctcagtcttatcgtgcgccttatttccggatatcacaaaaagttttacaaggtgaaaacatatataatctaaaaatatatatactaatgtggtcgttgtgtcattaaaattcaaatccgataaaacgcatgtctttgataaaactaaaaagaaaagagcttcacaagttatttattcgatggctttaatggatcaattaacgtcaacgtcgaagcaatgaaaatgattctatggaccaattaacgtcaacgtagaagcatctaaaaagcgattaaataagaattagtttagtcgttaaaagaattagggttttcgcgggtcccagggtttaggtttgcgtgccttgatgtgcttaaaactaaatttacaccaataatcaaccaccatatcgagacgtttgatttattttcttagaaattactactatatacttgatatatatagtactgtatgcgtggctgtatatactattttattgactttgtagtaaaacaaaattcttatcaaaactaataaagtttttattaagctcatttcaaatagaatgtaagaatataaaattatatgattcatctaaacctttttctcatgatgattcatgcaaacaatagctctgcattggaatcgcagtttttctagctttaaaataaaattgagatgtattatatatgtatattccctctttgccaactgttttattgatcggaacacgataatatataatgatgaaaacaattgacttcaatatagtttttgtttatacgtattatagttgggatgtggcatgttgtggatcatttgttgaccaatgaccagtaattcatactgttatggacactgtttcttgcaaaatgttatatatatcaaatactatatacacaattaaattatttaacgtctccacgtggaaaacttgttggtacaaataggttccatgtatatatattttttgaaagggagatgacaaacttatactgggaaatcattgataattcaacatgttgtctgctaagtcataatcgtgtatgtatatcactttaatacttggaagaaaaaaaaaacttaaaacgactctccattgtttaccacgtaaacacttgaaatatgctacattataaaactaatcaaatattaaatcataaaactttcatcttttaatatctagcaaaaaagaaaaatgtgtctcttcaatgactaaataaatctaagattaattatgcatatactttttgttgctttgataactagttacatattgataattctcatttagttagtttcttttgtacatttttaaaaaatataaagggttaattactacaaactgccttttgtcaacatatggattagttgcagcaacttttgtgtatctacattgcttcccaaacttgatcatcttcttctcttcctatctttttcttcttcttacaaatattatgataagtttccacaagggcattttcgtcattctgtggtcagcaaagtcaaaagctaaactaagatcttctccgtccgacaagatacaaagacacgaaacacaaatgccctatttaatgcaaagatcacacacacacttagcctcattcactaagatccttaattggattgccttcatcagaatctttctcccttgagagttctaggagatcttcaacaggttcgacaatacatttatatacacacatgcaaatatttatgcacgtatgtttctgctcatacacacgttaacaagttcatttataatcatgaatctaattatggatcaaaagtgtgtttgatttatacattatctttagattgatgaacttttttttggtcaaagattgaagcaattctatatgcttaattctctaggttatttttattttttcaataatactttctacgtacataacaatattcgtgttatagctagtaataatggggcgatcaccatgttgcgatgagaatggtctaaagaaagggccatggacacaagaggaggatgataaactgatagatcacattcaaaaacatggccatggcagctggagagctcttccaaagcaagccggtttaaaccgatgcggaaagagttgtagattaagatggaccaactacttgagacctgacatcaagagaggaaatttcactgaagaggaagaacaaactattatcaacctccattcccttcttggaaacaagtaatcaattactttttcactttataattccttgctttgttttaaaaaccatcgaatgttaattctttctagtcaaatcattaattatatctcataaaaagttagtgtgaaacgatctaggatgaagtttataactagaattaagagtagtgtgatatatgaaatatataataacatatatattagtatatagtttatggatgaaagaatataattgacatatatacctactacactggttttctctaggtgcatacgtctgtagccgtttttcaatcttgaaaagtaaatcttgttacgactaaagcaagacaatattaggtatatattagtcttagactaatccactgccataatatcaatttgattaatgtttaattatttcgtatatgttttggaaggtggtcgtcgatagccggtaatcttcctggaagaacggacaatgaaataaaaaactattggaacacacatttgagaaagaaacttctccaaatggggattgatccggtgacccataggccaagaaccgaccatctaaacgttttagcagctctcccgcagcttatagccgccgcaaatttcaacagcctcttgaatctcaaccaaaatgtgcaactggatgcaacaactcttgctaaagctcaactgctacacactatgattcaagtccttagcaccaataacaacaccaccaatccttctttttcttcatcaactatgcaaaacagtaacaccaatctctttggccaagcttcttacttagagaaccaaaatctttttggtcagtctcaaaacttctctcacattcttgaggatgagaatttgatggtcaaaacccaaattattgataaccctttggactctttttcttcccccatacaacccggttttcaagatgatcataattcactccctctattggttccggcgtctcctgaagaatctaaagaaactcaaaggatgatcaagaacaaagacatcgtcgattaccatcatcatgatgcttcaaacccttcatcatcaaactcaacgtttacacaagatcatcatcacccatggtgtgacactattgatgatggagcaagtgattctttttggaaagagataatagagtaagtcctatcagtactctcccacatagattgaattttatagttaccacatgaatgcattcagtgaatatggacgatttggctagtctaatgttataattctccgttttgcaggcaaacttgttcggaaccatggccatttcctgaatagacaagattgaaaaatgattaaagagagagtatatttatttttcttgttatttgttgtcgatagagttaaaagcatatttattcttcactaatccttaccgtgttttttttgtaagaccatgtgtgtgtggtaaacattgatcttgtacaaacttgattacattactgtattaatacaaatattcgtgtttgtaattactttcataaatctaatttatctgctttacaaaaaaaatacaaacgttgatttctttttgttttcaaatatataaagtacaaagacgaacgcaaatatattcttccatttgatttcttattaaattaaaaagtaaatatactatctacacgtaaacgcatacgccaatgcaataaaaacaatttgtctcctattaattataatctagtcaacacgtaaaaaacaaaacagattcttgactatcccaagccgaatgaacaaaaaaatatgattacttttggatgatgaatatatatactttttttgtttgttttaccaaatataattgaagattaaatatttagttggcgatgggtaagaagaagtgaactacaaaatataccctcgaaagtgacgcaaccttgttgtgttttgactttaaagtaggagacaatatattaagtgaataaagttatagttgcataacttacgctacatgtctcagggcacagaacatcttcgcactatttttaaccttgcggccaaaactaaacgatgacgcgtgaacattttttttgtttaagtcaaacgactcaacattttatgatctgaaattaagatggaaagaggtaaattgcattaacattttttaaagaaagaaagaaaaaccggtttgattacagaactgaaaccaaacccataccggttttggcaacttcatcaaaatatcatcagtctcagcagcatgaatctatataatgagcgagctatgtcttcttctaaagactaacaaatcctgaaaaagagtttaccagagacaaatcaatgtgaaacaaagacgcaagcaagaccttttgattatctaaaagtgtccttcaaggctttggtctctttggtggtgtatccgagtttccgggctctgatttccgctttattcccaagaaatgctccacctgaaacgtttaaagtcaatagatcaatactaatcatgtattaggcggcatcttattaataagttgttaaagaaaaatgtatttttatcttaggtcatgtaacctttctgtcaccaagcattggtgttaagcttccaggaacatccttctcaacagtcgcaaacccactctgaggatcactggtttgtctgaataatgtaacaaatatgtgttagttaaagaaactgagcgtcacttgtatctcagtgattccaaaaactaaaactgaataatgaagcatatgtataccctggtttgacatggccactgaggacaaggtaaggagttttcaattgagcttgagcttctctcattctttgaacagactgcgatggtgtgtctgagtttttcatttgctttaacttgagctcttcctggtactgtttcatccgtttctcttccttcatttttccaggccccttcccgtggaatttgtgcgagagtagtcgaaaggcttcttttggagttaactgttaacaacgtgagagtagaagatcaattattttacatatgcacacaaggacgagtttaataagagtgaaaatctatgcacacaaggacgagtttaataagagtgaaaagcaaagctttagaaaacttacagttctaccaaactcgtcagtcctctcaatccggatgtccttgaatctatccttagattctttatccttagattctttacctccatcatcatccacaatacccacaagcttgctcttttttttgtccatatttctaccaccccattcgaccttctcctttagggttcctcggtctttaagaagcttcaatgcaccagataatccttttccaaccgcaacctcgtgtatattttcatcaggtgttatctctttggtatctgatgaatcctctgctgcatccatatcagtgtcatttacttctgtcaaaccatcaggatgctcttcttttacttcaacgggagctttgggtgctacatcttcttccatgaaaacatcttcactttcaggcttccgcacatctgaaagaccacacaaagatcaacaacaccgtaccacttctaactacaaagcatatgtttgtcgaagaaaaaaaaagtaattagcaggtaataagattgattaaactagctacaaactatttgcagacaagttagccccaagcatgtgtgtgagagagaatgtccatatatgtcatatcatatgacaccaaataaatgttccaaataacgtaggaagtgctatagcagatcaatataatagagcaaaacataaataacagtgtaactgtgtcagaagatgatttaaactttaccgttctcgcgctggagaccccagacaaagtctcccatctctgtaaaaaccactgtattttcttgtgtctcatccccggtggtggtattatcatctgttgtttgattggtgctggaagccacaagatgcgcaactgcctgtggaccagatccagcttcctctttcttaatgagagctagcctcctagctttctctaacgatttgtaaagatcttcagcatcatcagccaacaccatactctcatcttcatctcttttaaaaggctgaacttgttcccttctaagtagcctggatgcctcatcagctttagcaatggcttcctgataggcattgctccgtttttcatactcgatcctttctttctcttctttcatggcctgccttctgccatctttacgagaaccaagatcttcagctcccaatcccgatgcaacagcttctgcttcaagcatacttaagtccaatttatcctttttacgcaattgtttctttttcttgggttttttgaattttagcatttcttcctgtgagaagtaatctgaagagacctttgctgaggagttaaggtcttcaaaagtatgtgtcgtctgaccctgaattctcttacgcagctgatcggtagaacatgaaagaaaataattccgttagtgtgtatacttactacgatccatttaatatgacagaatgttaggaagaatagtacctcctctagcttcttctcagcttcaccggtgaagcgaccctttgcatccaaaaagatcccctaaagcaaaagcaataacattaattccctccaaagaagtgcctataattatggtatttgaaaaatccgctagacagagtaacttacctcatcagtagcagcctcatcgtactgaggaagcatcttcttttctgccccgggatcatcattaaacctataaaataaatataatgccatgtttcagtcttaagcaacacagatatgctcatctaaatgcctttgaacaatacttaaacttacttatcatcgtatattccctttttcttcttggctgcttcataagcttcattccggcgcttctgttctccaatttccacattttctagcatgtcaatctctgcaagaatagttgaaaatctcattatgacagagcctaacatcaacaatgctgatagcataaataaaagatagcacaaaaagatactaaccattgttaacgtctccatcggtaaggacactttggtcttttagtgtcaagataactgctccaccttccaccactttctccaaaccatgtagaactttaacaccagatagatgctctgttaaccagaatatgtcaagataaattatcaatcagagagcatcacatttagaaaggaagatagaaaaagaaattctatggtatgacagaatacatgattacttcctttgaagagttaaagttaggggtaaaagaactagaaacgaaaacataccgccatcctcgccatcttcattttcaccttgattaagattgtcctgaacaaatatgagataagatatatttattaaaatgtcagataaaaggaagttatgaagaaataaaaggatataagatgttcaaggaatggaggtaatacctgctcctcaaaaattctcgagagctgctgtgctctttgcttctcagcatttcgtttttcctcaatcttacggctccttgcaacccatgatagagcatcagaagcatcttcagctttcttctttctttcctctctcatcctaaggaagaaaacacaaacttttaattcctgtactacctataattctagatttcatataacatatgagaatcacttacttcaaaatgcgattctgaaggtccaacgcagatgcttctttcccacttgatgcagcatcaacattatcgccaccttcattcagacctctgttgtcagaatgttcatatctttctgcagctttatgagtctcgtcatcatcttcatgacttttcttactcgctctctccttgactcttgccctatccttgtctttttccttctcgttatccctctcattttctctatctttatgtctatttctttccttttccttgtccttttctttaacccgatctctactcttatctttctccctctctttatctctacctctagagatctccttctcagtgtcctcatctctacttctttttcggtctctctctttctccttatccctgcggtggtccttatccctgatcttttctcgatcatagtccttttctttatccttgctcctatgatccttctctttcctccttccatctctgtgttctctaacaggcgaaccctcgtagtcagccctctcttccctgatttcatgccttgatttagacttctccacttccattttcaagaactttagtcaagacctaaccacagaaaaaggagttactcagtaacaacaattacaatggtagcaaaactacagccgagcaagatgagaataacaaaactattatattggcattactctgacaaagtacttgcacacttgatgacaattttcggtttcaaaactagtgacaaaacacaaaaacacaaaaaccctaacctaagaaggatttcattattattggggaaataaggtaaaatcaaatcctgaatctagctagctataaacatattcagactttggaggataaacggaaaacggaacaaggtcaagcgattcgaaattcatcggaaaaaagaagaagcaaacatctgaaacgaaatatcaaagaaaacaaaggttgatcaaattccgattcgaattacctctagatcaaaccttcaatggaaagtactgaatattcggatcgacgaacaaagagctcagaattgcaggagaaatttccgagggtttagagataaattgcgaaagcacaccgacgaatagtaaggtttagaagataaagacctagcaactgcgaagaatttagaaaagaatgcttcaaacgagagagatgacgacaaacagcaaaccgcggacgatcgcaaactcgccgtggaaagagacggagagactctctggtggcgaagagaggagaacgattttgcaaaatagagaagatatacgtgtactgtatatatattagtccggtttaaaagcaaattctttggtacgggaataaatcttagtcggttgaattttctggaccggttattttcctgatgaatcattaccaaacttggtttagtcaaataaatcactttctcctgacctttccggttcacatagtcctcaaaacctcgagaagatctgccattattttttttgaatctgcgagttaaaatgaaacatacatatccttattttcatagcaattttggttatgaggcaaccagaagaaaccagaaatttataaaacagattcttcttatcaatgaaaggtttgtttctttagcattcaagaggaagacaaagttgctaagattaggagctaatcgatggacatggcttcagcgccatcagcggtaatgttcctctgcatttcttccaccatactcttctgttcatcctccattgtctcctgcaactcatccacctatacataaaagttttcacaaaaccaaaaaggttaggatttagctgtaaacataaagaaacacgagaaaggcgaaatcttgtttagaatcttagctataaaaacacaacgaaacccgtaaaatcgacataccacatgcaacaacaatgcaaactgcttcttccttagttcaagaagtctccaacttgctgtattctcagcctcgagttctgcaatctccttcttcaattcatgtataaccttctgcgtctctgacctcggtggctgcgcagagataagtttcctaatggcttcacactcctctttctgttgtctctctatcttactctcctcaagctgtttcttaagatcttctatatcagcttgtgcctgcattatctgcctattcgtctcatctttaagctcgttaaagttctctttctccctaagatttgcagcgacaactacttggctcttaagaagcggaatctcaaacgcagagagttcttgcaagaaagctttcgcgagcctaccacactcactgtagttatcttcttctttgtctagttcaataacaaaagaagtgaatttcttctgaagcttcttcaatggaggttcgcctctggtggtggtcgtgcgtgtgagaagcctatttcttataattttgtcatcatgtaacggatcgaaagcataattagctgctacagtctctgatctacccgaaacaatcctcctagctctcactgacatcttaactactagagtctaatattattcaaatctgcagaacaaacacaattcataataagctaggctaggcttcgcataattctgacaaagcattatcttaaaccaaacaaataaatctatgtaagctaaaaactgctcaaaacaatgagaacacactaaggtcctttttgaatactcattcacgggaattcataacattcgaactagtaattaagcaaaagtttcatagaattcgatttattcttctcatcgtcaaaatcgttataggacaacttctgtttctcaaattttcagtgaaccgaaattatagtgagattgacccaataaataatcggcgaaaaagagaatatttaacttacttgaaccgaaccgaacccaatatcaattcacctcttgtacgattaaaaatccgaaacagagaaattatgattctctgatgcactgtgaaccctaattctatgtttccgttccttcttcccctttccctcgttcttcacagtttgctcgttaactttcatttattatatacctaatccctattgttttttaaattacaatttaagcattcacagtggtgaactgaaatttgttactaacccagaaaattggtctggtttgtttttttttttttaaatctgtttaaacatctctagttaattccatgtcatgtgaattagccccaattagagccaaaagctgttcatgatcagaattgaagaaggatctggtttctcgaaaaaagtattggggtttgtttttgtaattttaagtaaattatatgagcttatgctagttttcacgccataaagcacaaagctaattttttcaacaagctaactaatttaagacaataagactaacagtggattgaaccctccgtcccaaagagttgtcttcaactatcacatcacaatatttacatttttatcacattattattctacacgaacacacacaataggatcacaaccagagcttaatggaagacattaaaatgaatgattttacaaagtctatgaatgggagacggacactatacgtaatcatacccggatgatactctttccgatgcaaggtttcgtttagtctgagtgggcaagagacaccgcgtgttgtctttgcttttaagccatttcgagcctttctcatcgtggttcaccgtcagctttgatgcgaaagatttgattccgctcctcatataattcagaaccaacaccgcaagatctctgcaatgcagccatgattcagcgataaccccatctatgaagaaaccgcaaagaaacatcacagcaaacagaatttagaatgcaaaaaatacttgtgttttgtacatacaagggtgagcaaggagagcgagaaccgttgataaagtagacgaacaagtaagaatcgaaatgctggccgttgattaagtagaatccgtgtaacctccttacacatctgaaagacattcttttgtacaaccggattgcgggattgttgtgtgcaatcacgtgaaggtaaacaccacggcacacagggataccagaagagtatttgacgacctcgttaataagtgccttagctgcacaaaaaagttgcagaacttaatattaacaaaaccaagcaatagaagagaagcatcaagccatcaacaaaatatccatatcattggtttactacatggggtcagaatcaataccgattccacgttttctgtatgtttctacaactccaagtgttaggatgtacaccaatgtcccctctcccttcgacgagtcatatcttattagatctgatatctgtacaagacatagaaaatctatcaacatattacccaagaaacagccattgatgactcttaacattaaacgaacaagtacaaaacaagtttggatcataatcaagatgttaataaagtggctggctctttttgattttctagaactttcgtaagaaacccatctaatgtacatggctttaaaattcacgcttaaaccattagacattgtgaaatggttcaacaacattcaaaatctacacttcacaattacttgttacttgctgtataaagttatttcgaaatttcagaaccaaaacccaaaaggcgaagaacaaagagaagacaatgttttactactgaagaagctccaaccaaaacttaaaagcttagaaaaagctgttgaaattgtagaaagtttatatttttaagaaatttttaagaaaatgtttcaaacattcaaaattttcactttacaagacattgcatcttctttacaaaacccaaaaaccattcaaaacaagcttcaaaaataacttgaaacgttacaaattgaagctttattttctccagtggaaagaaacccatttcggacatttgaaatctacacttgaacaagacgatgaaaaaggaagacacttgaacaaaacacaaagcaactcacttcgctttctttggcaagtacgattttggcagtaacaaatccaataagttcctcagaatgaccatcagggcgactccgatcaacagcagcccaagagacaatatcacctccgttgacaacattctgaaaaaactcagactcatacctgaacaaaatcaaatgctttgataagacacttccaaaaaacggaaagtcaaatcccaaaaccagatcacatataaattctttccaaaacaaaggtatttatttacctgattgggaatatgtcacgatggatttgctccaaacgttctaaatcagaagggtttattggtctgaagcaaatagttggacgacgagcgattttgggttcctccattgatgaattctccacaaatccacggggaaaacgcgacattgatcgagatgattaagactcaaacaacctcaaattctcaatttttgatactttcatctgagaaagaatcgagttcgagatcaaaatcggtctccgacccgtttgtctgaatcggaaccgggtgggttagggtttccagaatcagaagatgggtttgttgatctgcaaaggtttctcggagagtcaagtgggaatcgaaagaaatgtgaaaacaaacgacttttggagaagaagaggaaggaaaagtatttgcttgattgctttgccgtcttccccacacatcgttatggcttcaagcgaagcatctttgattcttcttcggatcatctcacgtgccttgcgactaacaagcacgtgcgcatcttcatcattcttttacttttgacgacattctattgtttagtttagtgacaacaaaacaatcttagtatagctagtgcaggatgagcagattcaatatcatattttgggaacccacgatatatgattatatgttcagaacatggatcaaggattaatagttgtagataattacgtaaatacataatcttcgtctcttctcatttaaactacgccattcaaaaatcgatgactaagaacagcttccgccattggccgcttcctatagtcagcgttcaacattgcctaccaaaacaccacacgcagagacattattggtcaaattaccaaaactttccaaacatgaaatcagttgactctatcataagcgttctcagcatttctcctccatgcttctcgatattttcttttcattaccgtttccatttaactttgatcagagttcagttatttaacttttttttttactgtgaaccacgatgcagagaaaattggaatgactagatacctggagcaattcccaaccagctctatcaccaagatccagaaactttaccgcttcttcgaggcgttcatcagctaaacagtacctgtataaaaaattagtgaggtctttcaaacacacagtaacttggagtattaatcggttaattgaatacaacggttctttttgtgctgctaaaatgaaatgcaatttatatgcgttttaagttttaacacaagaaagttatgacaatagagaatgttagttaatctggaggtagcaagaggcttactctcttacagcctcgatatccagccggaaagtgttttccagtagcctctgcagttcagcagattaaattgcggttaaacaaaaaactgtttaaagaacagagctgctacatttgttggattaaaaggagatcttgtgttctttcttgcctgaagagaaagagaatccgttacgcctgcttcacagaatggaacaaatgctaagtatgcaaaaagaagaccggcttcatatctgtaaaccgcaagaatgtgttaaacctttatcaaagaacatttgcaacttaaaagatgaaagactaagaaggaaaaagcactacatgtcatctgcaatcccaaaagctcttttctcaaaaactgtgtaagcaccagcagcatttgcccttcgccaaagttgctctgacagtgaaccagaagtggctccttcttccaagcatgaaggcctgtaaggtatgctcagtctattaacagagagttgataaaaagcaccaacattatcttcacaatgctagttccagttataaacagcaagaccaaaatggcgaattaaaaaaaaaaactactatagctgaggataaaataatcaatcaggaagagatgagaagagtaagggaaccttatgtcaacagaaaaggctagatctcgcagcctcggtattaaatagatggcttctcgttccgctggtgtactaaggataatttcaccagagagaaaaatcgactgaattagtagagtcatgaggcatttatattaagagtgaggtgtgtatgctatcactttcacgtgctcatgggggaacatacttgagaacaattgaggatggcccgaggctttgatgtaacctgtcattatcatgcataaaggctagacccttcattgcaccctgaaggatcttaataacaaagtttctccttcgttttatcatctgctctttttcataaggattccatactccttgggagcgagctctggttgttttttcactcgcagtttgcgcgtagtcagctgcactatctttcccaccatcacgaaaagccagccactgtaagaatgaattgactcagcctatgttccataaggtatgccaaaatatccacaaactagtgcagcttagattcaacaaactacagtgccacatattgtaagcctgacctgttccccaagttgtgtctcaaagccaccaacaagtagaagcagattagcaggcaggcttttgctctgtatagacaagcagaataacaagttgatttcactattagccaccaaggagatgtaattgctaagaatctatttagcatttttgcatggctatttatccaacctggagaaaagagtgtgcattaagctcgtttgctgccatcatgtcagcctcaactccaccagcacgctgtccggggtagacctttacagagacaagtatgtgagggaaagaatgaatgcaaagcaataaaatatccaaatgaagttttgatgattctaataatgtaaggaggactcgcacagctgaacaaaatatgcccagataatgtagagagactcatgaaaaatggaaactgccttcaggaaaagaacaatattggctgagaagaagaaacaagattgacaaaacatgcagaatcaccttaaagacgacaggcgttcctcgaaatggaccctgagatattcgtccttgatatagtctgcatacaaactgctgtggctaatacatttttaacttgaccaaatatattaccatctaataaattgtctacacaaagccaaaagtgcacctgatcttaacggcaccttctccaatatcttgagattttaatcgcccaatatcatcagacgtatattcaaagtcagatcctgactgcagccctgtataactaggagtatagaagtggtgaaaagctaagtaaacgaagtagaacacagcggcagataaaagagtaaaactagaccaacaaacgtagcataatctagctaaagatgcacaataatcataagaaaggtcaatgtatcccaattcaaatacactaacaaaagtgatttttttgttaaacccttcgaataattgtcaagctcacgtatacattgcaatgagtgcataaacctgttgcaactacagattcacacatacacaaacaatttcgatataaaattagagatttcgttacacgaagacgtagaaacaacacagaagctccagataaagagagaaatcaaaaatccagtgagagtacctagttacattcatgaatccgtagcttccgataagccgccctacctcgaacgagtcagcactggttatcaaactcgctgtcaccgcatgcaaccgccgaatcggccgattccgtccacgcgaatttacaatccgacagccggagaatccatcgcctgattctctatgtttcaaagagaaacgcgaaacgcattcgaaggaaacgcgatgaatagcgaccagattcatcgcttttgtttgtgtttcgtcgcttcacttcaaattactttccaggatttaacgagtgtcagtgtcagtataagagagagagagataagagccaggaaagttttctctgtgtcttacgtggcttttaatatacataattaaatgatataatcgtgcgtcgtatagataaatatctgagataatcttattaaattttaacggtgtatattatgccacgtatgaaactcaccgagaaaaacagaaaaagctgctatcgatgctacgtgtacttttaaaccgaattaatccgaaccaaatcaaaatacacgaaatgaaaccgtttaatttaggtgacagtcagagtgtctaccaaaactaatcgtacaaaaccgaactgaattgaaccgaaatggccatgcctgcttttcttcagctttaagggaaaagatcaaagattgggtcttcaacacttgagagagtctctgtctctgtaaaagatatttgagcttgagaagaacagaagaaacttccaggatcaatcaatcgatcaactttagtgaactaactcttgatttttcattcgaagttatggaatcggttcccgaatccgtaccatcgccgaactcgaatacaccgtcaataccaccgccggtgaactccgtaccgcctttcttgagtaaaacctacgacatggttgatgatccgttgaccaatgaggtcgtttcgtggagcagcgggaacaacagcttcgtcgtctggagtgccccggagttctcgaaggtgctcttgcccaagtatttcaagcacaacaacttctccagcttcgtcagacagttaaatacttatgtaagcatcattttttgtgttattgtcaatttatttttctagaaattgatcgttttttcgtggtacaatttggggaacatcgtgaaatgttgaagggttctagtcttagtgactagatccatggatgtgttggattatttttaaagccatatcaatctgtctactcatcaaaagattccacagaactttgcaggcgcactgtcacatatgtctgaagattgtttcctcaattgttttctgccttgtagctctaacaaaacagaatgtctatcagttgtctgaacattagctttgttttcatttgtatatttccgtccaggtacacttttttgataaactaagaactattactttccttataacatggtgattttgtgctacacccaagcatagtgtggagaatttgtttacttctcaaactttgctataactagaacatataactaatctggtctgttttctagtctacctgtttaatgtttatacatttttgtacaattgcgctatgttggcttttcttcttcccctaaattcaagcaacatcgtttcagttcttcaatttgaatttcgatatttatgatagcctctctgtattctgatgtccagggtttcagaaaagttgatcctgaccgatgggaatttgcaaatgaaggatttcttagaggccgaaaacaactactgaagagtattgtcaggagaaaaccttcgcatgtgcagcagaatcagcaacaaactcaagttcagagctcatctgttggtgcttgtgtcgaggtggggaagtttggaatagaagaagaagtggaaagacttaagcgggataagaatgttcttatgcaagaactcgtcaggttaaggcagcaacagcaagctactgaaaaccaactgcagaatgtgggacagaaagttcaggtgatggagcaaaggcaacaacaaatgatgtcgtttttagcaaaggctgttcaaagtccaggtttcttaaaccagttagtacaacagaataataatgatggcaacagacaaattccaggaagcaacaaaaagaggagacttcctgtagatgagcaggagaatcgtggtgacaatgtggctaatggtcttaaccgccagattgttagatatcagccgtcgataaacgaagcagcacaaaatatgcttcgacagttcttaaatactagtacctcacctcggtatgaatcagtttcaaacaatcctgacagtttcctattgggtgatgttcccagttctacctctgtagacaatgggaacccttcaagtagagtttctggagtaacattggccgagttttcacccaacacagttcagtcagcaacgaatcaagtacccgaagcaagtttggctcatcatcctcaagctggtctggttcagccaaatataggtcaaagtccggctcaaggagcagcacctgcagactcttggagccctgaatttgatttagttggatgcgagacagatagtggagagtgttttgatccaataatggctgttttagatgagtcagaaggcgatgcaatttctcctgaaggtgagggcaagatgaatgagttactggagggagtccctaagctgcccggaatccaagatccattctgggaacagttcttttctgttgaactcccagcgattgcagatacagacgatattctatcaggatcagtggagaataatgacttggtattggaacaagaaccaaacgagtggacccgtaatgaacaacaaatgaagtatcttactgaacaaatgggactgctttcctcagaagcacagaggaaataaaggtaagaacatcgttaagttcaaacatgtttctctgcattgttgtatatcttgagagttatcaattgtctctcacaatgtagattttcaggggaggttgcaaaaggagatatgaaggaacgaggaatatatcagatggtgtgtataccctttacatttttacttaaatgaaaaaaaaacagagagaagaaacataaaagatttaccaccaagcttgtgaatagttagtagagatcggtttttgtgttgtttatattatacttttgtgtgaaaacgttcatcttgttcaattatcatctcactagtacggtaatctgttggtcactgaccggttaatgaccaaaaaatcaagattattttcttatgtttatttcttttgatcatgaagatccttatgatggagtaatacattgattaaacattcacacgatgagaagttaagatcaatttggttgaatggggaagatggagtataaagaatctgtacattagatatatatctttaatgggtctttgtatagtttccatagattcgcttgatgcttgaagattgaagcttggagttatatgtttgatgcttagaccaagacaacgatgatgacaatgagtagaacaatcccaaaaatgagaataagtaggcatgtctgcaacaaagtaaaagacaacaaacttagcttaagctgctaagaatatgaaatcacagaactgaaaatgagaagagagtctgtttagtccgtaccaaagaggagtttgatctttgagttttagctgcttttctgagttgaacagtggcttgtgtagttgcagcatgtgagttgtcaaggttagagctgatgtcatctgccagtgcacattatagtttttttctgagactttaaaaaggcaaagagaaaacgaacagggagatttacaatttctgattgtttggagttacttaccgacaatatttccttgatggttcaccataagagctagatctttgaacatgccattcacatcacgaatctggtcttcaatttctcgaatcccttgctctctttcctcaataattgcttcattgaatgttatctcgttatctaaaaacaccacttcttgcctggaatgagaatataaaaagttagcgaatagcaagcatctccctgcatccagggacataaccaacttcgaaaaatttattaacctattctaaggcttctattaacaattcaggctacagtgagtgccaagtgtaacgatggtttgaatttgaactctcgagagcaaaatgcatgctagactaacatttggtttatgcttataattgatcaaatgaattagtaaaataacatgctagcatataatcaaatcacactcctcaccttcttgattgtagaagaagagcttgctgctgggagatccttaaagattcagtatccagttcaggtgcattataactgcatggtgtggcatgacaatgaagcatgtgtaagtgaaactcacattccacaaaatatcagaacaatcctacgttcaaaaattcttttgtacaaaacaacaataataacatgcgagtatataatccggagactttttttcttctcatttaggaaacaacgagattcatttaccatgatcttctgttttttaacaggtattgaaacataactggtcaaagtggttacctggtaggtatttcttttgtgaccacaggagtatatgttatttctctttcagctgcaagtctctgagctttctgaaactctttgagaactgattggaaatcttttgccagtttagcatcagctatcttcttaatttgctgcaagaatacaaacataacatcaaaactagaatacacatatcatcaatcatgtaaacaattctcccactaaatgaataaaatggtacgattctgacaaaattaaaccaaaataaaactggttcaatagaaaatgttctcttagacactaacattccatagcatcgtaagggaatgaaacaaaaaagtaagcatttgcttacactagctgatccatgaaggtcggcttcgctagcttccttaagtttagctgaagtattcttcaccaattcggatatctgtaaccttgtcttttgcctgccaacaaaagaacctaacactttaaaacaattcacagaacaaatagatgaaaccaatctaaaaaaaaaacaatttctcaatacacacacacacacacacacacacaaaaagctcattatttgcaatgttgtcaggcattatttgcaatgttgtctcacatcgatcagcaaactcaaatttgttcttcggttaagggaaaataatgcaggattagcttcaaaacaattagaaaactttttcaattaaaaattgaaatgaaatcgaccaaaatcaataagtaaaaccaaaaccctaatcaacagagatttaacaaagagaagaagagtgtgattaagaattgctactgacagcttatctcgtaattcaagagtatctttaggtgttccgatcgaattaacgaggcggaagaaggaattgacagccgtgctgatcctgaaaatcccggcggcgacctcctgagatggatccccacgagacgaaggtctctgttgtctcccaccggtaaaacgattcggcgccggagatcgagtaccagcttcgagatcttggaaactcatcgtctcttctctcgaatctctcgaaattctcttatctctatctcaggggaacaaacgaagacgaagatgatggaaatgagttaggtgaattataagttttcccaaaatttaatgttaatttttgttttataatttgtataaatcatttaatctcatgtggtccgcgtgaatatggtggtggagggaatttattaatacgtataaattatttggcggtgacacgccattgcgagggaagaatcctgcgtgtcgttgttgacctcacctgcccttccgtgtaaaattgaaactcggttcgagtaaaccggaccaattgagtgggtttgcaggataaggattggttaaatgattttgggctacattggagtttagtaaaaggaaaagagaagagttgggccaaaaacaaggagaagtccaacttttttgtaattaccaagttatcatattttatgactgaattaataattacagtaatcactttgatacataaaccactttttatagaaaaacaatgatatatttttgttgataaaaagtaaaatttttatgtatttttttctaataaaacataaacttaataattgtgttacgaaactcctaacttttgttttgaactgaagagggaaaaaatagaaatatatactaaaaaagtgaaaatattaattgttggaaacaattagggactaaaataggattaaagggcgtaacgcaaacccacacgttgagtgtgaggtgtcatataaagcaaaatacactcttccctctctatctatctacgcatcatcgatctcgaagtacgtttcggttttcaggccaatctctgaatctgcgtgacaaaagcaacaaattacatatctctctctctgcgcgacttcgaagatcaacatccatggcggtatgctctactttttttttgtgtataattttgttttatgcggaaaaggtttaggtttcctctgctggtagatattgttgcgatccatttgtttatcgggaaattttctcaggattgatatttttggctattgatttgatttcttcttcaatttggatgatctgttgtttgattgctgcacttgccgacataatatctccaatgctatttggacgagtttgatgattattattgtcgttattaattgattctgtatctctgtgtgatctgtattcgtgcaattatctctattatctccttgatttctcggttttggttttcgtttatcgtagtaaatcgcgattgtgttattctcaatttggaaccgaatctcgctagccaatttacttttagattcctccatacattgtcgattagtttccttaattggtagccttcatggttcattcgagttttctttttgtatagtgagatgatgacagtcatcttctaagccactataatattatccctttacttgcataattgtataatcttgtgataaatctaggcttctttgagtttgagctgatttgattaaaatgggactttcggtcgattagatatgcttggatacaaaaagtagttgtactgtaaacattctcatgaaacacctgtttattgttttcgttaatgattctttcccttttgattctttatgatgacagtcacaggtaaggtcagtaaaagttggcaatctctcttcaggagcaactgagcatgatattaaagagtttttctctttctctggtgaagttgaaagcatcgatatccaaaggttagtgatattgtttccttgttctttgatttcaaaattttgacatttaaagctttttttgatcaattaacttccgaagctttttctcagcaaatttagatacagttctcttaaacttactgactctgagctttgtttttgttttctttttctaactagcagtaacgagcatagtgcttatgtcacatttaaagaaactcaaggagcagagactgctgtgctcttatctgtgggttcactcttatctcaatattattgtagtagcattcaactcttacataacactgttaatttagtaatcaatccatgtctataaaccttcgtttaatatggttatacttctctagtccagacaaagtatctctgagtatttataagtaaaattagtttgcttacaactaatatttgggaccatttgcaatttgcattactaacaaggggtgttatttcagggagcgagtattgccgatcaatcagtcatcattgagttggctcccaactacagtccaccagcagcccctcatgctgtaatgtcttcttcatactgtttttcttctttttgattagtgaaaagtattcatctcaacactcaatagagcagtaatttcgtagaggtgttaatttgtgttaattttctcaggaaacacagagcagcggtgcagaatctgttgtccagaaggcagaagatgttgtgagcagcatgttagcaaagggtttcattcttgggaaagatgctgtcggcaaagcaaaagcttttgatgagaaacatggtttcacctcaaccgccaccgcaggagttgcttcactagaccaaaaaatcggtcttagccagaaacttacagctggaacaagcttggtgaacgaaaaaatcaaggcggtggaccaaaactttcaggtaacagagaggaccaagtctgtgtatgcagctgcggagcagactgtgagcagtgcaggaagcgctgtgatgaagaaccgttacgtgttaactggtgtgagctgggccgcaggagcattcaatagagtggctcaagcagctggagaggttggacagaaaacaaaagagaaggttgaagctgagcaaccatcgcaaccagcacagtcgcagcagcaactgccagaagggtattctccgattcattcgtccgaatactcgaagaactaatatcatcaagttaaacagtttcctttgtttctccttgttggtttctttgacatggaagttggaaatctggtttggtctttgggatgtaccatataagctatgcctggattttccctaccactattagactatagtttgggttttttccaatatacatatttaataagttgacatttaaatctttctttaccctaaatgttacaaatccattttgttcctagattatcaaaatgactgaaatagaaatttaaaggatctacctaagtttcgatgataaaatctagttaagatcagtttcaataattcaacttccacagcgaagaagagtttgaccggtctgttgcatacctcaattccgacgatagctgctgagaaagagagtgtttagaaagtgcagattttaaatagatcaagagcattcgatatctcgagtttttcttcttcagaacttgaatataagcgtctaagccaagccatatcacttcttctttgtatagtttaagaactggtctgaaactagaaccagtgttgattctgcgcacccttctatttatgagtctgaacatgtacctatcagttggaaagaaatcaagaaccgaataagcaaaaaaagaccgaataactcaaatcagaatgatccaaaaaccgaaatgctcacagacatatgatgtagttttgattccatacctgacagatattgtgatgaatttgaacaaagtttgaggatgaagcttccaaaaccgggacacctcgtagacataacagtgaaacttcattgcagccaacagaaagatctgatagatgtttaacctgacgatttctcccgagttgatgttcgagtcaaatagaattggatgacatttcggaaccaagaagtaacacaatttttgccgaagatttctaactggtttgttctgccaagctacagaaaaagttgagcttatatggccactcaagtacctgtttccatgaatttgaggcaaaattataaataaaagctgaggaaacagagccaaacaagtatacttatgaaggaaacatacaggagatgaggcagaccttgtgtagtcaacttgaacttcaaatgtgcgggaattaataagcaaacccgtccatctgacaaaaggaactccattatctcccacaaacattctattagaagaacacctatgttcttctttatcttcaaaatttatgcagaattttgtttcgttcatgaagcagttgtaatctttaaatccatgcttcaacctgtgatagaagctactcgcctgatctcttgaggtagacacaaaaaggtagtcatcaataaatctcagtaacttatagctcgtgggaattataagctcttcctctctactgcattctttagaagacacatctttagaggcttcttcgaggaatgggtagatcaaagtcctctcgagatgcccgtagtaaaaacaacataacaaggatgataatctgtgtccctgaggtattccagctatttgtacatagaagcttttatccaactgcagcatgttgttctttagcatatttcctatccaaaccattagatcctttttcctcactcgatggttttctccctagaaggttggaccaaaaccataacaccgttaagcaaataagtaaagaacaacagggacgctacaagcactaagaaaagagatctctagagatttttttaagtagtccaatagttttgtattttaccctctgcaaaaagatcaaaaagctctaggtcaaaaagaagcataccttatcaaccacgatactttgcagtgcattatatggaacagttgatgtgaatcttgaaaagttagaatttttgtcactcgagactagtattttgtttacccaattggatctcttcccacagcagaccagcctacatctgtttaagatgtattcatctttcagaaaactttgaatgacatgaagcagcttaccctggtcgactgaatcaaatgctttgaatacatccgcaaccacaaagtacaaaggaggaagttctccagattgacttcttaaatggatcagatatgggcataggtttctgtagaaatcatcatggtcaaagacagaagacccaagaacatctggttctttgagctggatgtccttcaaaacagcatgtgtatcacgaagagattgcgaccttgacgaagaactaaagtctaacaccatcctcacaccattggcctttggtaaaaatctaaactttgatagcttcttcctgctactttcagcttcagcatcgtctactaggacatatccatcaagggctttgctaatttctttgcttattaatctttcccagctccttttccggtaataataaatatttagccgtcctccttggctttcagtggcatagaagttgaagtgcaccaatttcttgacaatctctaaaaaaagccaagaaatccatttcgtgcacaacatctgctgtgtacttctgatggattcactttggagttcatgtccgttgaccatacagcataactcttttctagcaaagaatgggaaatctgatggtttcactttatgcaaaaactgattcactgtgcatttctcatttcgtcgccttgaaacaaaccacgctatatttttcctaagcaccctcatctgatgagtggtcccaagcaaactttctggaacaatgtacctacagatggcccaaataaaggaaactacttggtcgttcgtgcaatacagcttcctttcttcaacactgggacatttgggttttcccgtttgtgatgaacttgatccatgaggcagcttatctgctttttgcctccttgaactctgtaatacaagatatgcaaggttcgtcacttcaaggaagcacttggaagtgccacggatatgaattcttatgcaggtttgcactatatatccaaagtctataaagtagcaactgtgttgattttccatttctagtttctttttgttgtacatattcgaatattcaacataacttctctgaaatagaaatactcaaaagacatcaaacgaaaaacgctagggaaattaaatatgaaaaccatctctaaaagaaaaatatcaacctgagaagtcgttccggacttcaatgcatcctcttgcagcaagagaacaggacagtgtttgtctagtagcatttttaaatgtgaagactttgtttttcctattagatttttaagagacttgagcaatgaatggtatctgcaaatcaatgtaaaagacatcatgatatcattttcttctttgcatcagttacctcaacaaaacttttaaacaaattccttttataactcagactacttagatatgtgctctacattatctgaatacatgctccaagtctcagagtaagccgaagaacttacaagaataaatggatgacttacaagcaaatagatccactggggcaattgcctttgccatgagatggcgtcgttgaccaaacatttacttcaccaaatatatggttcattaggagctttgaatcagagcagttgggcctcaaggtttttaaaatgtctgtatatcataaggaatcattcacaatgcagaagaactgtatagagaagagtaacgtttaaacttccatcaagctatcgttgctacaagtcattgaacatgtcaaaaccactgaaggatacggtttggtggtataactgaatacgtttctgagaggccaaacttgaaattcttgtttcttttaacctgtttagcctacaaaaaacagtgattaaatcttacaaatacaagaacagattgtcgaatttgaaggtaatgaagtgtcaggaagaatattaataaccaccagaatacaacaagataaatgatacagtttttaaaatacaccaaagtacaactacaaaaatagtcccatcaatttctcaaggctgaggataaatcaagagcaatttatacacgtctcttagtaattttaagcaataactttatgtttaaacttgtgcattttcaacttaaacttgattgatcaatatcattgttacgaacattacctgctttacaaaatcagtgagacttccatttataccaatgtgcagattcatttcgtcattaccagttgagactttaccatttgtactgggagttatacaaggagcattacagtcaacttttttgaaattgacctttctctgctttcgccgacgcttaagatatattcttgaacgcttagtagtttttttctctctatgttggtctacatcctcgccaactatgggcgtaatagttgcagagtcatccttaggacagtcatcgacagctgaagaaagccactgccttttcgttggtggctgaacgttgtcatccctctttcttttgttttcatggactgacaatgtccctataccatggagaaggaaaactttactaagttaatatgaactaaaaaccagaagttgataatcgataaccaagcagtcacagacaaatcataagtattcagagaaccaacaagaaagtggaagtttcaaaagaaagccaacagaagagctcggatacaagtttaattctgagactcacgcttatgcttgatacatagaggaggtccagacacttgctggtgttttttccctagtaatggtaagaatattgatgtttgctgtagaagataaaccatgacgtcatgaccgacctataaacaagggaacttgaatattagtgaccgcaaactcgaatattgaaagtaaatcatcaaaagggtttgagaacaaacccgcttgagaagaaactcccaagatgaacttgtcaatagctccaaaatagggctcgactgatcatactgtcaaaggagacgagaaatcattaggctaagaaaatcagcactctacattgagtttgagaaggaagaagaagaattcaccttatcatatctggcacatatcacattttggcaatcacatccagattgcatcatttcaataatcctttcaacaatctgataaactcaattgaagcaaaatgtttagaaatcagcaacatcatacaaaataagataacatagaggcattttataaggagtagccacgtcttgaaatatctcaaattaagcactcaaagcaatgtatagtacagtgggaagaagaatcttacctctctctgtgaccaccaagatgttggagagaaatccagaagcggaggggtttgttcgtgaagtacaacgaagcaacggtgaagaagtttacggtagtgaatgggatcatcggaacgcagcagaaacgccggtttatcgctgctgcaaccgagacaaccttgaccccggcatcggcattgctccggctggatattccggttaggaatcagatctactattgcgtcgtttaaattcctggctctgtttccgaataacctccatagaatctccggtacacgatgtctaggtttacgcggcattacaccttcctcctcctttctctcgaatttggagagagagaagagtgaacgagcttcgataatggagtctgatggtgtgaaagaggcgggagattaaaggtcttctgggttctcgaaactataaactgcgattttgaaaatttcaaaacaattcaaagctgagctacaaacgctatccaaagcgtccactcaaccgcaaacgcaggtcgcttagcacataaaccgaaccgaaattcgctttaaattttaatcggtctattatactttcttcttcttttcacatccggtttcattactttcttcaaatttccaatctaaaaccgggatataaccgaattgatttgtttagtttaaacgcagaaatcacccgccactctagttacagtagtatgatccgccgccttctcatccccaacgccgccgcaaaatctcaccagtacattaaagtctctctcttctcga

SEQ ID NO: 1440 - DNA, 98101 bp, Arabidopsis thaliana
gaattcaccttatcatatctggcacatatcacattttggcaatcacatccagattgcatcatttcaataatcctttcaacaatctgataaactcaattgaagcaaaatgtttagaaatcagcaacatcatacaaaataagataacatagaggcattttataaggagtagccacgtcttgaaatatctcaaattaagcactcaaagcaatgtatagtacagtgggaagaagaatcttacctctctctgtgaccaccaagatgttggagagaaatccagaagcggaggggtttgttcgtgaagtacaacgaagcaacggtgaagaagtttacggtagtgaatgggatcatcggaacgcagcagaaacgccggtttatcgctgctgcaaccgagacaaccttgaccccggcatcggcattgctccggctggatattccggttaggaatcagatctactattgcgtcgtttaaattcctggctctgtttccgaataacctccatagaatctccggtacacgatgtctaggtttacgcggcattacaccttcctcctcctttctctcgaatttggagagagagaagagtgaacgagcttcgataatggagtctgatggtgtgaaagaggcgggagattaaaggtcttctgggttctcgaaactataaactgcgattttgaaaatttcaaaacaattcaaagctgagctacaaacgctatccaaagcgtccactcaaccgcaaacgcaggtcgcttagcacataaaccgaaccgaaattcgctttaaattttaatcggtctattatactttcttcttcttttcacatccggtttcattactttcttcaaatttccaatctaaaaccgggatataaccgaattgatttgtttagtttaaacgcagaaatcacccgccactctagttacagtagtatgatccgccgccttctcatccccaacgccgccgcaaaatctcaccagtacattaaagtctctctcttctcgacatcggcgccggagataacaccgccgtttattcacaaatgcaaaaccatctctcaggtcaagcttattcaccagaaactcctctctttcggaatcctaaccttgaatctcacttcccacctcatttccacctatatctccgtcggttgcttatctcatgccgtatctctcctccgtcgttttcctccatctgacgctggtgtctaccattggaattcactcattcgcagctacggcgacaatggctgcgccaataaatgtctctatttgttcggccttatgcattctctgtcatggacgccggataattacacattccccttcgtcttcaaggcttgcggcgagatatcctccgttcgttgtggagaatctgctcacgcgctttctctggtaactggatttatctccaatgtctttgttgggaatgcgcttgttgctatgtattcccgttgtcgttcattgagtgatgcacggaaggtgttcgacgaaatgtctgtttgggatgttgtatcgtggaactctataatagaaagttatgcaaagttaggcaaacctaaggtggcgcttgaaatgtttagcaggatgaccaatgaattcggatgtagacctgataatattacccttgtgaatgttcttcctccttgtgcttccctaggaactcattcactagggaagcaattgcattgttttgcagtcacaagtgagatgatacagaatatgtttgtagggaattgcttggtggatatgtatgcaaagtgtgggatgatggatgaggcaaacacggtgttttcgaacatgtcagtgaaggacgtagtatcttggaatgctatggttgctgggtattcacagattggaaggtttgaagatgctgttaggttatttgagaagatgcaggaagagaaaataaaaatggatgttgttacttggagtgctgctatttcagggtatgctcaacggggacttggatatgaagctttgggtgtgtgtaggcagatgttgtcttctgggataaaaccaaatgaagtcacgcttatttcggttctttcgggttgtgcttctgttggagcattgatgcatggtaaagagattcattgttatgccatcaaatatcccatagacttgcgtaagaacggtcatggtgatgagaatatggtaatcaatcaactgattgacatgtacgctaagtgcaaaaaggttgatactgcacgtgctatgtttgattcactttcccccaaggaaagggatgttgtgacttggactgtgatgataggtggatactcccagcacggggatgcaaataaagctctcgaacttttatctgagatgtttgaggaagattgccaaacaagaccaaatgcttttaccatatcatgtgccctcgtggcatgtgccagtttggctgcactaagaattggcaagcagattcatgcttatgcgttgcgcaaccagcagaatgcagtaccgctgttcgtatcaaactgtctaatagacatgtatgcaaaatgtggaagcatcagtgatgcccgccttgtatttgacaatatgatggcgaaaaatgaagttacttggacatctctaatgacgggttatggtatgcatggttatggagaagaagctcttggaatctttgatgaaatgaggagaataggttttaagcttgatggtgttacattacttgttgtattatatgcttgtagtcattcaggaatgattgatcagggcatggagtatttcaatagaatgaaaactgtttttggggttagtcctggtccggagcattatgcatgtttggttgacttgttaggtcgtgctggccggttgaatgcagctttgcgtctcattgaagaaatgccaatggagcctcctcctgtggtatgggttgcttttctcagttgctgcagaatccacggaaaagttgaactcggggagtacgctgcggaaaaaataacagaattagcatctaatcatgatggatcatatacattactctcaaatttgtatgcaaatgcagggcgttggaaagatgtgactaggatcagatcattgatgagacataaaggagttaagaaaagacctggttgtagttgggttgaaggaattaaaggaactactacgttcttcgtgggtgataaaactcatccacacgctaaggaaatataccaggtcctcttagatcacatgcaacgcatcaaggacattggttatgttcctgaaacaggctttgctcttcatgatgtagacgatgaagagaaagatgatcttcttttcgagcatagtgagaagttagctcttgcatatggtattctaacaactccgcaaggtgctgctatcaggattactaagaatttacgggtatgtggtgattgccatacagcattcacatacatgtccagaatcattgatcatgatattatattgagggactcaagtcgcttccatcatttcaaaaatggatcgtgttcatgcaaaggttactggtgatgatgctctctctatgcactctaccaaacacggaagcaacctgagggttttgacatggctacagcagatttcaggaacgatctaaagggacaaagaaagggataataagcactgtgttaaacacctcatgtagattatataatttaagcaaattttgtagatgaatagctttcttctttatttttggtagataatcacactccataccatgggtttatcttcaataaacaagatctgttgttacatttgaaatgttcatatagccaacactcccatgaactggcattagaacaagccattttctcaatgtgccaaaaaaggctcgagcttttgatacttctaatacaaatccagcaaaaaaagatgatatcaccattggtagagggaaatgctacatgcccatgaaaaatggggaaaatgttttaaaatgaatatttcgtcatcatcaggaacgagtatacgtaacaactacagatttctcacaggtaacctcgggcgaacagagaaggtggagttcatgtctctcctttctgcttggtccatctgagagatcaggttgaagaaatgtcatatcgaaattcgaatctgctaaagaagctttagtccacctgttacttcatcaacaacttcgactggtcctgcagaagtaaaatctataagcgttggaatgttgtgttaagaaatgctgataatatccgataaacaaattctgctacaagaatctctaactcctggtcatagaacggtgcatatgaatttggataccacgcagaaagtatacaccctcttctgaccgagtcaacttttgagcttacatttcatattttggattcttatgaactatagattccattcagggtcaaggacaagcaccaagcaatcaagagaagtcatgaactaataaactagtacatttctctagggtaagtgtgatttgcaactctcaaactcatcacttgtccatcagagtcttaactttcaaacacatatcttaaaaataacaacttaccaagaatagccataaccgtccttgaatctggaaagaacatgacgtattattagattcacattttcgcagaaaatgatacttacgaaagaagattgaatcaagagagctttctccctggcaattaactagcaatcataaagtttaaagcaccaagggatttcaagttcaagaggggaggaacttatgaaactcacttggggcaatctgtgttcttccagcatcaatggtgatatgggtaggcagtttaagggatttagctctttcctgacaattttgtgaacagtcaatacaagatataagaaatgggaaaaatcaagataagctctatgatatctcaaattccccttaagtattcatgtatatggtcagaactcagaaattatcaagaaactaacatctggcaactcctgcaaagcccgtgaagatcaatttggcaacagcactaaagctgtgaatccaaaatatagttcaataaaaaaaatccactttacagtctactacaatttgttttagtaaactcacttgcaattctagcatctcgtcctcgtcctcgattttcacaacaacttttggctgtgcacattcctcccagctgcaatagcaacctatactgttaattcaatccatatattaagtaacaaatggaattgatcatgacttagaggcataccagtccaatgcttttggcgctcgacgaacaagcttcttgtataatcctaaagttgcatgactgcagaaatgcagaccaataaaacgaatcagaataagaacactcaaatgtaagaatgataaacatgaattaaacacttaaaatagtaaaagagagcatgattagtttatcacctgcattgagctgcaatctttcctttacccattttaagatcatttctcaccaccaaaacctgagtatacaaaactcaattcaacaattttgtgattccataacagtagagagaaaaatgtagctaactaccatcttgaaatcatcgagaatatcagcgagtttctcaatctcgagtggacttttggaggattgagttttgatatccttatcaacagcagcaacaacaggtttggaacggcgagtgccaatgcagtatccaagtgcagctccaacaattagggcacttaaccacgtcaaatccattggcaagattcaaatacttaaatcctacagacaacaaaatgattgaatttgagtatctaaaattgaattacctcaacgtaatctagctcaagtttctacagtagaaagggaacaattaagattctcatcaatggtctaaagaagagaatcgaagaaagcttacgagttcgagagagagaaacggctccgatgatgaagttttttttcctgaaaccggcgtgaagattttactggcaagaaaaaaaaaaaaaaacatttaatgatcgattattttttggttcgttggatgaaattgcgtaacgtgattggttgatatgaaaaaaataaaaataaaaaagcatatctttttgaaaataatgtttagcgtaaaggaagggaaacatagtcaggataaagtaattcccacgaccaaacacttaaaaaaggaacgcagttttcttcttcttcaggatttgtacggcgtcaacgggcattgaccttgtcgcagattttcctctctagtctccgtcttctattaccagatcgagctttgttcttcgagcttctcatctctttgttcaatctcaaaggtagaaattcgcgttaatttacttgtgatttcgctgttttttggttactgtttccgtgttgatcgatctagttctgggtttttcgatcatatgaaatgttattttccttattagggtttttgttgaccaaaacgaatttttctattttctttcgaattttgatcttcgaatatcgaattcggtttttctcagcaaaccctaattacattcatccgtaaaaaactgtttaatttctggttaaaccagtttccttgagcaaattttgttggatcgagaagaatatttgtatgatcgaagagatcgtatctgaaaacctggtttaaccgggtttgaacctttttgtgtatttgattttgtatgaatctctgcagaattcgtaggtgtatattattgattgttagtatttcctttcgtgctcgttattgtttagtatcattgaaggatacttgaacaagttgatgtttcagctgctttctggtttgttctgtatgtacaattccaggttcttgctgtttttcatttacaggtttttgagtatcagcaaagatgggtgacaatcttatggacaaagttaccgcatttggtgagcgcctgaagatcggaggttcggaagtgagcaacaagatcagtgctggtgtgagctcaatgagctttaaagtgaaggaactttttcaaggtccaaacccaactgataaaatagtcgaagatgctactactgagaatctagaggaacctgactgggatatgaatttggaaatttgtgatatgataaatcaagagacaattaatagcgttgagttgatccgtggtataaagaagaggattatgatgaagcagccgaggattcagtaccttgccttggttttgctcgagacgtgtgttaagaactgtgagaaggcgttttcagaggtggcagcagagagagtccttgatgaaatggtaaagctgattgatgatccacaaacagttgttaataaccgaaacaaagctttgatgctgattgaagcttggggagaatcaaccagtgaacttcgctacctaccagttttcgaagaaacttataaggtaactatgacctggtaccaaataattttacgctattaaattcaacaatacagtttcatttacaatactttattgaagataccactatcttatgttgagttgaactgttttggccaaagcatatgggttttgaacaaaacagacaaatgactattgtttcaatgaattggctcaatcgactagcttgttgcaggaattgattgaaaaatgaaaagctgtgaggtctgatgtcagaattcattatgattaggtctttaatgtttttatattttttcctatactatagagcttaaaagcaagaggtattcgcttccctggacgagacaacgaaagcttggcacctattttcactcctgctcggtcaactccagcaccagaactgaatgctgatcttcctcagcatgtgcatgaacctgcacatatccagtatgatgtgcctgtaagaagctttactgctgagcagacaaaggaagcttttgatatagcaagaaacagcattgaacttctttccacggttctgtcctcctcgcctcaacatgatgctttacaggtaaattgactcggaattattaggcatcatttcctgtaattctaatgtaataatggatataacatgggatatcggcgatatattttcattatctctctgatttgcaggatgacttaacaacgacacttgtacaacaatgtcgtcaatctcaaaccactgtccaaagaatcattgaaacagcaggtgaaaacgaagcccttcttttcgaagccttgaatgtgaacgacgagctagtgaaaacgctgtctaagtatgaggagatgaacaaaccctctgcaccgctaacctcacatgaaccagccatgattcccgttgctgaagagcccgatgactctccaattcatggaagagaagaatctctggttagaaaatcttctggtgttcgaggtggattccatggagggggtggtagtggagatgacatgatggatgatcttgatgagatgatattcggtaagaaaaacggctgtgattcttcgactaatccagatcatgacccaaaaaaggagcagtcctcatccaaaaacgacgatctcattcgattctgagacggatactttcaggcgacataataaatcttttataatgtatttggtgtttaattggtagtatgaatgaacaggttcaatgtaagtaatctgtgtttggagatctctttgacttgtgtgatggtttataaaggagatttgttatgatggcacatgagatttgaaatacattctattctagtttctgctatcaaacacattttgacatctatccaattgctatcgtgcacatttgaacacaaactttgtttcaatttagcgtttacagtcgcagacgcaatcgcggttaagtgaagcgcatcgtcactttccacattcatagtaatatgcaacaactgagtaacagaaatttgtaatcgaactcagatttcgaagaagcagatctcacaatgtctggaaaacagcaaaatcatcgttctacttcctccagacccagatccaaaaccctaatcctcatcggctctctcttcaccgtctctctactcgtcatcctctacacctcttcttcctcctcccgagcctccatctccaatcccaacccgtcggaccgaccagagacgtccttcgttacctcgcttgagcatttcttaatatataaagctccgaagctctcgttaccggttagagacgacacggtgcgtggcgagagtgatgatgatgtgaggaagctcgatgagatggtgttcgagagagagaatcgttggttgaacgaagatccgggatatcctgttgaatttccgattaaggtttacgtgtatgagatgccgaagaagtttactttcgatcttctctggttatttcacaatacttacaaagagacttcgaatgctacctctaatggtagccctgtgcatcgtctaatcgaacaggtactataagaagcttaattgatcattttggttggttgttagatttcttgtgccattggtaattttggttggacgattgaattgaattgaagccaattcaaccgagaatcgtgattaggtttgtggttttgttcaattgtttgttcttcacttgtgtagcctgaataaacttgtctatttttttttctatattgcagcattctattgactattggctttgggctgatctgatatctcctgaatctgaaaggcgtttgaaaagtgtcgtgagagttcagaagcagcaggacgccgactttttctatgttccgtttttcactacaatcagctttttcttgttggagaagcagcaatgcaaagcactctatagggtgtgagtgagctttgattatatatttgtagcattagatttaattttcagttttagatagttttcatctccatgtcctttatttgaaaagtacaagctgatttaaaacttcgtgtttaagaatgtttgaagttatatcctgaaagatcctgtttgtagattttaccacatctcaggagctcagagcatctgaatggtctattgcatgtgatttcttaaaactgttctatatttgttcttagttgattcaggttaagcctgcctcaatgggagatgtattagttgaaaaacatgagatgccagattttactggtaatatattttttaactctttttaaactgtaggaagctttgaagtgggtcactgatcagcctgcttggaagaggtccgagggaagggatcacatatttcctattcatcatccttggtccttcaagtctgtccgcaaatttgtgaaaaacgcaatctggcttttaccagatatggactccactggcaattggtgagtttagatttctttctataactgatttcaagtcatgtaatctgctctcttagctatacgttttttattctgtttgaacttgacctcgtaggtataagcctgggcaagtttcattggagaaagacctaattcttccttatgttcccaatgttgatatctgtgataccaaatgcttgtcagaaagtgcaccaatgagaaccacattactttttttccgagggcggcttaagcgaaatgcagtgagagtcatgccccttctaatttatcattttacaagttacatcaaatgctcttgccttttcttgtgtcggtggcttttaggatttcccataatagttggtatactttgtttgttatataaaaataattggaatacctcattatactgggaaagctctcagtcgacctttgccttttcttataattttgtgtctcatgatttggttgctgaatttgtattaggggggtaaaatacgtgccaaacttggtgcagaattaagtggtatcaaggatataataatttctgaggggactgccggagagggaggaaaattggcagcgcaacgtggcatgcgtaggtatattgggtggctccttgacccatttggttgcagcacatttagtttttctttcaactttctctaactatttctgcctttctatcagatctttattctgtttgtgtcctgctggtgacacaccatcttcagcgaggttgtttgatgccattgtcagtggctgtatacctgttatagtcagtgacgagttggaatttccttttgaaggaatacttgattacaagaaggtatgctagaaaacgtattacattggtgctctgaattataaccattttttgtctgaattagtttagatatgaagcaaagtttgtatgactgttcgctctcttttcttttgcttttgtttacctttcaggttgctgtgcttgtttcttccagtgatgcaatacagccagggtggcttgtaaaccatctgagaagtcttacgcccttccaagtcaaggggttgcagaataatcttgctcaagtaagtacttagttttccttatcactaactttgatgttacaaaatgcatagttcgccttacacgaaagggcatagcaaccttacttgggcagtggatctttatatatattaagtaatatggttgttttaaacttttccagtactctcgccatttcctatattcgagccctgctcagccattaggtccagaggacttgacatggagaatggtatgtacctacaaaacttacatacctttctataactaagatggaaaagaaatcaaaagcttaataatatctgacagaatgtacatgtggtaacttaattttgatattgtgaaaaaaaacagagtataaaaacttcaccttttgtgttgtacaatggcaaggtctcttccttaattatcctgattgttcagcaccatgtgtgttcggcttatccattaatcgtctaattaagtatttgccttgatctttgatcagtcagtgagaagaacttactgcaatgtcgaaatctaagattcagaaaatcttgatgtgtttgttgcgttgacagatagccggaaagctggtgaatatcaagcttcacacgaggaggtcacagcgggtcgtgaaaggatctaggagtatttgcagatgcgattgctggagatccaactctacagcctccaattctttgagttctctcttgtcttaagaccgatcactctgacttcacattccagtcttgaataccctagatatatactgtggaatgtgtatcctattcaattttaacattgtttgctattttatataatgtaattcctgttcatcttcgcaacttggctacttttagctacgtggaaatattatgaaactaacattttatacaattgtgtatgtcctcttcacgtcatttaaaggtctctcattgtctgcttgttattttattcccttgcgacgttttaagtattagcagatgatatagacatgggtgaatttttcaccaccagcctgtagaaattatctacaaacattaaagtttttcaagttgagttagaaaatattttgagctacttttatttatgtattttgattcagatatctttggtggcacttttaattgttgacctcacaaaactgttttttattagtctccatcagaggagttgatcataggcacttcttcatataccagaacactggcggttctttgaggtagcagaaatggaggatcgtcatcgttatctttttttcatatttgccattatacattatgttcaggctcaacaaggtaaccacattttattgcattgttgcacacgtcttttgtctgtttactgattaacctaaagcaatatttcgtggatgaaagtcaatcattcataactatatttcctctcaccaggattcatcagtttggattgcgggttgccgagtaacgagcctccatatattgaaccggtaaccggattagtattctcatcggatgcggatcacatccctagtggaataagcggtagaatccagaagaatctggaagcagtacacataaagccgtatttgtttctgagatactttccagatgggctacgaaattgctatactctagatgtccttcagaaccgaagatacatgatcaaagctgtgtttgtgtatggaaattacgatggttataatgattatccgagttttgatctgtatctaggtcctaataagtgggtaagagttgacttggaaggaaaggtcaatggcagtgttgaagagattattcacataccaagttcaaactctctgcagatttgtcttgtcaagacaggtaattctttgccgttcatatccgccctggaactgaggcttttgagaaacgatacttatgttgtccaagacgtttccttgaagcatttatttcggaggtactatagacagtcagatcggttaatccggtaagtgttgcactatatcataatctgtaatttgatgttgatatacaaaatttccctaaacttagcaatatatagatgcatgaagacaatacaagaaaccttcaaatgtctgaccaacatcaggaagtttcctattaatgctcttaccaatgaactttgacttatataatagacgtattgaaattgtttttaatgatcgtaatgtctttcatagaccagttgtttgtgaactggtgaattagtgatgcatggtttatcaatccatgtagatgtgttttctgatgtccgcaggtatcctgacgatgtctatgatcgtgtttggtccccattcttcttaccggaatggacgcagataactaccagtttagatgtgaataactctaacaactacgagccaccaaaagcagcattaacatcagctgccacacctggagacaatggaacgcgattgaccattatttggactttggataaccctgatgagcaaattcacctgtatgttcactttgccgagcttgaacctgttggggaaaacactgacgaggccttgagaactttatttacaaggaccttttactttgtggtgaatggaaagattagttatgatgagagtattactcctttagacttggctgtaagtactgtagagactgtggtgaacaaatgcgatggcggtaactgcagtttgcagctggtacgcagcgaagcgtctccgggagtacgtgtacctctggttaatgctatggaggcattcactgcaatcaagtttccacattctgaaacaaatcctgatgatggtacgtacgtatatatctcaactacttttactaaaattttgggatatatgcctcaaactattatatggaatgctattccattagctcgaccagttttctgtagtatcatattaattttctacagatggtaaagcaagttaatgtgaaccaaattattgcactttatctaacagtagtccacatacgagacatgagtgatgatgatgaggttatgtaaattagttcatgcgagaattaatcaagaggaatcatcatagtatcaaccacaagaaataatttgttttgaacatattacctaattcttgtttttaatatgttttaagtatggtatatctttaactctatgacagttatatctatcaaggttatccaagctacctatgaactgagcagagtcgactggcaaggagatccgtgtcttccccagcagtttttgtggactggcctaaactgcagctacatgaacatgtctacgtcaccaagaatcatttccttgtaagcacttaaaagtgtgatattgttgttataaattagttacgtttctagatttcttactgctaaaatgtgttatgtgaccagagacctgtcctcacataaattaactgggaaaatagtgccagatatacaaaatctgacccagctacagaaactgtaagtatggcctctaataactgcgctgtttgagcatcaataggtttttcaagtttagtatggtttttgtacttctattgactatatataccaagaattttggatgtttatttttaatttctagtatcatttcctgcacatgtggctgcacatctgcattaccaatataaaatcagtcgctgttttttcaacaaactatttctatgtaaccttgtttctgcatcctcacacatgaatgactatgattaggcagatttcaatttcttcattggatatagagtagtgtgatttgtttttcttttccgtatttaataaacataactgtagggacttgtcgaataacaagttgaccggaggtgtgcctgagtttctagccaacatgaagtcactgttgttcatgtaagtcctcaaacaagtgaacttatctctttctgttttctctaaattctttgcattttcatgagataatagctttttccatgacagaaacctaagcaataacaatcttgttggttccattcctcaagcgcttcttgaccgaaaaaatctgaagttggagtaagatcttcaaacgtaacattctttcaactattacttgtgcccttagatgatttctatttattctgtaggtttgaaggaaatccaaagctttgcgccacaggtccgtgtaacagttcaagtggaaataaagaaaccacagtcatagcacctgttgctgctgcaatagccatttttatagctgttttggttctcattattgttttcataaagaaaaggccatcaagtataagaggtaatgttaataaagaaaatatgttacattataagaaaacaggaataaaagctactagaagttatttagctatatattttacttgatgtttttatgcagctctacatccgtcacgggctaatttatctctggaaaataaaaaacgaaggatcacatattcagagatattgttgatgacaaataactttgaaagagttattggtgaaggagggtttggggtcgtctatcatggttatttgaatgatagtgagcaagtggctgttaaagtgctctctccgtcctcatctcaaggctataaagaattcaaagcagaggtgattttactacaaactttgaacatggaattgactacaaaggtattatggcttctccttgagattcaaataatcattgatgaatggatttccttatggttgataggttgaacttctccttagagttcaccacataaatttggtaagccttgttggatattgtgatgaacaagcacacttagccctcatctacgagtacatggctaatggagacttaaaatcgcatctttcaggtagacatgaataatatggtttggtggttttgacaggtaattatacagtaacatcttatcttcattagacatgtatctcctggttattacaggaaaacatggggactgtgttttaaaatgggaaaacagattaagcatagctgttgaaaccgcactaggttagtgttatttcgtccattccataactaatctgttttcaatactaaaaagcctctcaagaagttgattttgtccaattttatcccccttgtaaattcccctcctacaaacttatgatgatacgttaaacataaatgaaactttcaatataggattggagtacttgcatagtggatgcaaaccactaatggttcacagagatgtcaaaagcatgaatatactgttggatgagcacttccaagctaaactagcggatttcggactgtctagatctttttctgttggagaggaaagccatgtgtcgactggtgttgtaggcactcctggatacttagatcctgagtaagcatcaatatagaacagggtgcattccaaatataatttccgagtggttaaagaaacatgatttgttatgtattgtctgtgtaggtattacagaacatatcgcttgaccgaaaagagtgatgtctatagttttgggatcgtgttattggagataatcacaaatcaacccgtacttgagcaagctaacgaaaatcgacacatcgcagaacgtgtaaggactatgcttacaagaagtgatattagcaccattgttgatcctaacctcattggcgagtatgattctggttctgtgcggaaagctcttaaactagcgatgtcgtgtgtggatccatctccggttgcaagaccagacatgtcacatgttgttcaggagcttaaacagtgtatcaaatctgaaaacctgagactgaggacaggattgaaccaagtcatagactcgaaaagttcctaggacgaccaagactagagttttggttcgggaatgactccaaatgcacggtggtgatctctgatctgtgaccaaatgtatttctcgttttgtgtcttgcaaacaaaacataataaatcaaattaagtcaattgatgttttcaaatccgatccgcttgacgtgatccgctgataatattggtctgcgatggggtgtgttgttggttcgttttgtgtaatagcgtggattaatattcactcatcacataaattttcaaaaataacaacaaattaaatactatatgtcagatatttaatattaatgttgacagggacattattacgtgtataatgagaattattcgtggttagtagtagttactcccatagatatgaaatattgacatttttgatcaatgctacgtacacacgtaacacgttatctcattattccaaaaagaaacattttgtattcacaggtgagaaatactcctgcgaccgcgtattcccattccttattttgaaattccccaaagtaccctcatcgtctctttcagtgtgcttacacgttttttgatacccgagattaacgcctccctacgacattcttttttattttcccatattttattctgcaaaataccaaaaacaaaattgctttatactaacatgatatattaatgacattaatctaaacaacgatatattaatgacattaatcacaaccatttcccctttattataagaggatttcgtaatcttacatttcttaatgccattatatttttaacttgcgacttcccgagaaaattcaaattcacttgagttattttcaaaacttggattctacagtatctgtttgctataaacacttgtaaatcactgaactgagatcaaataaattagagatttctttaatcttctatggtaagtaaattttcggtatccctattcaagaaagagaaaaaaaatggaaacaatatttaacgcgttaaaagataaataagaccacaagagttaaaaagagttgttcttactttcttctctaccttgtccgaaaaacctcagtcccccccccaaatcaattaaaacgtttcaagaaaaaaaaaaaaaagtgtactacgtcaacttgttttttccggcggcgttccaccttcgtcttcgctgtctcaccgcgtcataaaattttctaccttagtaaaaatttcgaaatagatcgtagagatcttccttcttgatttgtcgtctcgattctacaaaatttggcaatttctttgttttatatatattttaagatctttgaatatatattttggggataaatcggctaacgtgtattagttagcaggagtgctcaagtatttgctcacgactaagtccttttctcctcttcttcttcctttcactatctcttcttatcaaatgcctcataataatatccagttgggtggcacgacacgaccgcgttgaatacttcagacggatttgttaacaacaaagtctctacttcttcttctgttaattactatataactcaaagatctgagtttcttctctcttcttagcgttcctttcctctgaaggtattgtaagcaatctcgagtttcaaatcttgttttattgttttcttataagttcgtggtgggatcgtctctttttgtctgaaaatgtctaaagcctgtgcttaaagaaagatgtgtgggcttttcgagatattctcggatttgaaagtttgaaactttgaattagtgtattcgtcttgataactttaaaggtggtgcctttttgttgtagtaagcaatgattgttaccttttcttttcatttgtgtgaatgttgatgatgagtttgttgttagatcgatatatatatattgatctgtttctttgttgatgtttttgaatgaatttaagatgtctttgtttcttcttttgctaattttgtctttgacttctttctgcagggatctgccaagttagatcctaactatggcatctaataagcattttgataaaagtcgatcaaatctatcaaacaactctgatattcaggagcctggaaggccacctgctggtcactctgtcaaatttgctcaaagaacttcctcgggtcgctatatcaattactcgagggacgatcttgatagcgagttgggcggtcaagatttcatgagctatacagttcacattcctcccactccagataaccagccaatggacccttccatttctcagaaagttgaggagcaatatgtcgctaactccatgttcactggcggtttcaagagcaacaccagggctcaccttatgcacaaagttattgagacagagcctaaccatccacaaatggctggctctaaaggatcgtcttgcgcgatccctggctgtgatgctaaggttatgagcgatgagagaggtcaagaccttcttccttgtgaatgtgactttaaaatttgtagggattgcttcatagatgctgtcaaaaccggaggtgggatttgccccgggtgtaaagaaccgtacaagaacacgcatttgaccgatcaggttgatgaaaacggtcagcaaaggcctatgctgcctgggggtggcgggtcaaagatggagagaagattgtcgatggtgaagtcaactaataaatcagctttgatgaggagtcagactggagattttgatcacaacaggtggttatttgagacgactggaacttatggttatgggaatgctttttggacaaaggacggggatttcgggagcggtaaggatggagatggagatggtgacggtatgggtatggaggcccaagatttgatgagcagaccgtggagaccgcttactcggaagctgaaaattcctgctggtgttattagtccatacaggtataaaaatagacaagtctattgtttgttgttattgtttaactttacgaaacctaaacatgttaaaagagttcttttttctttctatgcaggcttttgatatttatccgtatagttgttcttgcattgttcttgacttggagggttaaacatcaaaacccagacgctgtatggttatggggaatgtctgtggtttgtgagctatggtttgccttgtcttggcttcttgatcagctccctaagctatgcccgattaatcgtgccaccgatcttcaagtcttgaaggaaaagtttgaaacaccgacagccagcaacccgaccggcaaatccgaccttcctggattcgatgtctttgtctctactgcggatccggagaaagaacctcctctggtcactgctaataccattttatctattcttgctgcggaatatcctgttgagaagctttcttgctatgtatctgatgatggaggggcgcttcttacgtttgaagcaatggctgaagctgctagctttgccaacatttgggttcctttttgtcgtaaacatgcgatcgagccgaggaatcctgattcctactttagcttaaagagagatccttacaagaacaaagtgaagtctgatttcgtgaaggatcgtagacgggttaagcgtgagtttgatgagtttaaagtcagggttaacagcttgcctgattctatcaggcgacgttctgatgcttatcatgccagagaagaaatcaaagccatgaagatgcagaggcagaacagggacgatgagcctatggagcccgtgaagattcctaaagctacatggatggctgatggtactcactggcctggaacttggttgacttctgccagtgatcatgccaagggagaccacgcgggtatcattcaggtataaagtcggtataagattcaagatgttattattttattcaatatctcattttgttttggcatattatcgatcaatgcaggtgatgttgaagccacctagtgatgaaccactacacggagtatccgaagggtttcttgatctaaccgacgtggacattcgactcccgctccttgtgtatgtttctcgtgagaagcgacctggttatgatcataacaagaaggctggagccatgaacgccttagtcagagcttctgcgattatgtcaaatggaccgttcatactcaatcttgactgtgatcattacatatacaactctgaggctctgagagaaggcatgtgtttcatgatggatagaggcggggatcgtctttgctacgttcagtttccgcagcggtttgaaggtattgacccatctgatagatatgctaatcacaacactgtcttctttgacgtcaacatgagagctcttgatgggcttatgggtccggtttatgtcggaaccggttgtctcttccgaagaatcgcgctttatggattcaatccgcctcgaagcaaggacttttccccaagttgctggagttgttgtttccctcgtagcaagaagaagaatattcctgaagaaaaccgagctctgcgtatgagtgattatgatgacgaagagatgaatctctctctagtcccgaagaagttcggtaactcaacattcctcattgattcaattcccgttgctgagttccaaggccggcctctcgcggaccaccctgcggttaaaaacgggcgtccaccgggtgcactcaccattcctcgagaacttcttgatgcatcgactgtagcagaagccattgctgttatctcttgctggtacgaggataaaactgagtggggatcacgtatcggatggatttacggttcagtcactgaagatgttgtcacaggttatagaatgcataaccgaggctggaaatcggtttactgtgtgacgaaacgggatgctttccgtggcacagctcctattaacttgacggataggcttcaccaggttctccgttgggctactggctcggtggagatctttttctcccgtaacaacgctcttctcgcaagctcgaaaatgaaaatactccagagaattgcctacttaaacgtcggtatctacccgttcacatcgatcttcctcatcgtatactgtttcctaccagcgctctccctcttctctggtcagttcatcgtccagacgctcaacgtcactttcctagtctaccttctcatcatctccatcactctctgcttactggccctcctcgagatcaaatggtcaggaatctcactcgaggaatggtggagaaacgaacagttttggctcattggaggaacaagtgctcatctcgcagctgtgcttcaaggtttgctcaaagttgtagcaggagtcgaaatctccttcacgctcacgagtaaatccggaggagatgatatagacgacgagtttgcggatttgtacatggtgaaatggacttcacttatgatccctccgattaccatcattatggtgaatctgatagcgattgcggttggattcagcaggacgatttacagtgtggttcctcagtggagtaaactgattggaggagtgttcttcagtttttgggttttggcacatctttatccatttgctaaaggtctaatgggaagaagaggaagaacaccaacgattgtgtatgtttggtctggtcttgtggccattaccatttctcttctttgggtcgccattaatccaccggctggtaatactgagatcggaggaaacttcagttttccatgataggttgatttctttcttgtcaaaaatcacaatacagaacaagaaaaactcgttgtctttttattgtattaaatcatattcctttattagattttttgttttctttctgtctgaagatgatgatggatcatgttaggacaaagatcggttaaatatagtttgaacgagtgcaggaacttagtttccctcgttgtccttttttggttctctgttgtatcatttgtttatgaacatgaatgctttgctcattacctttgttccactttctatgtaaagaggccattttttcactgtggtcgtatttgttgtgacttgtaagtaacctttgatttgtggtggaactagacagtcagctattactaaaatggtgtactaaaaaccagaatatatatacatatttggttctttacgtcttactaaagtcattaagtttatcttgtcatcttcaaaattgcatgtataagtttgctacaagatattagaaacctcacatttaaaagtaacgtcaaatataagtaaattttgaaaaaccatgtactctcaataattggtttttgattgaagacttttgaacttaatctgataccaaattttgacaatcacatgtaccctagtggtttatcaaaaaaaactaatcttataacaacattctatggatatggtgggaatatgtcacatatataagaaaccttaaagtcctgattttgataaccgaaatgaattttaatttggatcatttggttttgagtttttctttttctttctaaatctaaaataactagaattgaaaccaaactaacaaaaaaaaaatgaagtaaaacatgagagtgactcatctacccaaaaagtcgaacaaaacgagctatatctagttcatggaacaagattgggtggactcatatctgatttaaatcaaaataaactgtaataaaaacaaaatgttagtacatgaaaagaattctcatagagaaaaagtcgtacacgcaagctaaatctaatttatgaaacatgttagggtataggtattcctacaatagttttatatgaaatacattattgagaaatttaatacttatgaaaaaatttagacgtgtctttcaatcttcatgactcaacgtgacaaccatgtgcgaatgcaattatgaattatgcaacgcattgtcgatttatgggtgcaggtacgtgaataatttttgaacaagaatcttatgtattttgagattaaacgcatgtcgtttgatagatcttagaggaaagaactttaccgatagtcgtatggattatttatataaaagttccaagaaacacattatagaacgttaatcaaaattttctaattgaaattattagttacttgttcgtgattattgattcaaccaaattcttctattagggtctttttataggcaaacgtatatatattatttaatatattttcaaaaaaaaaatcctcttcgacattttattattgtcaaatgaaacaaaatatattagaaattaataaattggaataattaagaagttatgttttggtgatctatagtattatccacagtaaatatcacaaattatactagttgaacaaactatctacaaactcgttcaccatgcggataccatgaccttatgaccactcgattgggggaaaacaacacacgcatgtccaaagctaaaccttatctatcacctaccaaaattcttcacctaactatgagagattatatctaagtatcccaccaatctaatctccaaaaaaaccccaaaaaagaacaagaaagtttcttgttacaaaaatgagagctattcaaactcatgtgataaccttctgcatgttagtcatcatcgtaacatcatcaacaagagcccaaaagagtcctcatgtgcctaacaaccatgaactttctatcgccatcgaagaaatggagaaagcaaattacttctcttttgtgatgctcatcaacatgttaccatccgtaaatcctcgattcttagccaatgtcacattcttgatgccaaaggacaaaaccctttctacatcaaacattattaatcaacaagattcggttaccgagttcttgcttcgccactcaatcccttcttctcttcttttcgagcaccttaatctcatccccaatggctccattgttccttcctctttaccacattacaccctcgagatctccaatggtggaagatcaaactactttctcaataacgtcaagattataagccgcaacatatgtagcttaggctctatcaaatgtcatggaatcgacggtatactacaatctccaagtactgtcgacgacgattctcctcgaaataatcacacattacccttcatttcttgccctagcagtcacaacaatagtgaccaaaatagtcataacaatagtgatcaaaatagttctcgtcctgctgatcatactcttaccgctcctcctccagtcagcagtccgattagccagccaaaatcagattctcctagcatccatgacgtgaaaatgctgacttcgatcgttattcctttgtttggattattagcgagtttgatcggcatgtgaagtataatactgcacataccacatataacacttagttacgttgtgtcattgtgtgtaatagtactctcttgttatagtttatatttactatatacatgtaaaagaaaaaaaacgatgaaccttattgtaacaatcagttaaattatgagtttagtttttaaatttcctttataatatttctttagagactttcctccaaaattatttgtctgacaaccctttcattgtactcggcctggttagatataaataataaacttatgcttacaagttttacatgatactatctattatggtatatattaataaaacaatattatatttaaaaataaatcacacaaattatacactaaaaaaatttgaactttataaaatgataacttatttttctaaaatgaaattataacttttgttaaaaacaagaaacaaaattatttaaaacgtctatcaaatgagtcgggtattcgggtcaagtatccagacaattgggtaaaaccgacccaagatctaaagtcttttgttttcctttcctttcgcagagaaaccctactaaaacctttggcaactttctctgcctccatttctatggattcgaatttcttgttcatcaagccaatttcgtcctcttaaatcctctttacaccaatttttaaaatccccttaaaatcggtaagaaccctagtctattctctcttcatttctcattccctttcgaggagacaaatggctcagaaaattgcgattggtgtgatctcagccctagctgcctccgcttctctcgcgccgtcgaaattcgctgctgcagatggacctttcactttctctggcttctccacttctccgtctgcttcgattcctcagcagcaaggttctactccgccggcgtcggaatctgggaaagaaccgtctgttgctggcgaagaatctgatgctcctcctcggattcggaacaataatccgagaacaacttcagctgggtttgatccggaagcgttggagcgaggagcaaaggccttgaaagggatcaacaactcagctcatgccaaaaaggtcttaagaactaacccaattctgttatttatagaagctatacatagatacttccgactagagattctcaagtagataagagttgtgtatggtgtagccaatggaagataagttcgagctattaagttttctctagtagtattctgggatggatgtcaatttttttttcctgtgtttatcagtcatgcttggcctcacgattgatgatttggtttctgataggtatttgaaagtattaagactcgagaagagacgaggcaggctgagtttaccgctaaggcgcaggagtttaaagctatgcaatcccaagctgaagctgtgagtttaaagctatctatctttgtgttttagttacttatatcgtataggtgttctttcgtagaacctaccagaatcaactttgcagcgacattgtaactatatccgttgctgttacatttttgttgcatcattcattattttactttgaagattcttgttttgtaaagttatgttcctgacattttccatttcgcaggagaggcaaagggtgatatatgaggaacagaagaaacttgctcagcaccaagcacaaacaaaatcacagatggcccgctatgaagatgagttagcaagaaaaaggatgcaggcatgcgattctacatatactttttatttatttatttaacattgggaaattttattctctccaacaacttatgctgtgtatcttgttacaggctgagaatgaagcccagaggacaagaaaccaagaacttgtgaaaatgcaagaagaatcagcaattaggcgggaagtagctcgacgagctactgaggaagagattcaagcccagagacgacagacagagagggagaaagctgagattgaacgtgagacaatcagggtcaaagctatggcagaagctgaagggagagctcgtgaatcaaagctttctgaggatgtcaacaggagaatgcttgttgatcgtgcaaatgcagaaagagagaaatgggtttctgccatcaatactaccttcgatcatattggaggtcagacattagtgataaacagtatctctctatcgttttttttcattcattgtagaagctttcctgtggcagtttaccctggtagtaattagagtctagaagtatttataataggcatgtgactctcttaaatacttctatgactacacttttaaataaatgattgactctttacccgttttcctaggggggttgcgtaccattctaacagatcaaaataagctaattgttgctgttggaggtctaaccgctcttgcagctgggatctacacaacgaggtaaagactaaaaatggttgagaaaaagtgccactcatgagttcttgtcgttaaaggttgaggaactcagtcatcttatagattgcttgttgcagagaaggtgccaaggttatctggagctacgtagatagaatattaggacaaccttctctaattagagaatcatcgagaggaaagtacccttggtctggttctgcttctcgtgtcttgtccacattgcggggtggtggtaaggagtctacttccaaaactggaaaagggtttggtgatgttatcttgcgccctgctcttgaaaagagaatcgaacagctagctaatgcaactgccaacacaaaagcccaccaagcacctttccgaaatatacttttctacggtccaccaggaacagggaagacaatggctgcccgagagctggctcgaagatctgtatgtattccctacatttctgatgcttacagttattatatcatgtatgaagagtaatgcatttttcagatcaagatcttagttctaggttatacatgggcattaaaattgtagagtctcaggcttgttacttcaataatcacttacgtactttgatctgttaccattcagggtctagattatgcattgatgacgggtggagatgttgctccacttggagctcaggctgtaacaaagatacaccaactgtttgactggtccaaaaaatctaagagaggcttgttgctcttcatcgatgaagccgatgcatttctgtgcgagtaagtcgcaaatcagatgctgatgataattaaacttaactccggcgtttgagttattaatgtgttgatttgattgcaaatttgacaggcggaacaaaacatacatgagcgaagcccaaaggagtgcactaaatgccctcctcttccgtacgggtgaccagtccaaagacatagtcctagcgcttgccacaaacagacctggtgatctagactcagcagtggctgaccgtatcgatgagactcttgaattccccttgcctggagaagaagagcgcttcaagcttctaaacctctacctagagaagtacatatctaagacgaatctaaaaaagccgggtttgctccaaagccttttcaaaaaagagcagcagacaattgagataaaaggcgttactgaggatctcctgaaagaagctgccgccaaaacaaaagggttttcgggtagagaaatcgcgaaattgatggcaagcgttcaagctgctgtgtatggaagcgcaaactgcttattggacgcaaaccttttcagagaggtcattgattacaaagtcgcagagcatcaacagagaaaaaaactagctggaaccgatgcaggtaacaagaagaaatgatatcataaaaacttatcatcaacacaggtatctgcaggtgtagatttgaacaagacttaaagactcaaaaccctgagcattattctcaaatgggtttaggcaggaaaagctttcttatttccaaattgtttctccctgtgattctaaaggtgagatatctatgactgcttcagaatcttcttcttttttttcctttcttagccattaccatcttgagttgatcttgtcatatcactccttggaaaacgaggcaataccagtctttttgtgcgacatttcccagttctgaccatcatagcttttgacctcgatgtgagccagtgtccccgacttgacacacttaactgtgacagcgactccatcagggttagacctcgggatataaaacgatgtgatcccacaaaccttgcagaaggtatgtttggccgtgtgagtcccaaaagtgtaagtagtaatgaagtcctttgagtcatcaagaagctcaaagttgcttgaaggaacaataaagtgaacattgcctctcattgaacaatctgagcagttgcagctccaagcaatcacacttcttgctgctttaactctccatttgattttcccacaatgacatccaccttcatgaaatattaactctgattccattcctaattattgctgaaatctacaatcactccatcagtttaagaatttagccagaaaaaaagaaatatgatcagcaatagttgatttaaagaaacgagaagataaaatagattcgaaccagattttgttgaccagtgtgtttatttcgcgatcgatgaagattctcagattttgttcagacgagatgcgtctacgaatatgtgagcgagactttttccttccacaaactaaacttatcgggctaagatcagctttagtgggcttaaaggatcttttattgggcccaatatatgtcaattcttcattttttgataaaatttctgaagaggtagtgacactgccctaattgaccatcatcaaagactaagatcaccactttgatccagttgaaactgaaattgagatttcttacggcaattcgttgggcgattcaaaatggcaagtgagggagcaaaggatccatggaaaggagaagagtggggaactgagaatgagaagacgaagaagccaacaacaagtggtgtgaaaacggtgacgagagcgaggaaacaaataccgaggggacttgaagacaagtacgaagcttacttcctcccgcgaaagccatggccaagggctcttgcctactatggaagtttcatccttggtgggatcggtgctggtatggttattgaagcttggatcaacaaaaaagtcaaagaagatggaggagtcatttgggaattcgacaagtgatgatagataagtatgtaaggaacatctagagagagtgtctcccttaacacaaatccgtagattggattattttgtttgttccagaattcagaatttgtggaatatcagaaatcgattgatataattctgttaccataatgcattgaagatgttcgacgaaatgcttcatgttacaattcggtaaattaaggttacataatgccttatgattttttgattttaccacctcaagtctgaatgatttcttcatctttcgaagagaaaacttaaacgcaatttgctgtattcagagggagaatgtaagcaacagagagattttgctgtaattaaaaatattcatgacactattctttaagaacttgaaatctcaagttcaacgaattcagtaaaggcaagtctggtttgaccaacaaatgagcaagtctacaatatgaagacactgactataagttaaggtcttctacctccgaaacataccggaactttgaagcgtcctaccttactccgcaatgatcggagaattcttcaccatctcccatatctttgctgagtttttcagccattcgcgttcggagactggtcttgaaaaggacgtagatttagaagacaaaacctgtgataaacccgaacactagttcttgagcgtgttcatgtggatgaatgtgcacatgtgtggataattcacaagtctgaaagatagaaagaggaggatgaagagggagagagacagacatgatcccttagtttccacatcgctaattgataactctcgtgctggtttctcgagcttttagatggtatcacgaaagaaaccggctcagctaactccgacccattccttcctagcctgaatgaatttgattcgaaatactgcgccagtgcctttcttagttgcaagatattctttggagacagatcttgatcctgaagcctgcaaagatgatgtaggacgagcagtgagctgatactgcatagatttgttataattaccctacaatttctcatctaaaacaccaactagactacattttattaagtgatatctaagtagaatcacattcaattaacaggctttcaacaaacataattgtataaaaaacaagcaatataaggatatgcattagtccagagtctaaattcgttgtagtcattagtcgtaagatatgtgtcttctttttagggtgcttaaccgcgacttgtgtaatgacaatttctcttaggattttttttttgtttccggtcaagtacttcttataacacggtttaaaaagagaaaaatcttaattggacggttgaaccaaatcaaaccaaaagcataccaaagatcgaaaaacccggaataggctaataataaatttatttatttcataatttagacaaattattacattattgacaaaaccgaaccctgatctcttgtattgttgctgaagaaactaaaacattatgaaccaaattaaaggactcaacactaacgtcctctgcaaacttcaccaaatacatatacttttcaacaatttcatatcttgtacggagacatatccaacttccgaaacatcacttaccgaacaagtacgtactgatctcattttatcacttatgatggcgaaaccacgacaagttgtttcccgacgtttttaccgtgaaagagtccaacgagagcagcaggagcactctcgagtccatcagcaacatcttccacatactttatcttcccttcttttatatacggaaccacaaactccaagaactccgagtatttgtggaagtaatcgaaacagttgaacccttcaatacggattcgtttgtatgtaatgagcgagaggccgtatataccttccggattcttcagattgtactgtgagatcatcccacatgccgcgatacggccgtgtggtctcatgtttaagatcactgcatccagcatcttgcctcctacgttctcaaagtatatgtcaatgccttcagggaaacacctaaaaatgagagaattaatcttttcatattagttagtcttgatttgtggatagaagaaatctttgcttgtacctttttagggcaccaataagattgtgttcttccttgtagttgaaggcatcatcgaatccaaacttgttcttgaggagatcaacctaaagaagctcaacaaatcaagatccaattacgaaagctagagtttcaagtaaaacctaccttttctttactcccagcgcttccaacaacataacaacccatcaacttagcaaattgtcctacaagctgaccaaccgcgccagatgcagccgacacaaacacagtatctcctttctttggagtacatatctcgtaaaacccaacatacgcggtcataccaggcatacctttcaagaacagaggagagtgaaaataattacaatgttgttaacaacaacggatcataaggcctagaggaagggggattaacaataccaagaagtcctgtgtagtaagataaaggaaaattggtatgatggatcttgaagtgaagattaggaattggtgtaataacactgtactcttcccatcctactgctccccaaattaagtcaccttcttcgtaatctgagtgtccagaatctatcactttagacactccaaaccctgagataggctacacacaacacaacacagcataagtctctcacaatttttttatagatgcgtttaagcgatgaacaataagtagatgtttttaccttgccgggagtgaaggactgagcagtagcagggctcagaggatcaggtttcctcatacgatttcgcatgtaaggatcacaagacaagtagagattcttcaccaacgccgtcatagatccctttagcaccctaagatcgatggtggtggaggtgattacaaggtcggattccttggcgaaaccggttacgtaatcaagtaacacgacttgcttgttgatcgttgtcgccattttttagaaaatgtttgtttttggttcctcaacgtctttatttgtctctacttatacaagctcttctacggttagtgcggttattaaagccacaagttgaggagataatctttttatttgctaaactactattctaacaatgcaaaactaatgaagccaaacttagttgtgttaagcataatttcttgcgcttttatgtgtgatgcaaacaatgtggggggattaaacaatgttgcatactttaagttgatgtttttttaaagagaaaatccaaacgcaaagaagaacctaaaccgaattttgtatctatttgattcgaaaccataacaaacattatctttatccataaaacaaaaaccacccacacaaactctaattggataaagtacaagtatcaaacatagtttcactcacgagcaacaacaacaacttgtttcccaacattcttaccatggaagagtcccacaagagcttcgggagctttctcaagcccatcagctacatcttccacgtacgttatcttcccttctctaatgtggggaagcacaaactccaagaactttgagtatttgtcgtagaaatcagacactacaaagccttgaatgcggattcttttgtagattatgttggataggttgtgtacaccttcctggttctcaagattgtactgtgagatcattccacagacagcgatacgcccgtgcatgttcatgttcacaagcactgcatctagcattttgcctcctacattctcaaagtatatgtcaatgccattagggaaacacctggaaaaaaggagaatatctcttagattagtcaaaacgcaattgacaagatcaatcgaaaagtattgccactttattatgcaaaccgattctaacatttataggcataaaacgcttagaaataagtagttcaccgaacctttttagggcagcagtaaggtcagattcttccttgtagttaaatgcatcatcaaacccaaacttggtcttcagaagatcaacctaacggatcccccaaaagtaaaacggctaattaatcattcttttgaaggagaacaaagaaacataaggaaacaaaatatggaaatgattatcaattcctcaccttctctttacttccagcgcttccaacaacataacagcccatcatcttagcaagttgtcccacaagctgaccaacagcaccagatgcagctgacacataaactgtctctccttcctttggagaacaaacttcataaaacccagcataggcagtcataccaggcatacctattaggacaagacaaaaacccatcaaagagtgaatatatgaaatagatcaacaaacaaaacagttgaaaccctagactgaagttataaccaattccattcatatgtttctaagattttttagaaatccataataaaggttatgacctcactgtctcaagtcaaaacattgtatcatcaagaagcagatttccaaaattttacaaagtgattccaccttacaaaactatgaaaaaggttgagattaacatacctaaaagtccagtgtaataagataatggaacatcagtatgttggatcttgaaatgcgcgtgagtcattggagtgataacactgtactcctcccatgcaactataccccagagtaaatctcctttcttgtaatctggatgtccagattctattattctagacactccatacccttggattggctacaccaaaacacacaacggcaacaacaacagtcaacacgatagacatagcaaaaaaacagaaccaagagagacacaatttcttctcagtgtcttcaagaacaccaaattgtcatcaataagaagcatctagtttcttcacatgcaaaccaaacaaaataaacattatcatcattacctggccgggagtgtaagcttgagcaagagcagcagtggaaggatcaggtttccccatgcgaattctcatgtaaggatcgcatgacaagtagagattcttcactagaacagagttagtaccttccggaaccctaagttcgacggtggtggtagtgaaatcgaaatcggattccgtagggaaaccactcacgtagtctttcaatatgacttgcttgttcgtcgccgtcatcgttgattctcgtgacttcaccaaatttgttactgcttcttcttcggtttctctcgatgacgccgctgcttttatagagtcatctccagtgtgccacgaattcatgatatcaacttatcaagtatgacgtcactgcttatgtgttctgatttttcacattttggattctttctctttcgagcgtttttttctctctttgactttcacattccttttgcatacctttttttttcctcttacgtatctctcctttcacattttgcttttcgtctttttacactagagaactaattctaaactcgtattaaatttctcactaatgatagtaattggaaaaactagaggtttttgacaccctcaatacattgttaaggtaaatgcaactttttgcggagtctttttggaaataagatagaaaacagagttcgaaggctaaaacagagcaatctggtgcttaagttcttcttgtatggaaccagacgcggagtacgtcttcgagtttcgtcgagctatttggtattaaacgtaacattgtggttaatccagcttcaatagctctactttgagttaccaaaatttaaacacgttgtggtcaatatcctcgtttgttggtcacctaattgacaaatttgggtaggtttactaatttccaaatggctaaaatgtgattggtccagtccactttgccaattgatgaaagaaaaattgaaataggtggtaacggtgaaaataactttataacatatcacaccaaacccacaaaacagtatccccatcttccgaattagtgttcgcaacactaactgttaaaacagagcacaaaacagagccatgtcctataataaagaagaaaaggagttgcacaaattgtattcattgatgcttaaacacgcatacttgggaacaagagctagaaacatgggtttgtattaggcttcttttttggatttgtgagagaggttttggcttgtttgttactacttacatacattttgtgaaccaagtcacataaaatgataaaaccaataacaaacaaattaatcttactgtatatactataattactattattcataaaccaaaaactcacggttgggttcaacagccatacaaactcttgttggataaatataacatttctcccaaataagtattattccctcacgagcaataaaaccttactcccaattaaagtattcatcattcacgagcaataacaacaacttgtttcccaacattcttaccatggaagagtcccacgagagcttcaggacctttctcgagcccatcagctacatcttccacgtacgttatcttcccttctttaatgtgcggatgcagaaactccaagaactttgagtattcgtcgtagaaatcagacactacaaagccttgaatgcggattcgtttgtagattatgttggataggttgtgtacaccttcttggttctcaagattgtactgtgagatcattccacagacagcgatacgcccgtgcatgttcatgttcataagcactgcatctagcattttgcctcctacattctcaaagtatatgtcaatgccattagggaaacacctggaaaaaaacggagaatatctcttagattggtcaaaacgcaattgagaagatcaatcaaaaagtattgccgctttattatgcaaacggattctaacatttataggcataaaacacttagaaataagtagtttactgaaccttttgagcgcagcactaaggtcaggttcttccttgtagttaaatgcataatcaaacccaaacttggtcttcaggagatcaacctaacagataccccaaaaatggttaatcatactcttgaaggagaaccaagaaatataaggaatcaaaatatagaaaataatgatcaaattctcaccttttctttgctaccagcacttccaacaacataacagcccatcatcttagcaaattgtcccacaagctgaccaacagcaccagatgcagctgacacataaactgtctctcctttctttggagaacagatctcataaaacccaacatatgcggtcataccaggcatacctttcagtaacagagaacacccatcaaagagtgaatatatgaaacagatcaacaaaccaaacagttgaaactctagtcttctagactaaagttacaaccaattccattgatatgtttctaagatttgttagacatcaaaacattgtatcatcaagaagcagatttccaaaattttacagagtgattccaccttacaaaactatgaaaaaggctgagattaacataccgagaagtccagtgtagtaagacaatggaacatcagtatgttggatcttgaaatgctcgtgagtcaagtgataacactgtactcctcccatgcaactataccccagagtaggtctccttttttgtaatctgaatgcccagattctatcactgtagacactccgtacccttctattggctgcaccaaaaacacaatggaaacaagaagactcaacgcgatagagatagcgaaaagaaaaacccgaagagacacaatttcttctcagagtcttcaagaacaccaaattgtcatgtagtttctacatcaataagaagcatctagtttcttcacatgcaaaccaaacaaaataaacattatcatcattacttggccgggagtgtaagcttgagcaagagcagcagtggaaggattaggtttccccatgcaaattctcatgtaaggatcgcatgacaagtataggttcttcaccagaacagagttagtaccttccggaaccctaagttcgacggtggtggtagtgaaatcgaaattggattccgtagggaaaccactcacgtagtctttcaatataacttgcttgttcgtcgccgtcgtcatcgttgattcttctgacttcaccaaattttgttattgcttcttctttggtttatcgatgacgcggccgcttttatagtggcttctccagtgtgccacgaattcatgatatcaacttatcaagtatgacgtcattgcttatgtgttctgatttttcacatttggattctctctttcgaacgttttttttttttgactttcacatttatttctctgaatgttaatccagcttcaatagctctctactggttatcaggagtccttcccaagaaagtttgcctcaaggtcttcgctattaaagaggactagagtctagacgagacttgctttgatgatcctcgaccggacgagactactgacctgaaagtcataatcgttatggtcaatatcctcgtttgctggtcacctcattaacaaatttgggtacagagagacagaacacatatgacatatcacaccaaacccacaaaacagtatccagctcgcaatagtttccgcaaaacagagccatgtaattgtaattgtaattttcttgtcctcgaataaagaaaaaaaggaattgcacaaaatagcaacagtaactgtatccattgatgtttaaacaaagcatacatgggaacgtgagctatagaaaacatgggtttgtatttaggctctgggtttgtatttactatttagcctcttttttcttttttcatttgtgagagaggtttgtcgttatttgttattattactttcatacattttatgaacaagccacataaaacgaataacaaacagattcacattactatatattatagttactagtattattcataaaccaaaaactcacggttgggttcaacagacataccaactcttgttggataaatataacatttctcccaaataagtattcttcactcacgcgcaataagacattactcccaaataagtattcttcactcacgagcaataacaacaacttgtttcccaacgttcttaccatggaaaagccccacaagagcttcaggagctttctcgagcccatcagctacatcttccacatacgttatcttcccttctttaatgcgcggaagcaccaactccaagaactttgggtatttgtcgtagaaatcagccactacaaagccttgaatgcgtattcgtttgtagatgatattggataggttgtgtacaccttcttgattttcaagattgtactgtgagatcattccacagacagcgatacgcccgtgtgggttcatgtttaagagcactgcatctagcattttgcctcctacgttctcaaagtacatgtcgatgcccttgggaaaacacctgggaaaaagaagagaatctctcttagattagtaagagcacaattgattagatatcaatcaatgaagataaactcgttttttcttcgaaaagagttctaattgcggagtttcattggggttttctccagttcttaagtggtttccacttagattcatgcttccatttagttgtgaattgccgctttattctgcaaatcgatcctaacagttgtagacaccaaacactttgaaaaaacccgtaaccgaaccttttgagggcagcactaaggtcagattcttccttgtagttaaatgcatcatcaaacccaaacttggtcttcaggagatcaacctaacagatcccccaaaaagaagtaaaagggctaattaatctttctcttgaaggagaaccaagaaacataaggaatcaaaatatggaaatgatggtcaaattctcaccttttctttacttccagcgcttccaacaacataacagcccatcatcttagcaaattgtcccacaagctgaccaaccgcaccagatgcagctgacacataaactgtctctcctttctttggagaacaaacttcataaaacccagcataggcagtcataccaggcatacctgtcaagaacagagaaaaccaatcaggagagaatatattgaacatatcaacaaaccaaacgttcgaaactctagtcttctacattgaagtttaaaactcgacataactaattccatttcccacacaccggtttcatcattcaaaactattatacatggttatgacattcaacttcatgatctctgtctaaaattaccaagtgattccacattttccacttacaaaacaaggagcaaggcatagattaacataccgagaagtccagtatagtaggataatggaacatctgtatgttggatcttgaaatgcatgtgagccattggtgtaataacactatactcctcccatccaactattccccagagtaaatcacctttcttgtaatctggatgcccagattctatcactctagacactccatacccatagattggctgcaccaaaaacacacaatgcaacaacaacagtcaacacgagagaaagcaaaaaacacaaagagacaaaatttattgtcagagtcttcttcaagaaccccaatctgaagtttttataccattgtcatctagtttatataaataagaagcatcctgattaatttaagtacagaaataatccaacattaaactagaacagttgatccgtttgttatataataagacatcattctggtcacaaagtataatttattatatctcaacatataaaaccaaaccaaacaaaacaaaacaaaacaaaacattttcatccgatttgaatttcaccggagatcttcctaatcggagattaaaagtagatcctcgtcgttcataccttgccgggagcgtaagcttgagcaagagcagaggagggatcaggtttccccatgcgagaccgcatataaggatcgcatgacaggtagagattcttcacaagaaccgatttagaaccttccggaaccctaagttcgacggtggtggtggtgaaattgaaatcggattccttagggaaaccactcacgtggtctttgaatatgacctgcttgttcgtcgtcatcgttgttattctccgattcaacttctgatttccaccaatttgttacttcttcttcttcttcttcgaggacgcgcctgctttttatagtggcctctcactcgtaatatcaagtatgaagtcactgctcatgatgattcatcacaatatgttcacaatttttaaactctttcgagcgtttttattgttgacactttcacattttgtgatatattttcatttcctttcacatttcattttctttccaattctctcttctgtcacattttcacaagagttggtgtttatacattactgatataggaaaaggatggtgataaatgagtgacacgtggacggtggtaattgaagattaaaagcaacggtcaatattaagaacagaagaatgaggtcaataagaagctgaagacacttcattatgctaaaatctgagattgtatcttcttcttcattttgttctctgttactacttgagaattctctgtaattctcaagctattcctcatcgtttaccggagcttctctcttgagactcttgtagatgagaagttgatgttgcgtttcatgaacgtcgtatcaaattatcaatctatatctttcgaatccattttcctctttattatctgatttacgttatcaattacaaaagaacacacctcatcgttttagagacatttggcttcaatttcctcaagtgtcaagtgtggtccctttgtctctggaacatcgaagattcttaagaccagagacaaaacacatatcacaccaaacccacaaaacagtatcccagctccaaatagttctcgcaaaacagagccatgtgattgttaatcgtgatgtcctctaataaagaagaaaaggagttgcacaaatagcaacactaacttaattacatttttgaatttgtgagaggggtttgagattgtttgttactaccttgatacatttgaatttgataaacaagtcacacagaaaatgattcaaaaccataacgaacgaacaaattgatacatattaaaaaattacttgaattactagtaatctagtatttataaaccaaaacctcaggcttggattcgaacacccatacaaaatcttttggatacatacaacattactcccatagatatatatattcactcacgagcaataacaacaacttgttttccaacgttcttaccatggaagagtcccacaagagcttcaggacctttctcaagcccatcagctacatcttccacgtacgtgatcttcccttctttaatgtgcggaagcacaaaatccaagaactttgagtatttctcgtagaaatcaaacactgcaaagccttgaatgcggattcttttgtagattatgttggataggttgtgtacaccttcttggttttcaagattgtactgtgagatcattccacacacagcgatacgtccgtgtgggttcatgtttaatagcactgcgtctagcattttgcctcctacgttttcaaagtatatgtcaatgcctgtagggaaacacctgcaaaagataaaggagagagaatgtctcttagattagtcaaacagcagttgataaaccttagattactcattggtttgaccagcctgttgtcaaggccggctctggatcatggtgttcatgctttgatcaatttcttttgtttctactttagttgtgaattgccgctttcttatgtaaaccgatcctaacagttaaagacatcaagcgcttagaaataagtagttcactgaaccttttgagggcagcactaaggtctggttcttccttgtagttaaatgcatcatcaaacccaaacttggtcttcagaagatcaacctagcaaatcccgaaaaaggaagtaattgggcaagtcattctcctgaaggaaaaccaagaaataaaaggatacaaattgtccatcatctcaccttctctgtacttccggcgcttccaacaacataacagcccatcatcttagcaaattgtcccacaagctgaccaacagcaccagatgcagctgacacataaactgtctctccttcctttggagaacaaacttcataaaacccagcataggcagtcataccaggcatacctattaggacaggacacaaccatgaaacagtgaatatatgaaacagatcaacaaaccaaacagttgaaactctagtcttctagattgcagttataattaattcccttcctacgtttcaaacaacgtttctaattttgttagacatctataaagtttatgacattcaacaacatgatcactgtctcaagccagaactttgtatatcaagaagcagatttcctaaatttacagagtgattccagttacaaaactaggaaaaaaggccgagatatattaattaacataccgagaagtccagtgtagtaagataatggaatatcggtatgttggatcttgaaatgcatgtgagtcattggagtaataacactatactcctcccatccaactatcccccagagtaagtcacctttcttgtaatctggatgcccagattctataactctagacactccatacccaaagattggctgcaccaaaacacacaacggaaaaacaacagtcaacacgagaaacagagatagacacattttcttctctagaatcttcaagaacaccaatctaactgatgagaacgtttatgtaacatccagttccttttctatttgtggatttgtcaagtatattataaagatatcgttcttgtcactatatccaaaaatagaaaaaatcacataaacaatctcaagacacaagtgaaaacgagctcaagatcaaagcatgcaagccaaatcaaaacaaagtaaacattatcatcagattcgaatttcgctggagatttgcataaccggataactaaagaagaatctcgtcaataatatatagtaccttgccgggagcgtaagcttgagcaagagcagcagtggaaggatcaggtttccccatgcgaatcctcatgtaaggatcgcatgacaagtagagattcttcaccagaactgagttagaccctcccggaagtttaaattcgacggtggtggttttgaaatcgaaatcggattccttagggaaaccactcacgtagtttttcaataccacctgcttgttcgtcgccgtcatcgttaattcttcttctccgattcagcttctgatgagttcaatatattccgttacttcttttattcttcggattctcgaggacgcggctgcttttattatagtggtggtctctctcgtctcgtagctgtttctagtatgacgtcacggcttatgtttatgactcattacatggttcacatttctgatactttctctttcaagcgttttttttttctgtcgacactttcaaattttcatttcttttttttctcctttcgtcacattttacacagagtcaaactcaaccttttgcgtttggactgttttgaaattctcccggtgatttaggtgaccaataaatgaggatagtgactgtatttgaccacaatgttccattatactatatcacatcaagtcttacaaatcccgaaaaatatcttctattcagcataatgttctatatcataatgcagcattgcagaatcgtggaatcgtttaaaaaaaatacaaactttgagaaaccttcggatttcgaaacatcactggttaggacatattctacaaatttaaattcttctatgatgttttctttttttattttctaacttcatcagagcgctaataatcattacaaagatttctgtatttatgaattctcgtacatgtattttgctagaaacaaccgagcctttgaagtaacattgcttcaaataacttagtggtctctgaagattcatttcccgtcttgtgcggcagattcatatgtttatttgtttctgaacctgcactattattttcctcactgattaacaatatgaatcaaaatcatgtgaggaagcacacgactttgtggtttctaagcaaagaacagacctcttttttagagacatttggcttcaatttcctcaagagtgagaccctttgtctctggcacaatgaagaatatgaataccagagacaatacacatatcacaccaaacccacaaaacagtatcccagctcccagcagttcctgcaaaacagagccatttgagccaaacgaaaagttccagttagatatcagaagaaaaactactctaactgtgggtgtcgatatcattcgactagaatttcaccacgactaaccatatgattgacaatttcttctaaagtaaaaaagtcttgcaaaagggttgctaccatttctacagtaatggccataccaagcttaaacaaacgagaatttttgtcctcaagggaatggtaggttacctttaggggtgaaaacgcaaatgtcacaagtgcgtttgcaccaaaattcacaagcactgctagactgagacctcgacctcttagtttaaggggaaatatctctgaaatcatcagccaaccaattggaccaaaagatagctgcaagattgatggtaatacgttcaagctcttattgaaaagtagaaagccaaacatgttgaaaaaaagaactagaagcatatcaaaagttttaaggcgaaaataatgaaatccatgaatcacttttgtacataaactccaatggaactacttgttataagaactccaactttagatgccacgagttatatcaaaaagtctatgatacttttaggacaagcattgacattgtggtagtgaagtttgattagcaaaattctaatcaactatttgtttacctggtaacagcccacataaagcagcagtgcaactacagcaacaactggtgaggcgctgaaaaagaggtagtatgaccccagcaggaataatgaaacaacctgtttgacattgaaaataaaatgttattaggagtattgggttctctctatcattgagctgaacatttagtgagcttgacctaaatttactgtacttttgcttaaggtgtataaacggaacatggatgagaaaagggaagggataaagacagaggacataccatgccaccaactccaccaagaagtaaaggtctccttccaagtctgtcgataactacaacagctactcctgtcataatcaactgcaacaacagaggcgggtgttatttctttgaaggcaaaataactaaaacggcatttctttattacattggaaaagtaacttaaattttagccaggtgggaaacagtgaaaaccttcaatagaccaagtagaattgagacccttgttgcatcacctgcggctgaaaagccagcggtctaacaggaaatgtgggatggggggagaagttaaaaatccagtcgtgagtttcgaagtgcaacaaagccaatattatactatacagaaagtttatttagagaagaagaaaacctgcagtattgatggtgcataataaagcacacttggttgtccagttatctgccattagacaagaattcattagtaattattctttcaagagaacacaatgattagatttgactataccaacctgctgaaacaagactagacctcctcctatgatgagagctttcaagcacttcccttgaaataattcaccaaatgtgacttctttatcctcgcccacaaaagttagttcagccaaaatctcatttacttgttcagcagctgaatcaacaaaagcagggcctctaaggcagcagagagatttgattgcagcctctcgttggttctccacattccctttcccctgtatgacgcgcaacaaaagccacctaggggatgctgggagccaccacatcccaattcccataataactgccaaagggacacttgttgcatacatgtatcgccaaccagaatgaacattgactgtaagactaccgattccataacctccctgtgtaaaattttgtatggggatatgtgagattaacttggtgaacaaagatttcaactcaactgcttcacataaagcaatcaacgtcctaaatctcagggttgcaggaacttacaaccatcccaaggactatgaagaattcctttaatgataccagctgtccacgtatcggacttggagcagtctctgcaatgtacatcggagccgcatgcattgcctaaatgtagggaaacaattcagttcccgtagcaagagtactgctatatgtaatccacagcaaaagcacatggataaacaatattttcgaaaggtaaacaagatttctagtcactggcttttaagctggaaaaacataaaaaatacgaaggacgaagaatacagtcacaatatatgtgtactctgtatacatgtacatagaatagacatcaattatgtttctatgatgatgcactggataacaacccatgctcagcaatagatggaaatatatttgcatcaactgttagattcattggaaaggttaagttaggttgattatatacatgataagaactccacatcctttaggaggggaacaagttaaaatattataagaccttggaaagtagtcaccactataaattaagagtgtgggtgccctaaagtcctataaagcattaatttgctcccctcctaacagatgtgcgattcttagtacaccgccaaatgcataatatataacgtttgagccattggcatgcataagaaagtctttagatgtcaaacaataaagaagcatgatcagtcttaccagtccaactgagaccccataaataacccgtccaattatcagaacggaataggttggggctagtgcagtcacaagggctccaacgagatacaataatgcagccaaaatcagctcctttcttcttccttccaaattcaacaaaaccaaaactttatctttttccacaagcaaacattgctaaatactcatgcctacaaaatgaagatagtgagaagtaaaactaacctataacgtcagcgatagtaaaagccacaattgagccaaataatgcaccgtaaagtgagccactggtctggagaaaatttaacactattttgtaagcaaatttgtctttactccaaatggcaaacacatatccaagagcggcaggtgaataaatgataagcaatgaccaggataaagaagaagtatcacatataacttggaaacttacaactagaccaacatccactgaggacaagttgtaccatgaaattccacttaatgaaggcgactgcagaaaagggaacagcatagtaagatagcaaagtcataggctcctaaaagaatgtagacaaatataaataacgtacatgcatgtgacaacaatatacaggagaaatcaaagggaaaaaatggtctggcaagtgtgaaatatcatgtttcagtactgatatctcagtccaatttccagagctttataatatttaggctttgaaaacagtgactaggcacttgaaaaataagttgaatgataacaaattttgtaggactagatagtttcagacaacttttaactttacctgaagtgaaatggttgcacaagaagttgcaccaatttcataaccataaagcagtcctccgagagctggaaataaaaacctgataatgaaacagaaacttcttaacatgcatatatcaatcatcaatggactagctacaaaccaaaaaactaccatgcgcaaagggacataggtccaaattcctgcagatggtatgtaattccataaggaattctatttgaaagctatgcaaggtaccatacacagcgttctagtttcctagtcaggatacatattatgctaaatgatacacaatataaccaaacaaagaacacatcggaattgttcaagagtgtttcatttgaatcattttaagaactaccaaacttggagaagagatgagagatctcacgggagaatggcggcaacgacagagtagttttctgggacatgattctctttaataagaggctccctttctgggctgatctcaccagatgacttaccaaactaaaacgcataaacagtttcagaaagttgccacccaaaaaaaaaaaaacagtaaggaacacacaaatcatgaaaccaacaaaccaattgtacacagcatttagggtctaaaaatttcatgcttaaagataactgtgaggctgatggctaaaaatccgtaaaagcctctaaatttcttctcagaattgaagcgagtccccaaaaagtgaatatatgactcttaaatacaatctctaagattccaacatagcaaatttcagaatttttccagaaatttgtcagctaaaagccaaagttgatctcaaaaggaacattcctaatgtggcaagtcaagaagtacgaatttactagagaattaagcttcagatgaaaggagacgtatacttcaaatgaaaactctctcacaccgtttaatcgaacaggaaacaaaacgacgaagtagacaatgaaaggagacgtatacctctctggaaacagaggagattggttgctgctgctcaggatcaagcgccatagctgtgatttgagcgaccgaaatatgaattctggttctgagtttagttaggtttgctgaacgaaacccatatatataattctccggggttttgaagatttaactactaccactcaacgacattgaatcatcttcacatagacgtggaggttggtgacgatgacggtcagaatttggaatgttaatctatcgacaataccaaccgttggattgactctagtataaactataaagtatgctatcaaatgttccattttattttatttttgacagaagaaatttgtaacttaatttgtttttttgataatttttgtaactagatttacgaacgaaagaaaggtgcaactggttgtatatgtcgaaaaaattgaaaaattttggaaaatttgagttgaagaaaaaaaattaaataatattcaattcattttatgcaaaataggagatgaagataattttttatctatatatatatttttgcagtcattctagcaaataaatcgtagagttgaacttatttacaacccaatgctattaacactaaatcttttttccaaactaattaattttactttacattcttaatttaaattgtcaatcacattatcaatcaaatttaatctaaacaaatttcacatcaatcccttaaaatcagcataaacgtatttgttaacaatattttaaaacaaagttttttgtacataatttgaatataaaggaaacttaattaattaatttgaatataatttgtaacttaagttgtattatcttgtaaaaaggaaacttaattaatttattgaattatatatttatcaatatcattttttctttatttaaaatatataattcattaaaaggccttcccaaataaattgggctggcctggtaaattgtaattgggactacatccatatcattacctaatattaataacaacattttaagttgagaaaagaaatcttaatttagacctttacataataaaaaatatatgatcaatatcatttttactgaataactctatatcactaaaatatatttggcgcgaaattttttataaacttgaaaattatttagaatcaatacaaagtaagaaaaaacaaatttctagtgcaacataatcgcgtgatcatctactgtttgtttgtgagttttcttctcagatttgaataatggttttcagcagattgtgttcgcgtcaaatgttgttttgttcttaggtagaactcctttcttcgactcatctctcttcccctgcggctccgtccttgtttcaaaaacttgaagctcatgtcgtggtttacaatctatggagacagtgaaataacctccttcataactcgcaacacctatcaccagctcttatcttcaagttcgctgatcgggagcttcacaacaacatcacctcaagaagaagtaggaagagctggcaacggttgatgcttttttggattcactaagtttaccaaatcttatgtaagctgctaagttttattgtaatcttgtttttacttctctttttttgtcacgtttgctttttatgtaggttttgctctataacgcctaaaatctcattttaacaatatttatgtatttagcaaaaaaaaaagagtatataaacggttgaaaacttattatgatatcagattggacactttttgtgagattttaattatgattttagcgcaaagtttaatttgaaatctaataactcaataccatgataattgtttttctcacaaacactagaaagtgagtttgttttattctctgtaaatttaatgtcactaatctatttggcgcgaaatagatatttggagcgaaattaaattcttataaaatatttaaaaattatttggtaacattaaatttatagaaagtaagaaaaactaattaatggtatatgtggttaaatttgtttatcaggatatcaagaaactagatttcaagattttctaattccgcttagttattaagaagaaaagaaaggatgcattaaaaaaaaaccttctttctaaacaaaaaaaagaagaagtagaagatgaacttttcctttatgtatgtaaattaaattctttgaaaactattttgttttgttaagttccttatgtccccatcaagaaatagcagaaaaactcaacaaattattaaatttcaattctacaaataggcctcagaacaattaaaaaacagcataaaaacttagtaaactaataaagtttcaaatcaaattaattaattaagttaccttaataaaataataaggaaagaggaagatgtaaaacaaatttcaaagtcactcgttttctccccgtcccctgcgtcaattttaagctgtcttttgagaactctctctctctatatatatgtgtgtatatataagcctctcttttctcgctctgtgttaaaccatcctctcctttctctctctagatttttatcccctttccctctctctctctctctctcctagggttttcgtctctctcgttcactgttaatagtcttaacggagaggtttgattagcctccgggaagattctactgcgaactttggacacatctctctctgccatggcggctgagaagttaagggacttgagccagccgattgacgtcggtgtgctcgatgccactgttgcggccttctttgttaccggatctaaagaagaggtgcttcaatttctctgggttttgacttgttcaaggggctcgaccaatgattagtctatttcgcgggtctgttttattgtttgagcgtcttcttctcgattgggtgtgaggagtaggaattaggagcgtttcgttgttagggttttagcactctgatacatctttgtcttaagacgcttgtttcgggcagctcgagttttcaatttggatttttagggtcctagagttttagtaatgtattgaattacaatggtttagttgctcactgagactcgagattggtgaattaagtcccttgttcttttgtcgcttcactgtttccaatcatacttgtaatttttatcctctgtctttgagctcatctggcagtgaaatagcatcacttaaaaagataattttgctatgattgtttaattttctgattaccgaatctcgtatttcttatacttctgcttcaatgtcaacattcacctcatttgtattttagtttttaccttgaactaatcggcattgctcccgaaacatattcagagagctgctgcggaccagattttgcgggatttgcaggctaatccagatatgtggcttcaagttgtccacattctacaaaatacaaacagcttggataccaagttctttgctctgcaggtcagttttagttccttatgcagttgtaaattaaaactgttctgttgagatactttactctttttggcatccactctcaggttctagaaggtgttataaagtatagatggaatgcactgcctgttgaacaacgagatggaatgaaaaattacatctcagaggttattgtacaggtatatacttttggaggctttattaccttgttctctggatataactgggaagcttagttaacagaactgttttgataatgagtttaccttgtagctctcgagtaatgaagcatctttcagatcagaaaggctctatgtcaacaagctaaatgtcattttggtccaggtatattcagcactccctgataataatattcaatgcgtttattagttgcacttctcttgtctctttggtttcagtagctgatacttacaaacttcattccaacccgtagacttattttatcttctggcataacatatgttgtgataaatgcacagatcgtgaaacatgattggccggcaaagtggacaagcttcattcctgatctagttgcagctgctaaaactagcgaaactatctgcgaaaattgcatggccattttgaaagtaagaatctttacatgatatcataatcagttctcactggaatattttaaacattttcttcctttatttagctcctaagtgaagaggtttttgatttctcaagaggagaaatgactcagcagaagattaaagagctgaaacaatctctaaacaggtctatttgagaatctcaattttagcatagtaattattagttttcaatctttattatcgtgtatatgttgattaagtgacgttgtatctcattatttacctatttgtgctttttttatgtgcagtgagtttaaactcattcatgagttatgcctatatgtcctctcagcttctcaaagacaggatcttatacgtgcaacactgtctgcattgcatgcctatctttcctggattccattgggttacatttttgagtctactttggtaatagacttcaaataatttatagattgatgttaattggtaccacaatatgttcttctgatagctgctctggttatttacagcttgagaccctccttaaattttttcctgtgccagcatataggaacctcactattcaatgtctgaccgaggtacctcagtttttaagttcagtttttcctaatgttaattgaatgtattatttatttctctattggctcgaattttgtcgatcaggtcgcagctcttaatttcggggacttctacaatgttcaatatgtcaaaatgtataccatatttatagggcagctgcgggtaaattaatcgtcttcttgttatttatttatttttgtcttttagttcattgtattattaagaatgatttttctttcattcttattaagttaaagtagtgaatttggtctgcttcttgtttgtcttggcttcttgcctgatggtctacacttgttctcgtacttgcagataattctcccaccgagtacaaagatccctgaggcatattccagtggaagtggtgaagaacaagtaagtattttctgcacgcttggttttaaggtagatcgttcatttgaataacttatcaaggttatgactcggaattttatgtgtcacctctaggcatttatccagaacctggcactatttttcacttcctttttcaaggtaattatttttctttgttgagttagatatctcatgttgggtttatggaaattttgatatgtataatgatttgtgttaatgcttccagtaattattgtttcatcatctatttcttaactatttcactactatctctgcagtttcatattcgagtcctagaatcaacgccagaagttgtctctttgttactcgctggtctagaatatctcattaatatatcttatgttgacgacactgaagtatttaaggtacctaaattgtctttgttaatatgattgctgttgatagagttgtatgttaattttttccttaattatattcttatgtgcttttgttcgtgtctgaaagatgacgttttctgcttgcttgtggattgagcaggtttgtttggactattggaactcgttggtgttggagctatttgatgcgcatcataattctgataaccctgcagtaagtgcaagcctgatgggtttgcaggtacgttggattccttgactaatatgatcaattttttacatttatttaaggttgatactatagttatatattgtattggttaaactttccttgctttgatttggttactcaccttgggcgttgacttgcaattttcccagcctttccttcctggtatggttgatggccttggttctcaagtcatgcagcggcgtcaactttattctcacccaatgtccaaattaagagggttaatgattaaccgcatggcgaagcctgaagaagtgcttattgttgaagatgaaaatgggaacatcgttcgtgaaaccatgaaggacaatgatgttcttgtccaatataaggtatcaattcttgtccagttcatactgcttttcttcagatgtcttagatatataccaacagtgcgatgttatacaaggaattttttatttatttgaatcctctttggatatcctctttgatttcttccccatttcttgtttgaacaaatgcagataatgcgggagacattaatctacctctcacaccttgaccatgatgataccgagaagcaggtacagtgtcaccatgatgataccggtctatgcgtattaatttgtgaaatattgaggattagcagtcttatgatcaagtatgctttttatcaaatgagtttctccttgttatagtgtgaattatcatattagtactgctaactttagcaattttaacatggacctgttataagatatgagattttctggtagatatgtaagcttactttggtctgttccatgctgttttgctgatgtgaacttcggattgttcctttaaaagatgttgaggaagctaaacaaacaattaagtggggaggaatgggcatggaacaatttgaacactttgtgctgggctattgggtctatttccggatctatggcagaagatcaggtaaaatcttttgctatgcttcacctgactgcaaattcttttcataaccgtagaagttcttgtttgtaatgctgcacctctccatctgtgggctagtatgccataacttaattcaagaaagtttgacagtgtcaaccttcaatgttaattgtttctttcattaacctcccatttcatgagatatcattatcggcctgactgctccatactttgctctggaaggtttacattgttaattctgtgctaacaattgttaaattccattttttcttcaggaaaacaggtttttggtgatggtcattcgtgatttgttgaatttatgtgaaattaccaagggaaaagacaataaagccgttattgcaagcaacatcatgtaagtttgttactacagctgaatttctgcctaggttgttgtacttctatcatcttatattttctatttctttcaaggcgatgttagattttttttggttaagtatgacctctctgttctgctgtcgctgggttgcaggtatgtcgttggccagtatccaagattcttaagggcccattggaagtttttgaagacagttgtgaacaagttgtttgaattcatgcatgaaacacatcctggtgttcaggtagctggtcccaatctttatagtttatatattatgagatacagttttccaggtggaatctcagataaaatgatgtgttattcgctgttaaaatccatgaataatatatttttaagctcttggagaatatattggtagcaaaaatatgctcaagttgttaattacggtgctgtagtttatttataatcgtctcaagctatctgaagtctcttttttgactgaatattctttcatagatttatagaccttgcaccttcccaatcacagatacttgatacttatgtttccctttcaggacatggcctgtgatacattcttgaaaatagttcaaaagtgcaagcgaaaattcgttattgtacaggtatgtattgctgtatttttatccaccgttaggttttagtatatccattgtcttctgaatgagatattaattacagctcgttgttctttcaggttggagagaatgaaccatttgtatctgaacttctaacaggccttgcaacaactgttcaagatcttgagcctcatcaaatacactcattttatgaatcagtaagttttccagaaatattattcgcatgccaatcagagcaaattttcctgttgtgatctcatcgtttctcttttctccaggttggtaatatgatccaagcagaatcagatcctcagaagagagatgaatatctccagaggttgatggcactccccaaccaggtatgttaattaaaatgtggctatttttgtttacatatctggctaaaattgttcccctatacaatgtagaaatgggcagaaatcataggacaggcacgccacagtgtagaattcctcaaggatcaagttgtgatacgtacagtgctaaacatcctacaggtctgatttcttacctattcctcacaatgcattatgattccatcacgtgaattcatgtcattatagtagttaagattgtgcatctgttggtgtttagacaactgttggtttgattgtaaggtccaactaataacatgtgtttttccctgcagactaatactagtgctgctacttcactgggaacatacttcttatcccaaatttccttgattttcttggatatgttgaatgtatacaggtaaatccatgatgcatccttatagcgttaatagtcatggttctctttctctagttcttttacgtggatgatcattttattttttccatggctgcaccagaatgtacagtgagcttgtgtcaaccaacattactgagggaggaccatatgcttccaagacatcttttgtaaaactcttaaggtttggatggctttatgcaccagaaataacgttctagatgcctctgtttggaaaaactggaataatttgtattgtgattctttgctatacagatcggttaagagggaaacacttaagctgatagaaacctttttagacaaagctgaagaccagccacacatagggaaacaatttgtgccgccaatgatggaatcagtacttggtgactatgcgaggaatgtgcctgatgctagggaatccgaagttctttcactctttgcaacgattataaacaagtatgcctcttattgttgatgtgtgccctaataaattaactgtaattgtgaaaaggttggaagatctgggcagatgtttaccatgctgcaatattttattttgacttttttctttcaggtacaaggcaacaatgttagacgacgtgcctcacatatttgaagctgtattccagtgtacattggaggtaacagattttatggattgtgtgtatttgacgggatgaaagacttgcgtggcggtcgttcttatgccttgtatactttattgacaccttttattcatcctattgcagatgataactaagaactttgaagattatccagaacaccgcctcaagtttttctcattactccgtgctattgctacgttttgtttccctgccttgataaagttatcaagtccggttagtgattacgtttttgcatatattattcttttacgtgattgaaaagtcgtttgaccttctttctaagccttctctcattatttgcttctgtttcttactgtatcgtcattttgcaacagcaactgaagctagtgatggattcaattatctgggcatttagacatactgagagaaatattgctgaaaccgggcttaatcttttgcttgagatgctgaaaaactttcaggtttggtgtttattttccttcttttagctcagtggttgtggcatatattacgcttgctctaacactttactctgattgtgacagcaatctgaattttgtaatcaattctaccggtcatactttatgcaaatcgagcaagaaatatttgccgttttgaccgataccttccataagcctggcttcaagctacatgtgttggtgctgcagcaactgttttgcctggtaaaaccatctcttctcttgttgtttcttatttgatagcttaagtaatcatttacttgggaatgggtagttctatgcacttagccgtttgataattatatatttcagcctgagagcggtgctttgacagaacccttgtgggatgctacaaccgttccttacccgtatccggacaacgttgcatttgttcgcgaatacaccattaagctactgagctcttcattcccaaacatgactgcagcagaggtaataaaaactaaaaccagaagtttcactttcacagttttcatgttggttttttacttcgtatcctgatatattgatatcaacaaataatacaggtcacacaatttgtgaatggactatacgagtctagaaatgacccgtctggatttaagaataacattcgtgacttccttgtacagtctaaggagttttccgctcaggtacttaacctgtctttcgcaaaagccattcaaattggttttaagaactcaaaaccaaatagccgaagccaatttgttgaatacttatttttcaggataacaaagatctctatgctgaggaagcagctgcacagagagagagagaacgtcaaagaatgctttcaattcctgggcttattgctcctaatgagattcaagacgagatggtggactcataaaattaagaagggtgcaacaagaagaagcttcctgtgttcaatgggctggattttttgtaatcataggtttttgaaaacaggaaagagttcaaggagagattaatttccccgaccgtatctctactaccgtattccgaagcttctcaattcgattttgaggattggaaaagctaagaaaacagagatctttttggggataaattagtgtcttgtttggttaattaattgggtttaatgtagatttaaacattagggaccttctctagttatctcatatggttggctcctttttgctttgacctttttttgggggtttgtttctattactcagtgattcgtgttttaggtgcaagatatttttttagactctatctttgtcaccccctagggggtttaaaattgtaagattgacttgtggtgatgtttctcattaaaatcgtccactttaaagtgtgctttgacaattttatcaaacaaaactttgaatttagtcatcattattttactcttatttgttaccccatatgaaataaaactaccactaaattaaataaatacaactatttaatttatgaaaacgaaaatgccatctaaattaaattattgacacgtaacaataaatattaagatagcataaaacgtttatttgtacttcgaaaacttatacgtcaataatttattattcccgcccacaatgcaagataacaactagtaggtgttgtttacatgtttatccaaagttcacaacttcgtccaacaatcctccaaaattctcaaaggagcttcctttggtagagacagcttcttgtgctagttcttcaagctttttagcattaaccttcatcttcttgccatcatcttgaaccaaaacccgatccaaactctcctcaaatccatccttcgtgaagactccactactaatcgtcactccgatctcccacacagcttccacagatcttgcattgattgcatgatccccgaaaatcggtctacaaatcatcggtacacctgccgacacactctccaacactgagttccacccaccatgcgaaacaaacacacccattgcttcatggtttagcagctccacttgtggtgcccatggaaccaccatcccttgctctctggtccgatccaaaaagccttctggtaaatgagtcattttcatctcttgtagcgaccaaacaaaaggcactttactcgattccaatccttgtgctatcgccacaagctctacaggaggcggtgtcgcgactctaccaaaggcaatgtacgctacagaagcagtggaccgcttctcgatccaagccaagcaaccgtgaggatcgtgcactagcgttgatgtttgcgatggagaagataataaagcgagaggaccgatgtttaggtaacgtttgaattccgatctgaaatcatttgtaaacgtaggatccaattcttcaaaggaattgatgaaaacagcagtggcacgaggtaaagcaagacccatttggtgcaacgttttagagaaaacagagtctaagttcccaaacacaacgccttcttgtgtgtctttgactctgatcttctccattcctgagataaaccctattgtctcctccatacgctcacctacttctgaaaattagaatggagacatttcttttaaaaatccctcgggggattattgtggaacaggcaggtttacttgccctataaggcatctatagttgcaatattgaaatttcaatggaatcgtaaagcaagaaaagatttgtgtatacctttgacaccgacgttttctctgatggcatctgtgtagagatgagcagtgagcgaggttgctccgcctccatagtacgcaacccacgacgctttcatctccgcagccgccgtctccgctgctaaccagaggaacgcatccgtaaggatgcacttgaacttcctaccaacttcggtctcggccgccttgatttctcttcggaaaatctctggcgccgcttcaagaaacagctcaacagcgtgctgtggattccccgtcaacacgaatccctcaggaacaccgtcatcgacgttgtggacacgaatgtttgtggggatatcggaggagagtaacgacgagttggatcgtgcggtgctgaagaaggagaagacggtggagggagcagcggtggcgagacggcacgtgacggcgaggagaggagctgcatgagtgccgaaggggaaaacgagaactgccacgtgggagtctcgcgttggctgcgagggtttggccatgatgcaggcaatgctaaggagagaataatgtgcgtagttacattaaatagaagtacgctaaagagagaaaaatgtgcgtagttacattaatcaaatagaagtatgctaaagagagagtaatgtgcgtagttacattaaatagaagtacgctaaagagagttcgtacgctaaagagagttcgtagatgagccaccgagcaagtatagactctttctctcttaatcaaatttaagtatacctttattttgtcctttgtttatgtccctgctatattgttttggtaggtagaatttgtggttcttatattatatggtgagttttctcatcaagtctcatctgtctttcattcaatgttctaaagtaagcccctagatcgacagacgtatagatatttttttatatggagactagtctacacgatagatatttttttctcaaaacatatatctaccgacatacaatttgtttagatatgtatatattaattacaaagttaccataacagaaaaaaataaaaaataaaaacaaaggataaagattctcactttcactttttttttacaaaaaaggtcttttcattttcattccaaaacagaacatgtttatttgtttatttatccaaagtctatttgcttcaaactttcataacttcgtccaacaaacctttgaaattctcaaaggagcttccttccgtagagacagcttcttgtgctagttctttaagcttcttggcattaaacttcatcttcttgccatcatcttgaaccaaaacccgatccaaactctcctcaaatccatccttcgtgaagactccactactaatcgtcattccaatttcccacacagcctccacggatcttgcattgagtgcgtgatccccgaaaatcggtctacaaatcattggtacacctgccgatacactctccaacactgagttccacccaccatgcgacacaaacacacccattgcttcatggtttagcagctccacttgtggtgcccatgggaccaccattccttgctctcttgtcccatccaaaaacccttttggtaaatgaaccatgttcttctcttggagcgaccaaacaaaaggcactttactcgattccaatccttgtgctaccactacaagctctccaggaggcggtgtcatgactctaccgaaggcaatgtaaactacagaagcagtggaccgcttcttgatccaagccaagcagccgtgtggatcatgcaatggtgtttctctttgcgaagtagagaataacaacgcaagaggaccgatgctcaggtaacgtttgaatttcaatctgaggttatcagtcaatgtagggtctaattcttcaaaagaattcatgtaaaccgtagtggcacgaggcaaagcaagtcccatttggtgcaacatcttcgagaaaacagagtctaaattcccaaacacaactccttctggtgtatctttaactctgatcttctccattccagaaatacaccctaatgtttcctccatacgcccatctacttatgtaaattagaaaggatcatatcattatcaaaaaaatatatatatatatatatatatatatatatatatatatgaatcttgtaatttcttttatttaaatttgaataacctttatagtgacatatacaaataattctttttgtctctttttttggtaaaaatgacataattcttttaacctttgtttcccattttaggaactttcctttaatagcatgtctaatgacaaagtcacaaggttggaatatatataaacctttgacagcgattgtttctctgatgagatctgtgtagagatgagcagtgagcgagttccggaggtccagaaagcaacccacgacactttcatctccgccgccatatcccccgcgaaccagatgaacgcatccgtgagcatgcatgtcactttcctaccaacctcagtctccgccaccgcgagttctctcctaaaaatctccggcgccgcttcaagaaacagctcgaccgcctcctgtggattcctcgagagcacgtatccctcgggaacaccgtcggacacgtcatggacccgaatgttcggaggaagatcggaggagagcaacgagaagttggattgtgaggtgttcaagaaggagaagacggtggaaggagctgcggtggcgagacgacgggtgacggcgaggatagcctgaccatgactgccgaatggaaaagcgagaactgccacgtgggagttggccatggaagagaaagcaaacgttaattaaagagagaatatgaatatggaatggttgtggaccttgtggattaaatacagaaataccatgtattgtcgggtttttaatattgttggtaggtaaaattcgtggttcatctttatttcacgtaagaaaacccaaatttaatggatcttattaatatatatattatttgatttgattgttcactaaatttaaatgttacaagggacgactttttgggtcatatagttttgaaagttggatgggagagagactcaatgaccgacacataaacaaaggatgagatcgagtaaagaagttgtaatgttggtcactagtccctgatggtagtaataccacgagcgcttgaccggtcttttcctcaagattttctgagccgtgcattcaagatcacagtccagcaacccaaatttgctatctccatatgctccttcatccaacgtatccttgacatcactgctaagatttatacccattggagagttctcatccatgaactatctttgcgactagttaacatatgaaagagaacgactagctgttgttatcacaaagagagagcttccacatttccttatgtgtttttgtattaagcaacgatgcccccagattggctaagtccaattgttcgtatttataaacactcaatttgtaattgagtttgatttacaagtatgttgagattataagaaattgtgtgttcataacaattaacaacatcaaaccatccttatgaattcaaagtagcttcctttagaagacaacgttcttcttcttcactaactctgtttttgttaccaataatagaaactgttgttatttatttgtccaaaatcatttcacattcaaataatgtttacaactgcatccaacaatcctctgaaattctcagaggaccttcctttagaagagacagcttcgtaagctagttctttaagtttcttagcattacatttcatcttcttaccatcatcttgaactaaaactttatccaaacacttctcaaacccatctttcgtgaagactccattgataatcgtcattccaatctcccacacaacctccaccgctcttccgttcaatctctgatccccaaaaaatggcctgcaaatcatcggtacaccacccgatacactctccaacaccgagttccatccacaatgcgtcacaaacacacccgttgcttcgtgtttcagcagttccacttgcggtgcccatggaaccactatcccttgctctcttgtcctatccaaaaacccttttggtaactgaaccaagctcttctccttaagcgaccaaacaaacggcactttactcgattccaacccttctgctatcgccgcaagctctccaggaggcggtgtcatgaccgtaccaaagctaatgtacgccacagaaccagaagatctcttctccatccaagccaaacaaccgtgaggatcttgcactagttgttgcaatgtagaagataataacccgagaggaccgatgttcagatatcgtttaaatctcgatctgaggttattcgtcaatgtaggatccaaatcttcaaaagaattgatgaaaacagcagtggcacgaggcaaagcaagacccatttgatgaagcatctttgagaaaacagagtctaaattcccaaacacaactccttctggtgtatctttgactctgatcttctccattcctgagataacccctattgtctcctccatacgctcacctacttctgtaaattagaatggaatcataaacattaccacaaatacatataaatcttcaaatcaatagtatcttaacctctgtttcttcttttagctaaattttcctctagttgcatatttatttatgagataaaagacaaaatcacaagtcggaattgggaagcattcaaaaatttgtatatattacctttgacaccgatggtttctctgatgagatctgtgtagagatgagcagagagtgagtttgctccggcggtccaaaacgcaatccacgacgcatttatctccgtcgccatatcagccgcgaaccagaagaacgcatcagtcatcaaacatttcacttccgtaccaacctccgtctccgccttcgcgatttctctccggaaattctccggcgcagcttgaagaaacagctcgatcgcctcctgtggtctcccgctaaacacgtatccctccggaacaccgtcggcaatatcgtatactctgatgttcgccggacgatctgcttcgtcaccggaggaaaataacgaagagttggattgtgcggtgttgaagaaagagaagacggtggaaggagaggcggaggcgaggcggcgcgtgacggtgaggagaggagctgcatgagtgccgaaaggaaaagcgagaactgccacgtgggagtctctggttgggtcggagggtttggtcatggtgcgagtaatgaagaagaagacttgaaaagagaagagagagtttgttggagaataaatagagaggagagggctaaagagaagagagagtgtggtcgtaaatgaaccaccgagcaagtgtaaagctcgtgtttcgtggttggtaccgatctcttctctttctttatataacaagtaaacaacttttttaatcaaatttttttatgaacgacaaatttaataacaaaatccgttttttgatattttcttttttttcagagaaaatgtttttgtttttttatgtaattttcttcttatagaaaggacatttttaggattgtatttgtatctgtactttgtacatgatatcttaataaagcaattattagattattttttcaaccaaaaaaataaaaattattgatttgtcataagatttgattggttgaatgatttattttaagactttagagggaaaaaataaaagaaaataatctattttacccgtcaacaaagtagtagacttttgttttttatgatcatccgttgaaaaaataggaaattataacactagcaaaaagggtgggagttagagtatccgtttgaattcagatcgaatattttagatttttaggttttcaaatttagaggtataaaatctattcggataattctatattgtgggttgggtcagaatatttcgaatttggattatccgaagttcccaaaaatcaacttttttataaacgaatctatctaaactcctagaaagtatacaaaacatctaaaaattttgaacatttttacccaaatttattcaaaaatagattaaatacccaaaaatatctaaaatattttaaaatcctaatattttgacactaaaattattataaatataaatgctaataataatttattactatgtacttaaattgtaggtatgttaggatatacattcggatactggttcaaattattactaacgattgggtgttcaaattcagatattatgcacaccttaaattcaaatccacaaattgtttatcaataaaagtatattttaagatggattttgaaatcattagttcaataacactgaatttcatgagactttttaaaatccatgtttgaataacattagatttataaattttacacaaatctcttaaaatttcactttcaatttaccccctaagatattaaaattgttattacttctgatttttgactcaatactcactgaattcgtttcgtttggtaggtgatatatgtggctattgttaaaccgagcctgccaacccaaaataaaaagttagaaaccaatccgacccattatttgtaaattgggctgcaaagcctagaaaaaaatattcactattttgcgatagtattattaaatttatatatttgagaaaatgagagaatggtggaagtaaaataatttgaaaggaatatgaatattccgttgaagaagacttgctcctgaaatcctttggaccgaaactcgtaaaattatttcccttcaatttctctgaaatctattcaccgtctcctttgtctcctcctccaaatcgatcgttcctcgtcgtcgtctgattttctctacgattgctttttctgtctagctcgataagataaaacaaaactaatttttgaagagtttttttttttgggtttgggagcgatgggtcaagcttttcgtaagctattcgatactttcttcggcaatcaagaaatgagggtaatctcatcatctctcgtgctatttatctggatgggatctcgtgtaattttgtcatctttgatttgttttggttttagtcatagcttttatcgcccatgtctgacctttgatgtttcggaattttggatttggaaaagactttataactcaagcttgtgttttctggattcttctctattacgaatcatagatttgttgttagctgtggcatgatgaatcagaattgaagaaatgatttttgaatctctcttttttttttccaattttgtgattaatgacaggtcgttatgctggggctggatgctgctggaaaaacaactattctctacaagcttcatattggagaagttttgtctactgttcccaccattggtaagctttctggttgttttttgagctgtgattattcttgatctcagaagctatgtagttggattcatttcttgttttggaacaagatttggatagatctttggtgaatgctgtcagaattgtagatactcggaacatctatcttctccttcagctgaatctcatgatattctgccaacttttgtgatgccttgtacttctgaagtcataagttgtgtctgtgaatttctcttgtgtcattcagttatgatacatggttcttgtgacattatacttttatctatgattattgttctgtcattttccttttggttgtttggattatgtctgctgacaatttaaacttatgttactcaggattcaatgttgagaaagttcagtacaagaatgtgatgttcacagtttgggatgttggtggccaagagaaactgagacctctttggaggcattacttcaataatactgatggacttgtacgtatatagtttttttttcgatttttgctttcagtcagatacttaactttcaaggtttttccatctctatgttggcatatgttatcctatatttggttatgatgttgcagtatcatatgttgcttggccaatctttagatctttttccatctttatcgaccatggtataagactactctatgatgctcttgcagatatacgtggtggattccttagatcgagagaggatcgggaaagcaaagcaagaatttcaggtataatacctcagaacttgcaaaagacttttcgtaaactctctggattataccttaccctgctctcggattgccacaggagatcataaaagacccattcatgctaaacagtatcattctggtgtttgcaaacaaacaggacatggtaattcgatattttcttttggtttttgtttgtttctcgtctgtgcttataattcctcaattcacttctttactctgctggatattagagaggagccatgtcaccgagagaagtatgtgaagggttaggcttatttgatctcaagaacaggaaatggcacatacaaggtacttgtgctcttcgtggagacgggctttatgaaggcttggactggttatcatctactcttaaggatgttaaagccgctggattcacatcggttggccactcgttttaaatcttccaggtaatataaagacctgaaaacaccagcgagctataaccagtagttcagtacaattactctcagtctcgtgatcaggatcttgtaaaacgtcatttctccttgcaggtatactttgatatcaatggccagtgtcttcttcttggctttatcacgaaatcagaatctctgaagactttttttgttaaggaaagaatgatcttctcattgtggcaatattagactccattagactatttttgaattttgatcatgctgccatgaaagcttctttgtatattctgctgatgaagagttgtatcatctgaaaaaccttctctttggggtcatctttgtccgattaagactttggtagatgtatatacattccttcgaaatcatgatatatttttttataacaattataagttttcccttcttctttttctcaacatatttggcattttggccttttggtgattttataggttatgcagaatattcagttaagaatctacccaaaaatcccagttgaaaacagtatgttgcaaactctcttagaaattagaaaaagcttaagcttagagaaagattaacacgttgctgaagataagaatttttatctcacaaagattaacacataatgctgacatcgttatattaccattattaggttatctaggttgtttaatttttctcttttatctagggaatttacttcttctttctttgtgctggtcagtaggataaatgcgttttactgataaaccagaaattccacaaaaacaagaatattcttaagactaatatagtgcaagatcaagatcctagaacaagcattatattccagatcagttttcaaagctgataatgttcaaactttgactctctaggcacacgttgtaggcaaccgtgaatctccttcctctgccaccattgaatccgataatggttgtgcagcagctacagaaggaagttgataatgcacgatgaataaaccaaaacatgctcaagaaatgatggaaactgtagaagaaagtaacaatcaaatcagaaactcaactgttttcgcttagagtctcactctcactcgtggtcgtcattgtctctgatggttcatcgattgtttccatgtcaacagtcattgcgtcatcaacatctgcttcttctacctctgtcattatctcatccttatcgcctcccattgactcaattacatttggatcgcaacttgcagcagatgttattgtctctgaggttgctgtgtttggatcctcagtggtttgtgattgtggctctgtactgatggctaacatagaagtaaccaacagattctgcatatattccacaaaatcaatgaagaaatgtgtacatcaagtacaaagttacagaggtaagagtttcaaattcgtaccttttctaatgcaagagcgagttttgagagctttgggtagatgctccttgcagccaaaaggatctgttgaacacatattaatccaaaaagctttgtggttatgatgtcaacacaattttaaaagcttataactctaaacaatataagagagcagtttttataagacacttgaatggtatgctttgataattacaacttttccaagagttgcaaatgtagcatttatgtatcctggactttaaaacgtggaaaatcctgatatatcataaatttaaggaaataagtttgtttaggattccatgagaatgttgaacaacagagtgaaggtatggattgaactgattcttacactcttacactatactatacaagtgaaatttttatattaaataatgcaagctaataaaaaatgatatctctgacattggagtaaatcatgaccagaaaactcatctacttacctcacagagtctctgcaatgtaaatggaggtccatcatcgaatctaagaagggctgcaaaacaagacaggaacaaaagaaaccaattagaaaggtctctgagtaaaaaagagtactcagagttgtaaaagcataaataaaactggaaaaggtcagaaaaaaacataaagcagcttaaataactgaagtgcaaagcccctgtcacaattctcaacatatggttcccacactgtacaagaaaggcacttttatttcatttacaaaggtcatttcttaaaatttctcacagattcttttttgtagccattttgaggaaacgatgatgggtagagttatagctggtctattagaaaatagattgataatgattgacgagatactaaaccccttgattaagcccttataccaaaccctttctcacagtttcaaactcccatctacacaaactttctggaatcaaagtaacaaaactaacaagtgagtagatatagaccttcatccaatcgactaaccagctctgaatatggttctccaagagcttccttttgttgctcatccgtcatttttgcctcagaatattccgatagaacctttacaacaaaccacatagatagttaaacattgaaataatcaggatggatgtggaatggtaatatatattcacactcctggtatacctgcacataccttcttcaaccagtacgatagcgttccctttagtatctcccagtcctgcctgtaatattacaaggtaaaaaaagtactcaactagatgtagcaatacagagatgagaccctaaaccctagaattactcagaaagaaacccattcattcagcacatcgaaactctatagaagaatacatatcgggaaggataagataggatcccagtttaagtgcataacaacaatgcctactcataggtatagaaaattgatattaccagaacttcccagtagatgctacagcttctaatgtgcgctttacttcttcctcagacatatctgctatctgctcagctccactgcaaaagaaagatcaatcttaaagcacagaaaccatctactatgaaatgagacacttaacacctcgtgacctcatctgcaaccaaccagtctatggaaaaccaaaaataaacctgagtgttcgttcttgcattatcctcctaaatcagatctaaaatcgttaagtaaaagttctgcaaacggaagaacacacctagatcctaaaaacaacatcagaagcgtaaggtggctcatcgattcgaaactcaaatatatccaagaaaccaatcgttttgcacacaggcctcaagaataacaatatatgaactactagcattaacttaacagagattggtgaaataatttaagcgcaaaagcaagcaagagtgatgaaaatcaaagatatcagagtaacgagaagagaaggaagcaaacatacggatgctcaagaacttcgggaaggacggcgtgatcctggcgttgaacgccgtcattgggatgaacgccgtcattgggatgaacgccgtcattgggatgaacgacggaggaaatctcggaagtttccgatgatgacggattctccatttttggtttcagagcgattttcaattttgctcaaatagctgaatccgcaattcgccggataaaattcggtaaagaggattttttcaattttgctctgacccgacccgactcgactcgacccgtattggatccgattcgacccgagcatgtaatgcgcattttatatgcgagaaaacgtgaagaccaaaatatagtagatattttttggcctgcgttattgggttagggttagaacattaaaaaaagaattattgggttagggtttagaagattattcatttgtttggcctacattaaacttaaagtatggtagattttttttttctggtcttgtagttgtacgagaccattattgttagaaaataaaagttgaaaaaactaaagacgttttctttttaagttaaaaacaaaaagaaaataaaaataaagtttcagattattttcttttctacacacttgatagtatccttttcattttgtctcacaccatttgtccagtcgctgaccaaaaaacataaagacccatgcttccactgaccctaagatcagttttaccacctttcattgatcctttggaaagtctaaaatttcatttattgatagtgacattttattgtctatagacatgatacgcatttatgagccaagtgtactcaccattgccgcctcattttgcttcgtttgtcttttgttataggttggtaagcctatgatttcctatcacatctctctttctctctcttctctctctaaatgtagaaatacctttcaaatctatcatagaactattataacaatcatcggttgaagtagatgtcaaaacttacctttcaaatctatcatagaactattataacaaaatcaaaagaataaattttgaaaccattgtgaaaaaaatcaatcaatcaaacaaacaaattagaatttgtttcatgagagttcaccagtaattttaattagttgcagctgcaactaagttattttcttgttgatggatcatggcctcaatatggttcattgtctcattgaacgggcatccacgggtgaattattgattcggaccaaagaacattttatacctgtttaagaggattatggagttgtctttctcctatccttgttgatttagatgatgtagatgatgaatttgaataattaactttgttttgcggcgaaacttgatgattaagaattttacaatcttcctttccttgtcttttctatctattgttttttttttttggtgttatacttgtgttgattgcaatattgcaaaatgaaaaagaaaaaaaaaagaacccgttcatcgttatccgctctctccccagaccctttctaatcccatgcatgcaagacaagattcgtttattgtttactccctcggatacacaggttgtccaacgagtaatatgacgtcacacaacgttcagattgttgttttcgttttcaatgaaagtatatatatatatatcgtgtttctataaaaatcacaataatcttttctgctttcaaacgttcttaatgagctgcttttatatactgcttcaacacaataatttatttattttttgacatcgacattttacttatataaagattaaatgaaaattggctatgaaatccagtttatgttattgtatgaatactcgatacggttcggcatgtgtgtttagaaaatctatttatactaaaaccaagttttattagattcgatttatgttatgaaaaaaattacgttcagttttgtttaactttggataaaaaatacaaatcagaaatttaaaaattactgttacatgtgtatatacgtgttttgtgtatatttcgagaaaattagtaaactaattgagaataactatatacagctggttaatacaaataatgaagtacacaacaaatattccataatatgcaaatttttacaacataaattaaatgatatcaaaagatccgttaaagtaaaagcgagaaattttcgtttctgtcatttagtcactagttctccgtctctcccattctgaccattctccattctccattctccctaggtttgtggttttctcaagtttatctttaatccgatccgtttcatttttctgcccctttttcttacggcttcatgttccattgattagctaggtatacgatatttggggtttcttagaaaagttgttaaaaatacattcttggtttttggggttttagggtttgaatacattaacttttttgttggtttttagggtttagaatacattaactagcttacaagatttggggtttctttgaaaagtttgtttttttggattttggtgctccatgatttttagggtttgatgtatattaaagacaaactactaagattatctactttctttacttctttttgaaacattaataagctttatcatgaaccaaagaacaatagctttgttctcgaaatggggtccttggtagaacgcgttttgttatttttctgaatctcaacttttttttggttctgttagttttattgatatatacggtgatgacattccttgatgttcttagatctgttcagatggaaagggatgagtgaatttaattactttaatgtagcaaatcgactgctatttctatgcctctttgagatctatgaatggtaaaagaacaaaagcttaggttttcttaatatagttaattagtcgttgtaatttttgtttacttcgtttaaatcgtaattaaaaataacattactcaatagatgtgtgtgttagtgtaatgactaatatacatgatatgctctatcgaattatttgacataatcaaaacagtttcctttcttcttttttagtccgtaatagatactcaattactcattaattacttttttggttaagcttactttacagatgtgacttttttcaggattttcgaaacatggactgaacattagggaaattaaacttcaaggattagaaatttctgcacaagttgcactattttaaaactctctgacatgttatatgtttgaataaatgaatggttacctgcttgactatatagtctataagttatatatgtggtatgcatactttggaaaacacattagatatttgagaatgatatagttagaatcataaatcagtggtttagaaaacagagcaatgatagtaatcagttgaattgtgtgattactataattagatatactctctcatagtcatagatatagaaagagctgggaaatgttagatgaatatagaagaggattccggagacaggaaatgtttcctactaattcatgaaaacgtactgctagtagataaacagaaccgaagaggaatttcagtaaatatacatctgttcagacaagcttagaattaattatattttgttctaatacgttttccaatgctgagctttgtttttggagagtttgttatatatgaatatggggaccttcctgcggagagaaaaactaaagctctgtaaataacttcgctttttgtgtttcaaggggaatataatggaaaaggaagatggtggtggtgatgttggcgcgggaggaattggtggtatcggtgcgggaggcggaaaaggcaagggaaagaatgtaccaaatgaactcaaagctgaagcagaagctcgccgtaaagctgaagcagaagctcgccagaaagctcaacaagatcttccacaagttgatgaacatccactaggggtaaattattatattctaatttatagttcttgtttgtagtttagcttttacattcaccattggcctttgctacatttttattaggtctttggtgacggcagctatcttatcaaggattggcgtcagtcacacagagctttacttagtaaaattatcgagcagatacatggtatgatacgtcaattccaacttgaaacttttgtgcatagttagttatgtgaattccaagtgatggcttgagtgttgtggtttatatatgtatttgaatttaaaatctagagacactgtgatttaggaaattatatttggttaggattgctaagattcaattttattttcaagtgcagctatttgttgggctctagttttgggaaaaatattggagtttacctacaacatgaatcgccctattgctcaacacatgtttctggacatagatagttttgctgaaaaggtcaagttgaaagcagacgagattaatgctcagaagaaagtgataactgaggatatggctgttggttctatgaagaaagcattcgaccatgtatttctcaaaggaatcgaaaaagctgatggaaggaagaaggtagatatttagacatactttatttatttatttgtttgtccgtatgtttatatactaatgtaaagtcttgacgcatgaagataatgttttatgtatattttgtagggtggaggagataaagtgtttacaattaaaggaaggtttaatgaagtacaaaatgcaacggcaattgatatcgccaacaaggtggatataggtcctgtaggcataaccattgatatgtctgtgggtcttaggaaacttaaggacgtaagttaaggaattaacttagattccaagtatgcaatattttgtatttagcaactaactaaaacttcatttttcttcaatcgtttttacagggaatctacatggtccctaagccaaaagatggagcaccaaaacatgcccttacaatcgtagcttatgggatgactaaagaagatgagttgttttttgttgtgcaaaacacatggggtaccatttggagagttaatggcgaaggtaggatgatcatcactgacacttgtcatatgttttatctagatgaagtgattgacgacaaaaagaagaagggaaaggctcctatagcttagttgtttaggaaactattttttaaaatttgaaaattgcaatgactattttgtcttaaatcatatttcccattcttaaatcaagtactcttttggaacatatttgcaactgttttttaagaaacatactcttgattatccaaatgaaattcaaatgccatcgatcatcaccaagttgataatcaaacaacttatattatacaatgaccacattatattctttttatttgtctttaacaccaataatcatattatcaaacaacatagctatgagtgaagcagttgattctttactatcatatcaatatatatatatatatatatatataaaaaaacataattcaataaccattaaacttcatagttatacggggcacaacttaaaaagttacagctttaggtcacattacacaggtaacattgagataaaccaagttccaccaagatacaactcggagcttaattataactggaagcctaacttcaatacatatcgttcttcagctagaccaaacatcaacattcccaatctgcaatttagcttcaaaatatcagaaattcaggacaagagaatcttccaaaagtacaagacaatattaccataagcaaagttaacacaaattctaagttgttcccactgagcaacgaaagacctacctatggaagtgttaggggtttaggggctggtctgcagagaatgggaacgggagatcgatctccaacgaaatccatggccttagcctgatactccatgagaggcccattgggatactcccgagccataaacgttatatacaccttccaactagctcctccaccagttgtagtggctctcacaatacttacaaattccacagtctttgcctaagaaagcaagaaagatgacaaatgatcaatcttattattattagagttgagaatattctgaaaacaaagcttgaattgctgagtactgaccttaaggtcgttgagtttcttaacgcacgaggaagccagacccgccaagtactccctattagtcatgttatcataagctggtccatctagattctgaatagcgtcgatgaaattgaatggatctggtaaaaaaccctaaaaatccatacaaaaaaataaagattatgaaaagaaacaattgaaggcaatcttgttaattagtgagcaagaaactccattaccctattctccaaagcctggatcctcacttcgcggtattccatgtaagcattgtcgttagcgaagcgggcacgaagctcaggatcggattcgtattcgagcccatcaaagctgtccacatcccactccggatccggtttcggtaagtcttctatcactttgtaatccccatacgtcacgcttccatcacctacttcactttcgctctcgccttcggtttcagtatctccgtcgtcttcctcgtccaccctattcggggaaaacttaaagttaaatttttccttatcgtacgccaataaatccgtttctgaagcttgtttttccgtcacatcggagctactattggtagtcatcgtcgtcggagaaacgaacaaaccctagaatttgatttgggattcccaactagacgatacgttacggacaccaaatttaatgatgcttgttgcatgtaatttacagatatgccatttacttcctccatttctcgtgacgtaataatatatgggcctggggattaaatggattaagcccaatagagaaacataaactacaactattcccgcccgtttatttaccgaaccaatggattttaagttttgatggaagcattttttacttacaaagactaattttgaaatttgaactattacttctatataacgctatctaacaaaaccatcaaagtatgtgtaacaataaatctgtggatggaagatagaatcccatcactgagatgagattcgaagaacgatatatcgcagtccagaagatgaatacctcaaagaacagaaatttgatgatggaagatgatgaacaagagatttgattatggaagttgatgatgaagagaataaaatttgtgtttttttttattagttgcccaaatggcttataaatactgatgatcgtaccaactaccaaaccaacaaattggcttttacatcaactaccaaatttaagaaaaattaaaaatacttaaaccgagctgttggataaaaagagaggatgaacttaaaccggagaaatgaagttggctgagatgataatgcctgtaagtatatatgttcactgcacgttatgcaaaaattattcattgtccaccgagagaattcaaaattaagataaggtaagtgacaagtatgaaggatcatcatatgatgtgattcagtgattctaatcgaactaatatctttcttccaaaaatcatacacatattgtcacttaccttgtcctcgtggagtttcctaacgcacaaggaagccagatatatgtgtcaactaactcatctctagtagtcctgtttttacccgatgggtgcttcgagactaccaaaattgtagattccgtttgcgtaatctggtataaatccctgaaaaatccctaggaagcaacaataatatgttcattatcttctttgtagtaacctgaaggcgaaaatggttttcaattaatcttttgatcaatgcgtcttacccttccctagcgtcaacgatacatacagtctacaagttaggcagaaagattataagttacaagacaataaacagacaataatccgcccagagtttgactcggtaaacaacaaagaagactacttatacatatatgcacctttaaattaatatagatttcggttcctggtttaggacttggcctgcagagaactgggacaggacgttcctcatcccctaagaagactattaccttggcttggtactcaacaagaggcccatcagaaaactctcgagccataaaagtgatgtacaacctccatgtagctgctccccttgcagtaactctcgcaacatttaccaactctaaagtcgttccctgtgaaaaatatataaaactcaaaaataaatccaaaaaccaaaattcatatcttaagaaaaaaacaaaacaaaacttctcactcaccttggtctcgttgtgtttcttaacacacacattagcaagctctgccatgaaatccctagtactgttgtagccatccattttaccgtctagatcaacatcgtcgattccgttcaaggtatcaggaagaaaaccctaaaacatacaaaagagatttgttttcatatttatttactgatttaataaaagccaacttcgacaactaactagacaggcatagacaaatctattggtgcatatatattcagctaaaaaggcagaatgattttgcaactgatacgacaaaattaataagtgaagaggttaacttaaacagatataccaacggttacaagaaaagaataaacagttttgattataccttactcttgaaagcctcgagcctgtcattgtagtattcgtcataatgttgctggtgacgtccgtacatcttacgaaccctgggattgattttaaattcgtgaccatcaaagctgtcgacgtcccactctggttcagtttccgctaacacgttatacccagcccactcgctgtcgctgccgtcatccatatcgctgtcgctgctgctatcctcgtcgactttagagataacctcctccgtgaccgatgaactcatcatggagccacggtctgccgttaattcaatgatcggtgtgggagtcatcgccggggaaagaaaattaaggaaccctaggacacgatttggcaattcagaatttttgtcaagatcgatgttggtaagtaattagggctgtgacatcatctttggttattgacttatttccttgcgaaataaattaaaagagtaatttttgacccagtagaattatgatacttacaattttgacccggttatgtgatacaatccagtccggttaacaaaatgtatacaccaacaattatcagtgccaagtggaacagaattgtaaaatattacttgccttctcactgaaaagctaactatagagttttaaggctacggtccaacaaccccttcgtctaaactaattactaaaagaatatctacatatacatttttgcaactattttgtgaaataaatcatgtagttggaacttatttacaatggttgccattggattttaatgtttgtttttgataattagaaaaaaaatcttcgaattaaaaatttgacatttaacaatcttccctaaatctctccacattaactacacgattagttaataaaataaaacttcaaaaatatttaatatcatttaattactacaaaattatcatttttgatattgcttttcttcataattataacaattcgattataatcatcaaagcgcagagatatttgatagcatttaattactacaaaattacaaaatatttagacaataattcataaacatatcataaataagatcaacattaataaaataaatggtttttttacggactggttagtgggacgggtttgataggacgttacttaataacaattgtaaactataaaataaaaatattttatagatagatacaatttgcaaacttttatgtatactacccttaaaaaataaattgtttccgcggtgtaccgcggattaaaatctagtattcatataaaaatgcttgctacaaaatatttagagaggaagaagccttgtgagaaaaggcacaagtttaattcatgttttgaggtttgataatgatatgcacatgctacagcctttcaggtgcaaagaaatgtacaattagatcagacgtactgaagaaacaaacaactctagtagctaccaatgtcacctacttaacatattctagttttttttcccaaaaaggttcttttgatatatactacaaacataaaacattacagcgttacactggagaaaccaaagtgagaaggcaagcaacttttctaacttagatattacaactgaaactaaagtcactccacattcaactactaaaacaaaggaaataatatgataacatcaaaacagtcttcataacttccccaataagatcatattgagaagtgcaaatgatcttatatagcttccaacattagcctttgttatgaaagacacttaacacatattctagtttattactaactatctgaacaatatacaaatattctttgaaaaattcaagaactaattaaacaatacttaatgaattagaaaatgatctctagtaaaaaaaatcagcgctaatggcatgattaaactataaattcctatatattatcattacaatataaaggatatttaatataattttccaataaaacaatattagctggcctagtattatattattacgcaattcactattttgttcatcctctcatcatctgtcaaattttaatcttttataacttcgatgcatcttagccttcgtcaacaatacatatatacaatccgcaaagattacaagttaaaaagaaaagacagtacataatcccttcagagatctcatgagtttgacacaataaacaacaaagaagagttacacatatacctttaaataaactttaaattaatatagatttagattcctggtttaggagctgctctgcagagaactgggaaaggatccttgacccctaagaactttattaccttggcttggtactcaacaagaggcccatcaggaaactctcgagccataaaagtgatgtacaacctccatgtagctgctcccctttcagtagctctcacaacatttaccaattccaaagtatttccctgtgaaaaaaaatgtataaaattccaaataaaccaaaatacgaaatttcttcaaaaaaaataaaaagtaattctttcgactcacgaaccttggtctcgttgtgtttcttaacacacacattagcaagctctgccatgaaatccctagtactgttgtagccatccattttttcgtctagataaacatcatagattccattcagatgatcagaaagaaaaccctaaaacaaacaaaagacatttgttttcatattttttactgatttaataaaaaaccaacttggacaacaaaggcaggcatacacaaatctattggtgcatctatattcagcaaaacaaatagcaactgataagagaaaagaagaggcttatacagatatgccaatggttacaagaaaagaattaaacaaattgtaccttattctcgaaagccttgagcctgttgttgtagtatttgtcataaagttcctggctgcggtacatttgacgaaccctgggattgattttaaactcgtgaccgtcaaagctgtcgacgtcccactctggttcagtttccgctaacacgttatacccagcccactcgctgtcgctaccgtaatccatatcgctgtcgctgctactatcgtcgtcttcctcgtcgactttagagacaacctcctccttggtcgatgtacccatcatggaaacagttaattcattgttggtcgatgtcatcgccggaaaaaacgaaggaaccctagaacacgatttggcaattcaagattctatctcaacagtgcgacaagatcgatgtaggtactaggtaactaattagggttgtgacatcgtgtttgcctttttggctatttccctgcgaaggaaacgtgtcccggtagattatggaacggttattgagtgggatattcggttatgtgatgtaatccagtccggtttacaaaatgtatacaccaaagtggaacaaaaaacttcaattgtaagatattttaaattttatcgggattggtttggtattttggcaagaaaaaatataacagagagttttgtttcaaacttttcgaccatgaaaaaagttctcgaaacatagttgacgagttggccgatgttcatatttttttcttttcatagttgacgagttgactatatgaaaatgaaacgtgggggacaaaatggggattcaacggatatgcaagaattatcatcaaaaagacttgtcctatcttttacgtgagtggtttggttaactaattagtataagtttaaaaataaaacatatttaattatcttgtgaagatggtaaataatttattattatttttatggatgtaattatcgttattattgttgtttttatcgactgtgtatttctgattttttttttaattgactctaatattgcaagtttccgttgacttgtactttttacactagttgaagtatatggcaaatcttctttaccatgagtcgaacataaactcattgataaccattaaaggcacaacaaaatattatagtcatagactcataggtcacatatataggtcccacacttgattacacctaacacttaacataaagcttaaaactataacctcaatgcatctgaagcttggttagctaggcgtcaacatatccaatctgcaatttagaaagaaagattaaagtcaataatcccatgagatctaatcaaaactaacacattacactttacacatcatatacttaaatgactacaacacacaaagaatgatatcatacctcaaatgcaagtctaaacagagagtttaggacttggtctgcagagaatagggaaaggaggtttctcctgtcctacataactcatgactttggcatggtactcaacaagaggtccattgggatactcacgagccataaacgttatataagaattccatgtagctcctcctaattcaataactcttacaatctctaccaattccacagtcgttccctatatgatagaatcaacaacccaaatttaatgaatccaaaatgaaaagttttggattcataagtgtgaatcactaattaatcactaaccttctcatcgtttaatttcttaacacacaagttagcaagatctgtattcaactctcgagcggtcatattacgatacgctacttcttcaagatcttggattgggtaagtcccactcaaaggttctggaagaaaaccctacaaaattacaaaaaattgttctcaaacctaatataatcggcgaaatttttacaagaaaaaccacaaaaaaaaatcgttaccttactctcgatagcctgacgcttgcgggtacgaaattcttgataactgtcttcgtcggagaaaaactgacgatcttcaggatctgtctcgtattcacgaccatcgtagctgtccacatcccactccggttctggttctggcacgtatttatatcttctgtcgatatcgctgccttcgtcgtcgtcttcttcctcttcgactttgtgctcctccatgagcgaagagttcatcattttcgtcgtcgaagcttgtatctccatctcttccttgatcgattcaggagccatgatcggagaaaaccctagatcagatcttaaaaacaatttgagaatttcaaggaaccggaacttaaaaagagtattttactacaagcatgtgtttctctttgtgcataatagttagattctaaattccttgtttgctaacaagtttaagtgttttgacttaatgtagattttatgcatgttttgcagatttgtaaaatcaagacaagatttcttaccaaacccacgcgactcctgaggaaattcgaggattacgtactactgattatattggtattagtgttaatgtacgtggaatattttttcgcatcgaagaggtaagtataaataaaaactgaaattatatataaaaagctattcaatagtattaaccaatatagtttaattatgattgcttatgtgaaacaatttaaggagatctatattctgcctaaaccggaagaaggtatcaggtatgggagagacatgctttgatcattgttggttacggtacaacaaaagattgacaaattgtttttcattgtccaaaacacgtagaggacaaatgttaattcgttgttggtcgatgtcatcgccggaaaaaaacgaaggaaccctagaacacgatttggcaattcaagactctatctcaacagtgcgacaagatcgatgtaggttattgatcaagactcaaataagaaaggcctagtattggatatgtactacaagagagtgggccgaacatatgagaagtctatgaagagcttctagaagaggtgaaggcacacaaatatctcttgtagccgttgaagaggactcacgagtgtctttagcaacaaggtcaaccaatgaccagtcactctcatcaccaagaccaaggaacctcttctcttatgtctctttcagtcttacgttaattgtaaacagccatattctctttgtgtgtctttaaaagcattgtaaacacacaaaggttactatctaattctatcaatatgatttggtctcatattctctcacatacaaactctcttgttcttcataactctcttaatctttaatacaattccgcatattctttcatggtatcagagcataagatcatgtctttatgcttataaatcttctattctcattctattcttcattttctcgaaatctcttcatcattctctagcttcatctcttttaaccaacagataatagctttattcatcagtccgtttgtgcttgaatcatggagacttctcaaaagatgattactacggtgatacttcaagggggaaactacctaacttggtcaagaacaacaaaaacggtgttgtgtggtcgtgggctttggagccatgtaatctcatctaaagctccaaaagaagccaaagaagaagaagaaacggagactatatctcccgaggaagaaaaatggttccaagaggatcaagctgtccttgctcttcttcaaaactctcttgaaacctctattctagagggatactcttactgtgagacagcaaaagagttgtgggatacacttaaaaacgtgtatgggaacgaatcgaatttgacccgcgtgtttgaagtgaagaaggcgattaacgaactaagtcaagaagacttagagtttactaaacactttggtaagttcaggtccttatggtctgaacttgagagcttgaggccgggaacgcttgacccgaagattctccacgaaaggcgtgagcaagacaaggtgtttggactccttctcaccttaaatccagggtacaatgacctaattaaacacttgcttaggtcggagaagttaccaagtcttgatgaggtgtgttctaagattcagaaagagcaaggatcaaccgggctatttggtggaaaaagtgaactcatcacggctaacaaaggagaagtagtggcgaacaaaggtgtgtacaagaatgaggatagaaaactgttgacttgtgatcattgtaagaagaagggccacaccaaagacaaatgttggttgctacatccacacctcaagcccgccaagttcaaagactcaagagctcatctctctcaagaaactcatgaggagcaaagtcaagccgggtcatcgaaaggagagacatccacatcattcggagactatgtgaggaagtcggacttggaagcactcatcaagtccattgcttcactcaaagaatccggtatcactttctcatcacaaacatctagtagttcaattgtgatagactcgggtgcttctcatcatatgattagtaactctaatcttcttgataacatagaaccagctctaggacatgttattattgctaatggtgacaaagttccaattgaagggataggaaacttgaaattgtttaacaaagattcaaaagctttctttatgcctaagttcacatctaacttattatccgtgaaaaggaccactagagacttaaattgttatgcgatttttggccctaatgatgtgtattttcaggatattgagacgggaaaagttattggagaaggtggttcaaaaggagaactctatgttcttgaagacttgtcaccaaactcttctagctgtttttcctctaagtcacatttaggcatctcttttaatactttgtggcatgctaggctaggtcatcctcatactagagctcttaaactcatgttaccaaatatttcttttgatcatacaagttgtgaggcttgtattcttggtaaacattgcaaatcggtttttcctaaatctcttactatctatgagaaatgttttgatctagttcattcggatgtttggacctcaccatgtgtttctagagacaacaacaaatattttgtcacatttattgatgagaaatcaaagtacacttggataacactattaccctcaaaagatagagtgtttgaagctttcactaactttgaaacctatgtcactaatcaatttaatgcaaagattaaagtgtttaggaccgataatggaggagaatacacaagccaaaagtttcgagatcatctagccaaacgtggaataatacaccaaacaagttgcccgtacacaccacaacaaaatggagtggcggagagaaagaaccgacatctcatggaggtggcgcggtcaatgatgtttcatacaagtgttccaaagagattttggggtgatgcggtcttaaccgcgtgctaccttatcaatcgaacaccaactaaagtcttaagtgacttatctcccttcgaggtacttaacaatattaaaccgttcattgatcacttacgagtgtttggttgtgtatgttttgttttgatacccggagaacaaagaagcaagctagatgcgaagagcactaagtgtatgtttcttggctactcaactactcaaaaaggatataaatgctttgatccaaccaagaaccgcacatttatatcccgagatgtcaagtttcttgaaaaccaagactacaacaacaagaaggattgggagaacctaaaagatcttactcattccacctccgatcgtgttgcaactctaaagtttctattggatcatttgggcaatgactcaacttcgacaactcaacatcaaccggagatgacacaagatcaagaagacttgaatcaagagaatgaggaggtgtccctacaacatcaagaaaatcttacacacgtgcaagaagatcctccaaacacacaagaacactctgaacatgttcaagaaatccaagatgactcaagtgaagatgaagaacgtacacaagttcttccacctccaccacctcttagaaggagtacacgcattcgacgcaagaaggaattcttcaactctaatgcggtagctcatcctttccaagcgacatgttctcttgcccttgtacctctagatcatcaagcgtttctctccaagatttctgagcatcggattcctcaaacatatgaagaggcaatggaagtcaaggaatggagggatgcgatagccgatgagataaacgctatgaaacgaaatcatacttgggatgaagatgacttacctaaaggaaagaaaacagtgagctcaaggtgggtattcacaatcaagtataagagtaatggagatatcgagagatataaaactcgcttggtggctcgggggttcacgcaaacatatggctccgactacatggagacttttgctccggtggctaagctacacacggtgagagtggttcttgccttagcaacaaatttatcatggggactatggcaaatggatgtcaagaatgcatttctccaaggcgaacttgaagatgatgtgtatatgacgcctccacccggtctagaagataccattccatgtgataaagtgttgagactacgcaaagctatctatggtcttaaacaatctccacgtgcatggtaccacaagctcagccgaactcttaaagatcatggattcaagaagtccgagtccgatcacactttgtttacattacaaagtcctcaaggtattgtcgttgttctcatctatgttgatgatcttatcatcaccggagacaacaaagacggtatagactctaccaagacttttcttaaatcttgttttgatattaaagatcttggtgaactcaaatacttcctaggaattgaagtgtgtcgctctaatgctggactctttctatcacaacgcaaatacactcttgacttgttgaatgagacaggttttatggacgctaaaccggctcgcactccacttgaagatggctacaaggtcaatcgaaagggggagaaagaagatgagaagtttggcgatgcacctctctatcgcaaacttgtaggtaagttgatctatttgacaaacacaagacctgacatttgttttgcggtaaatcaggttagtcaacacatgaaagtcccgatggtgtatcattggaacatggtggagagaatactaaggtatctcaaaggcagctccggacaaggcatatggatgggaaagaactcaagcaccgagatagtgggatattgcgatgcggactatgcgggtgatagaggagatagaagatctacaactggttattgtacgttcattggaggtaaccttgcaacttggaagacaaagaaacagaaggtggtctcatgttcgagtgcagaatcggagtatagagcaatgagaaagctcaccaacgaactcacttggcttaaagctcttcttaaagatgttggcattgaacaacacatgcctatcaccatgcattgtgacaacaaggcagcaatatacatagcctcaaattcggtgtttcatgagagaaccaagcatattgaagtcgattgtcataaagtccgagagaagatcatcgaaggagtcacactaccgtgttatacaagaagtgaagatcagttggcggatatcttcaccaaagccgcaagtctcaaagtttgcaacttcatacatggcaaattaggacttgtggatctatctcactcttgatctcatgttctctaaccatggacatcacactctttttcccttagtaaagtttctcccatgtggttttctttactaaggtttttaatgaggtgatgaatcatgtgttccaagcttagactcttgcataagtcttgcgcttgagggggagtattgatcaagactcaaataagaaaggcctagtattggatatgtactacaagagagtgggccgaacatatgagaagtctatgaagagcttctagaagaggtgaaggcacacaaatatctcttgtagccgttgaagaggactcacgagtgtctttagcaacaaggtcaaccaatgaccagtcactctcatcaccaagaccaaggaacctcttctcttatgtctctttcagtcttacgttaattgtaaacagccatattctctttgtgtgtctttaaaagcattgtaaacacacaaaggttactatctaattctatcaatatgatttggtctcatattctctcacatacaaactctcttgttcttcataactctcttaatctttaatacaattccgcatattctttcaggtactaggtaagtaattagggttgtgaagtgtttgcctttttggttatttccctgcgaaggaaacgtgtcgcggtagattatggaacggttattgagtgggattttcggttatgcgatgtaatccagtccggtttacaaaatgtatacaacaagtggaacagaacttcaattgttaaatattggaaactttttcgggattggtttggtgttttggtaagaaaaaaatcatattaagttgatgaatgataagttaaatttaacagcttaccaaaaaaaaattaaatataacagagttttctttaaaacttttcgaccattaaaaaagttctcgaaacatagtacacgagttggccgatgttcattattttttcttttcaagactatatgaaaatgaatatagagctagggttcacattaagatattccatcaatacataggttgaacatctatccagttaagtggctcaaagccttgtttcgctatgaaaatcgatcgttgattttgtagataagttcttcgatgttgatctccaaagttttgtagatacttaaagctgagtcaaacctcccatgatcaactcatatatggtttcttatgctttgcttaatttatgttggctgcaattatgcaagtctagagtttagttctttcaaaaaaaaaaggtttaggtttagttttgccttagtttttaaaacagtagtaccaaacactttaaagaatgttagttcggtttagatttttgattaagtacttagtacttactaattgtgtatagtggaaccaggcagagaaaaggatagacgaatcaatcttattgcgcaaaggatccaaagaaacagtaaaagccaagaactagaatatttacaagcccaaactgtcattaaaccattaaggcccataaggttcccgtatgattgaactgaatcaggtcgagaaaaagataaacagagaagaaagagagtgatacttctttagggaaaaatgaaagatagagggaaactattgagattgttagtcaaacaaaaggttactattagtaaaacgatagtgggtacagctttgataaacttaaatgcattcgtaaatcataaaatacgtaattaccctcattttatccaacattagtaaggtttatcaaagatagctgtaaagttcatagaattctagtcagtttttcacaactttaagtttgagttttgaggttttctccttcgttttgattaataaataaccctctctcttgctcattagtgcatgtctttaacttctccgcaaaggtatcatcttttctcatttttttttttgtcaaaacttctatgggtgtaagatttatgtatttcaagatcggtggtgcttcgagtgttgtaaacaagatttctgtatctcttttcatcgaaaaatgggtttctcatttgtcttcccttgcaaattaataacttgttcaaaaagaaacatgatctcatatacatcatcgaacttgttaatacaatttctaaatgattttgaaaaatatgtttataattgctgatcatatgattgaatcttaaatcattttagctattataaataaagttctatttttttgttgttgtttttatctgttttatagctaagatcacggttgattagttttaaactttaatgaatctatattcaacagaaatggaagactacaatggtggttttggtggcattggaaccgggggagggaaaggcaaaggaaaaaatataccaaaccaacgcaagctagatgttgaagctcaacgtgaacaagcgaagaaaacacaacaagatggtgaaagagcagaatcagtcgaggaatttccaattccaaaagtgacgtttataattttagttttatactcttttttttggttattggaatgttaagaatattattttgtttatatgtctaaaaattatctatgttgtataggattatggggatggtagtcgtatcgatttctgttggactcgtacacataagcatttgctacagagaattgtagagcaaaaagaaggtatcaattatttattttcttattccaaaatatactagatgtattatatagaatagagttaacaatgctaatatatttttgtacattgcagacgattgttgggcttgggctctagttagaatcttgcaattttactacaacatgaacattaccgcaattgctgagcagaagaccttatcaatcaaatcacttgtcaacatgtgatacttgggaagaaagaagcagagaacaataacaagttagacaaaaaaagtttggctgttacttcattaaagagagctattgactacattttcgagaaaggaattgaaagagattatggcacacaggtttccattcgtttataataaagaaggatatactttttctatatgttacatgcatttttagctctttgtgcatatagtttgtttctaatatcctgtttaggaaaaaaaaaacaaagtgacaagcgtttccacatactatatatgtgtgattttttatatatgtttagcagatgtataaaataaaggcaagttttattaccaaacccaacgcgactccggaggaaatccgaggattactactcactcaaggtcctattggtataagtgttgatttatgtggaatatttcgtcaagtttatgaggtaactaaagaaatgtatagtttgtatttgtatagaataaaactatccatcaatacaacggctattaaccgataaaatttatttatgattgtttatgtgaaacagttcaaggggatctatgttctgcctgaaccaaaagaaaatatggaaaggcacgctttgatcattgtgggttttggtacaacaaaagatagcaaattgtttttcattgtccaaaacacgtgggggacaaaatggggattcaacggatatgcaagaattatcatcaaaaagacttgtcctatcttttacgtgagtgaattggttaactaattataagttttaaaataaaaacatatttaattatcttgtgaagatggtaaataatttattattatttttatggatgtaattatcgttattattgttgtttttatcgactctaatctatggcttgccagactagtatttcttaaatttttaataattgactctatttgttgtaagcttcctttgacttgtacatgttacagtactagttaaagtatatggcaaatcttcttagtatgcattatttgaacatagtctcaatgatacatcaaccattaaaagtacaacagaattatagtcataggtcacatatataggtcccaaagttgactacacttaacacttaatataataaagcctaaaactacaacctcattgcatctgagccttggttagctaggcgtcaacaaacccaatctgcaatttaggagtcaacaacaagagatatcaaaactgacacatttacactacacatcacatacttagagactgcaaaacacaaagaaagatatcatacctaaaatgcaagtctaaacagagagtttaggacttggtctgcaaagtatcgggaaaggaggtttctcgtttcctgcatagttcatgactttggcttggtactccacaagaggtccattaggatactctcgagccataaagttatatatgaataccatctaaatcctcctgagtcaataactctgacaatctctaccaattccacagtctgtccctatgaaagaatcaacaacccaaatttaatgaatccaaaatgaaacgttgtaaattcatttgtgtgaatcactaatctcgcccaaatcactaaccttctcatcgtttaatttcttaacacacaagttcgcaagatttgtcatcaactcccgagcagtcatgttacgatacgctatttcatccagatacttaattgggtagattccactcaaaggttcaggaataaaaccctacaagttacacaaaactgaggataattctcaatccaaaaccaaatcgatgaaaattttacaagaaaaacaaaagaaaatcgttataccttactggcgaaagcctgacgcttgcggatacggtattcattatactcatcctcatcggagaaaatttgacgatcttcaggatcggattcgtattcacgaccatcgtagctgtccacatcccactccggttctggtcctggcacgtatttataccttctgtcgatatcactgcctccgtcttcttcttcctcttcgactttgtgctcttccattagagaagaattcaccatatccgtcgtcgaagcttgtttcaccgtcgattcaggagccatgatcggagaaaaccctagaacagctctttaaaaacaatttgggaatttccaagaaccagaacttaaaagagtattttgagcttattattttgtaataaaatcaacacattgcaacacatttaaacaaaagatctctttccaaattgagtgttttttattcaaaccaaagggaacaacactttttgtttatctgtctgagacaacaagaagaacaacaaaagaaagacaaagcacatttgagtctccctcgctactctgcagtcttattattcccaggcaatacctgcaacgcagttctgttactggtctttatagaaagttccttcaccatcttctccagttgccttatgctcgtatttttcaagttctcttcatcgattgtcaccttcttcttcttcttaccctcctcgcctttgctctctccattctcattgttgttaacattcatcatcatcatctccatgttgttctccttgttctcattgaccagcttcagaggcgagttctttaatggagttgttgatttgcttggtcttgggaattgagttgagattgattctactgcaaatggagataccagagttgttttgatgactttagcctcttcaagacgaggaggtgaatttggagcagtagcagcagagccttctgatcccgaaagagtcatctcttcatccgcaatatcagatcccactacggcttggttcgaatcagcttcagagatagtgccgtctgagtcaacaccagaatgattttcttccggttctgtttcggaatcactgtcggtttggtccaccattgtctcttcatcaaaattgttgatcttctcaggttcagagtcattctcctgaattgcctgtttggtttttgaatcaccagcatcactatcggtttggttcacctttgtctctggctcagcatcattctcctgaattgcatgttctgtttcttgttggtctactgacctatcaatagctagaacgttcttggactctgcgaaagaaagaagatttgatttagaaatgtaaacaagaaaaatggttaagggtagttatttataatactagttgcataccattatcatcattgtgtgtctcagtgattgcagattccaagagaggaatatcactaacatcaacatatatcacaagatctccaatctcctgatcattgtcattcttcttcggaccttcctcacagatggcctgcaacgtttcttcttctttgtctacttggactaagctattctcagattctgtaaaagaaagctacatcatttagaaacaccgacaagaaaataacagataaacactgattgtatatgaatgcttgcattaccctttttatcagccgtaacttcattcatctcttccttgttggcctccgtgtttgcatccataacaacaattacctcaa

SEQ ID NO: 1441 - DNA, 33563 bp, Arabidopsis thaliana
caagaattgcgagattcttcatttttggattttttaggaaacttttgaggtttaagtatgtgaagtgagaagaaatgtggttttgatggtttttgagatgaaatgacgttaggatttatatagaagtattaattagggttttttagttttttttttttggttggtgataatatcgaattatgtatattattggaatattctctgatattctcgatgatattctctgaatacttgatgtttgttgtggatttgagatattttttcactaaaattaaataatcggatcatgatatttatttatttcaaaagtaagtaaatggtcattttattgaactgatatcgatatcttatgcatgctccctatatttcaggtttggggttaccactaaagaagaatatgctggaatttaagtcttaattttgggatattccaacagatatcatgaaattttgcgacgatctcttggcacacgaaactcagtggagaaaatcacgagtggcaacaaaatttgacagaatcaagggaaatgttggcaagaatcattttagttgagtgcattatctcgttaattaatatattctttttgttctttgtacaagtaattaaaaatcaatctcacaaaagtatgcacaatatatatgaattgtttcataaggtcgtacctcctttcaaccagcaactaaatctctcagcataagaaaattgttagcaagcagtaataagagtattcaagtagctagaagcctagaagtactagttaattgttatcgtatatatatatatatatatcaatcctcattgcttagatattatatattaagcaacaatttcacttactaacgttagattaactttatatagttaccaagtcatgggtgatggtgcatatatgcataacgttttcttgagttgatcctaataaaagctcgtaatattgacaagcatgatacatggtatataaactatgattcatattttattacaagttttgaagattttttttttctttgttttttatttgaaatttaaattttgaagctttgttacatatgattttactaaaacaattaaaaaaagtttacttcgaaggatttgtttgaatgtgtttatataactttttaactctttttttttaattactggtagttcaattctgaaaaccttatatttccattataggagattcacaccaaattaaatttctttctttaggagaagaaatctcttctaacgagcgtcgaatctaataattctactatcacctgacatatttaccacacgaccaacacatacaccataatgttttatataattgtgtagtataacggaatgaatattggtgtcaagagtttataaaagattcaattatattataagcagctaattcttagatcagaagttaaaccatacaagattacaagttttttttgtgtctgacttcaacctagctagctagtcaatgaattctaaattctctttagttctacaataatgattatgtgatatataatggtattcagaacataaaatttgatataaactagtgattaaaaaatgattggagtcccatggataaagggagcagtcgcatctccaagtcaaaggatcctccaaatcagaggaaaggttcggttccgtagagcaatcaccaaatcgaaagtacgaaggaaacgcaggctgggtcccacacgcaacttatattagtggcacaaaccttattttataatcttaattttaattattcgtgattattataaatcttatcatttcaaacttgctgtgagataacaactggaagtaataatgctattagattatgttgcgtccttccatactttcagcatccgttaatttcactcatagtacgtggtatgttgttgttaaatcttaactacttaatctagtttaatcggtgtttatgcaactttcatttcagttcacacttgatattttaatcgaagttaactatcgtcaattataaatacttagattttcatttgtattcaatgtaagttttcgtatactgaaaacaaaccatcttaactgaaaataaatataaatttagctttcacaagttcaaataataagcttttagttatatatgtttatatgaccaccaaataccaaaattcattataaaaaatttacaaacttttgaaaaaacccaacattcagaaactttattaaaatatacaaactattcaaaacaattctttaagtttccgttaaagttaaaccttacatttttttcacttgtcataactcataactaacttatattgacaaaaatcaaatagttttggccatttacaactgataacttctatgtagagtaaagtgataaacaaatgataagagaaatttacctaatgagaccatagacttctgaaaaacacggctaacatatttgaatataatataatgcaaatacgcggattcaaccatataatgtcaacctctatatgcacaactgtctatctccaccaaataatatttttaaaattttatataactctgttttcctccaaacattctcttgtatatatactctcatctcttcttggatcctctcctaaaaaccaaacaaacaaaacttcttcataccttttgcttgctcctacaatctctccttgaatccgaatctttcttcatataatgggaaactatgtttcttctgcactaagcaaaacgtcttcatcatcatcatcggcggcgaaagtgattctccccgacggtggagtacgtaacattcacgcgccgatgaaagctgccgagcttatgatggagattccaagcttcttcctcgtcgacgcaaagtctttaaagatcggtcggaagttttgtccgttagccgccgatgacgaccttcaaatcaaaggctgccacgtgtacgtagctttccctatgacgcgtgccacgtcagctgctaatgcttcggatttggctcggttattcgtagctgctaagaaacagcgccgccaccgcgtgggaagtgatcattcttccgccgccgtgaaacactgtcataataacggaagggtttcgccggacggggaaggagatgacgtcaaggtgatttcagcgggatcaaagctgaacctagaagatatcgaagagttttcggcggcggagtttatgcataggatctcagtttcgaaatctaagaaaccaaaattagaaactatagttgaagaatctttgtcttaaaactaaaaatgaaatttcatttttcgaacattttttcatgttttgctattgttgttttctaatcctctccgcgcaagtggcttggcttctcttttgtggtattaatgaacagaaagagacattattcgactattcgagaatgaacatgttatctttacaatatttttttttgtctgtctacatgaaaagcaaattccttggttcactcgtttagccttttttttcggatttgatttcaaccaagaaaaatgaaaattataaaatgacagtagaaaaaaaatgttattcaagcaaacaacaagtgtagttttcaaaaaaagtataatacacgataattctttttctttaacacccaacttagtgatttcaaataagagtttagatcagcattacacagtaacacagaagacagaaccattgaaaacttgtaacataataaaactgaaggatggtacggggtggaattgaaggaaatgagtatttgaaatcaagaagtttggtgttaaaatgttgctttgggagagaaaatttttgaatcttaaaaataaactgtaattatttacttaactaactgtcactaattgactttttctgaaatgaaaaatacaaaccatttatattgataaatttataaacaaacaaacaagatttgattcgtaacataatattcgaatctgtgactaaatatatctaattatagtagtcattttcacgtagagatgtgtgtacttgggacttcatcaatcgtgttcgactgtttggtcatgtcggttaagtttttccgcggatgcaaaatcatttatttatttattatcaattaactaattcaataatcacgtattttttcttctttcttaaagcccgactaatacgtgtccattgggccttctcgacacgacgacgccgtcgctcgccgttggtctctgtattgggatttaaataatcggcgaggccaatgccttctgatcctcaccaaaattgaacaccgtgggtgcccagaaggaagattctcgccggagatttcaattgtattacgattccaacttttctattgcaaaggttcaatttttatctttttcgcaggcgccggtgatttccggaataacgatttagggttttaggatgatcgtgttcaatccttgatgaatcaatctacgtcaaagagaaatctgggttattagaaaagtggaaaattgtgttcttagtgaaggtaatatgggtgatcaaagtatatctaataagcctctggatgagaaggtttcaatggatttgacttgtggtcaggaggcgattttggaagagcttaggatttgtttacccaaatgggttacacaagaacaagtcacagatatgattagagggacatgtaggaatatagtcgaaattgttgataatttttacgagcacgagactaaattctatgagcaagtttctgctgttatatctttcacttctagagatggaattagttcgagtaaccacgatgcatttgtttcgaaactggagtttattcactgtgaaacagagcggagtgaaagttgtcagccatcgcagtttcacaagcttaagagcatgagtagttcacagaagagcagtatttctcctgtgaagaggaacagaaagattaaaggtaaaccaaagaagaaaggaaaagcttcttctaaggtagaatctggaggcccaaagcaagcttcaataactaaattcttcaacaaagtttcttcagaaggaaccaagtcttaggaggctaaataagcgtattttggaagtaatatggtgacctgtttctgccaaatgctaatagagggatgaactgttgcctgatgtcaacagatactacctcattgatactgcagaagcgagaatgttggaagattggatttctcttactcatattcagaatggtaagcaaactatgaatcctggagttacaattgactcatcttcacagcaactatgaccgaaagatctcgcgctggcacgtttttgcaatgtaagttcaatgttttgtctacgatggcctcattgagaaagctgtaatcatttagttgcagaattatatcagtttttgagtcagtgttgatttcaaagagcattgcatttatgtttgaatgttatctggttcaactttcatttcctgatatgattctggtattgagtctgctgcttaactaaatccagtgttgtatttacgagcttgtattccaaaactcattagcattgaaaacggaagaaagaacagacgtatttgtcttctttacaatttcaaaacaactgattctatgattgctgttacaaggctaaaagaaagtaaattaatatcctcaagatcatggttctgctgcattctattgaatatgatctctagcaacagcttccattgtcctaaaaccttcttacaacaagttgaatatcgcttcgcgtgatccaagccatgccccgtgaccaatgctatctttccggtctctttgtcctgaaataccaacataagaggtttctgtttccactaaagataagaaaaaacaatataagaagttatgaagcaggagaaaggtcagtgtgcaagtactttcatcagcagaccaacacacaactgaagggacagagttggagaatttattttcagacataagttgaccagatttgatactccaaatgcgagtatagcagtcatctcctcctgaatcaaacacccaagcaaaatgaaattagatcatcttaatctaatcaaactattgatgcttttccaagatccaattatgatttcagaacaaagggttccttttattacctgacaaaataaatctttctgacgggtcgatgccaaattcgatgggagtatgagaatttacatgtccttcatatgtctgtacaccgacccctctcttaaccatgcgttgatcgtatagcttgatctaaaaaagaaaaaaattgcttttgtcaatctcgtagtaagtgtatgcagaagctagagctagtaggtactcactgttccatccatggagcttgccattaagtattgatcagaagtttttagtgtcttcaggctagagaaggaaggagcaaattaatagagtcacaaaaacaaagaagtaaagaggattttcatatatggtttcagtcgtggaccgaccatgtaagagatgacggcatatagattacatgagacgggtttatgtttccttggagctgcaaaaatagaatgttgtgacttgtgaggaaagctcaagagaaaaaaatgaaaagttgtgaccagaacaaaaagttgtgaccagaacaaagtcgttacatgatcttagcagtacctcgaaccattgtttctttgtagaagttagaccggttttactcgatgattgatatcgtatctggtgtctagtgagccttggaaaaggtctacctggtctctcacgtagatcaactgacacaatggctccatttctgagtccgcaatgaacaatgtttccctgagaaaaagaagtagaagcaaaacataaatacatgtgtccttcagttaaaaatgaagacatgactttgacttgtcagaagggaggttcagacagcaagttagctggagttatatactcaactaagaaacagtatcgagccgctagaaaacgatgcatctcggagcttggaattaagagaactttaccgattgatgaaattgtagagcaaaaacatcgcttttgcttcgaagaaagtatgaacctactcctgtttccaaatcaaccaaaccagctcctaagtcggtacctgtaatttatcaaaaaatcttttaataatttccatatgattcttgaaccgagtccatttacagaaaaatgcatttgctctctaggtataactgtaactgtaataaagtaaaatcttgggtgacaaaaatataacatcgtaagaaagagaaggtaccaatagctgcatgactcccacttatattgcaatcagatgtccaaatggtacactcagaggaaacattcccttggaggcttcgcggagtaagtatgttcacttcctcagcaacatttaagataaaaatcgacccacggccagttgatcccaatgtagttattctgttttctcatgtcaaggttttacaaatgggaaatcaagaccgagagtaaaagataagacacatttaaaggatacaatgcccggtttacggggtgggagttttcagatgcatcagatcttccgattaactcaatagaagatatagaagataaggcgaccagacaaggttgcgtaggtctcaatatatgctcaggtgcttccctctcttctgtatcgttttctttgcaaggaagaacagaaactggatcacactcgattacaccatcgtatacttgtctatctttggaaactcttagaatgctgcaaaaaaaaacttccaaagcatataagttggcctgcaaataatttaaacagctctactaactcttcaataaatggaaatacataaagtttcatagtccagttttgaacatccataaaaaccaataattccaagaagctgactaatacatacctcaagcaaccaccagcactgcctgctactaggatgttctttctggtcaagcctacaggtgtttgtacatcaacctgaaactgtttcaaagcggtatcgccaatgtcttctgtggatccgtatctccatacctaaacataagaaatgtttcatatctgtcttctgtactcttaaataagaaacaaaaaggttaagttattctaggtggtaattaccacaggataagaagcttgtgtcttttgaatctcgtccctgaagttagacatcttcttgttgacagaaataacattgccatttaactctcgggaataaactagcttcaatgcttttagtttagtcctcttctgataattagtttcctgatgcaatttccatataactaatcactgatttacataaacaagttcaagctagagaagattggagaattctcattgattctgcaagactcgacctttactacataaacttgaaaaagttgaatttgtagtaaactgacctgttcaggctttggctcgggtttttgtttcgttcttgaagaagaagaagactttgcaccagggataggacctttaatgggaaaatatctgttcttctcctcgtcgtaataaaacccaggaagttctgaaaaaaaaaaaaatcaaagataaaccaaattcccacatcaaaatctcggatacgcaatcgaaaatagaagaatccgtcgaggaagaagattcagacctggtttcatgttgtgtcggacttggagtcgactctgttctctgtgttctttctcatcagacaccattaaaggctaacatgcgccatataaatagctttaggttttaagaattgaaccggaaacgtgtttttattcaattatggtttaaaatggaccggtttatgatccggtttacaatagtgaaaaacagaaaactaaaacgtatatcctttttgttcacaacaaacaacttcaacattatttaaagggactctccacaaagctttttagttcttgtgctgtaatctcccactctcagcaccagcaaaaggatcaataataacatttaccaccgcgggttttcttgcggcgaacgactcagcgagagcggatttaagctcatcgggtgtttccacaatataacctttgcctccaaaggcttcaatgagcttgtggtagcctgcattaggaacaaatgatgttggtgctggatcttctttatgaggaccggagatttcttcaggtccccttcgatcaccgccgtagacaccaccattgttgaagactataatcaccacagcaagattgtatcgaaccaatgtctgcaatcatcattaaagacaaaagttcagacaaaagacaatttccacattatgctaataagtatgtaaatctttttactacctcgacttccatggcgctgaagccaaaaccagagtctccttcaacagcgacaacaagccgatcaggagaagcaacagcagcagcaatacaataacctaaaccaacacccatagttccccaagttcctgcatcaagccttgtccttggctctttctgaaccaaaacagatcttcctacatccattgtattagctccttccgataccacaacaggactcggtccttccacagccaaaatagcgtctctgattatcctcataggagtcaagaaattgaaaggaaccacatctttagcaagctgtatctccatcttctcaccattctctttcgccttcttcgaaatcgattccacccatgaattagacttccctaaacaaaaaggatcgtctttgatctctctattcaacaatccaatcacagttttagcatctccaacaatccccaaatgaggtttccttagctcaatctcttcctcagagacatccaccaatataaattttacatctttatcccatttaggcgactctccgaaatgaagaagccagttaagcctagctccaaccaccaacgcgacatcacatttcccaatagcaagagacctcgccgcagtcgccgagaactcgtgtgtgtccggtaacaaacctttacccatcggagttggtaaaaagggtattccagtaatttcaacaagcttcttcagctcatcttctgctctcgaatacgcagctcctttaccaaacacaatcaacggcctctcagctttcctcagcaacgaaaccgccgattcaatctccgatctcagagatccacgaatcggttcttccttccgtgatctctcaacctcatccaccaatttatcagcttccgattccgatatcttctgacgcaacacatcagtcggaatatccagataacacccaccgggtcgacccgaaacagctcgatccaaaaccctagaaacacaatcagggatttcacgaacatctttcgctttctctgataatttcgagaaagctttaaccgcttcgatctgatcaagctcctggaaatctccacgaccaacatctctctgatcacaagaaccagagatcatcaccatcggccatgtattaacccaagcgttggaaagacccgcgagcccatgaacacaacccggacccgaaaccgttaaaaggatacccggtttacccgtgaggtaaccgtaagctgaagcggcgtaaccagcggattgttcgttgtggaaggcgatgaaacgtatacctaaagccatagctcggctagctagagacgtgacggggattccaacgacgccgaacatgtgggttacgccgagatgagagagtgacttggccacgagaacgttgccatcaattgacggtggagtggtttctgatttatccgccatgttctcttggatttgctcaaagtttcagtttcttctacttgctttagtttctttatatagccttttgtatttgtgttttactcttactgtgattacgtgttttgcattaatgctactattagcctattattgacttctttatttgcattttgtgtgttctctgaaaattttatctacaaacttgtacacgtaattatgtgtgttttgctaatttaaaagttatctacgtagcaaatagtaaaattctcaacaaattgattatacgaccaaactatacatgaatttctttatttttggcaacttacattattcaataacaaagtagtatgacagataacttaatttacaaaggtattgtgatttagtgattcaataaaatatatctttggttttggtcactagcgactcctacttacctaatcttctcaataatttggatttggatgtgataaaatgataaatttatgagttcatggtttggaacaagtgaccttgtataacccttgagggctgccactagaattgttttgtagttagcaaagaaaacaaatcaaatttggatttgttcttttacacaaagtggatgattttgaccacgacaaaactagagcaccactcaaagatttctcatgattttgcgagtctacaaaataaatttttttttctccaacggtagtgaattccacaatcgattgagctaacaatttatcaaataaacttggactcgtttaatttaatgaagaaaacagaagagcttgacaaaaagaaaaaaacaacaacgtgtggaaccattaacaatcaaacatctttaatggcacgcacgtcctctctcaaaaaatttcctcacgtatacatacgctcaaaacattcaagaaccaatgctaaggttcccatttgagttctttttgtaaacaaaaacatggcgagatcgctcaagaaatcagccaagttgagtctaagaagagtccggatcaattcaccttcgattaggttcaaaccggactcgagttccatagagagagaccaaagaatcgagtttctaggcgaaaatggtgatgatgccggatccggagaagaagacaccaaagaagcaaacaatgaaagtgaagaggttgaagataaggaagaagaaagagtcaaagtaattgtagaggaggaagaagaaaaagaacaagatgatgccaagagctttaacattggaggcggagaaggaaaaaaagaggcggtggcagcggttgaggcggttgaggaggaggcggaaggcgggaatagagtaatggtggtggttgataaagcgcttgcttctaccggagctttagaatgggctattacgcatactttacaaccacaagacactctttttctgttatactttgcaaaaccgtttagaaaaagttcttctctttctctcctctttgtcaattttcttgtttaaggtttgtttggtttggctaatgaggtttttcggattgagttttaggtaaaaggaagaaccgaaaacgcgaggtgaaaaccgatgaattggtccatactttaaagaaactgtgccaaacgaaacgacccggggtgagtcacacttggtattcgattgtttatacatataatgaaagctacactattactgttctgatcaaattctggcgacgtgtggatttcttttatgaatgtcagatagaagtggagataaggaggttagaggggaaagacaaagacaaagggcagaagatagttgaagaatcaaagaaacaacaagtgagccttttagtggttggacaagagaagaaacctccggtctggaggctattgaagagatgggcgtggaagagacgccgtggacacgaaggtgttctcaaatactgcctcgaaaacgcctcttgcatgacaatcgcggttaaacccaagaaccgcaagctcggcggttacttaatcaccaccaaacgccacaaaaacttctggcttctcgcttgacaacaacgcaagttttcctcttttgtgtttgtatcattcataaggctttaaaattttttcacctatttcatcttttatacatgaaacaaacttgctccagtacacaaaaatcaaataggcctttcttggattattgatataacaatgttactgcacaagaactatgaacaattttccctatcttctgctggttcaatcggttaatgattccgagattctgttaattaacacaatacattggaaagcaagtgagacttcttggtgtttactaaccttctctttttgagctcagctttcattgtcatcgtttcgggtttggtccaaaactactgaacccaatgcttataagcaatctggtgaagctgatcatatcccgcaagcactcctgctcctgctactccaagaagcatgttcgcagtaactcctctatatagcgcatagaacccttccgacttcaatatctctcttaaggcatgaatggtgttccggtatttaacaggttgtcctgatgtaagcatcattctcctcctaagtgtgtcaaaagggtaagcaatgacgcctgcagaggtagtaatactccaacccaatagaaaactagccaagaagtttccctgtcacggaatcaaagaaccatttttagctattttctgctatagattaagaaataataacggcatacatagatgacattacctctaaggaaccgactaacacaatgggtttgatggtgtcgtacatcccaaaatacattcctcggtaaagagtgattcccactattgacacaccaaatccacggtaaagacctttaataccgtcacttgacaaagttttacgatacacatcgatcatccctttaaactgtctcttgccattaacagaacattcctttgcatcagtgcctaaacgggtccgcgcataatccaaatggtacagaaacaaggaagttgttgctccagcagcacttcccgaagctacatttccagcaaaccacttcaagtaaccatctttctctttcgaacatccaagaaggttcttgaagtaacctttaaatgcaaagttggaagcctaaaagcaattaaatttagtgacaataagaatctaacacaaacctcagcacgctgatctaaagtaagggttcttggaatgtagtacctgtgtagggaaatatcgtatgacattggcttggtttcctctccaaaaggacaaaacaccttcttctctatagattctggtaaagcaattacccaaaccagtgtaaggtcttatgagatgtccagtctttatcatctccccttgattctgcagtaaaagcttcaccctttcgattggagcagctgcagatttggcaacaatggctgcagcaccacccatcacaaaatcagcagagaatctctcggattttccgatcaaagccatcctcttttccctcacctaattctataccaataaatatagagatgttatgggcaagagtttcttctgggttctagaaatatcaaatcctaaagctaaaaaggaacaaaatttgataataaaaggaaaggttttgaagtgaaaaacctggagattgctaattgattctccgccgcagagagaagaactcggcggcgaaagattgatttccaggtcgaggaggagaagaagaggaggcgatttcgttatttcgttttgagaagccaataaaatagaaaagagataatcattttctgtgaatttcaaagctggaggtggaggacagggcaggagcaatggctggttttttctttctttacttaaaaaaatggttttgtccttttttaatttcgaatttgaaaccaggatctggaaatttctggttcaattaaaaccggacattttaaggaaaaccggagatggttcggtatatggtgactgtctgactgatctgtgtcttctttttcataaaggtttaaacttttagttccagagactgggagcgaagcaatggaatcaatgacgccaatctcgtgccctacgactcctcgttggaaccaagacagaccatttctcactggtcgcttccatcaggtgctcgatcttcagatgtgcttgattttagttctctaattcgttcaaattctatttaattgtgaacattggtaacttctgagaaaaagtagttttgacaatgggtttatctcaggaaacgagggcaagctccaagtttgctgattctaagaggtttactttagactcgtctaggtattttgaaattttatactaaaaattagtaatacatctctgttttaacctcccaaagtctgttcctttttcatcttattctaaagagtcattgacctttatattttgctttcagcagttctggagtagagcaggcaattggctgctatgacacaccggttcaggtttgtgttattttacaaagcaagtctgtccctttttttcttggcttccacttattctgtgagattgttattatgtaaccttgaaactagtgttggggtccttaaagcttgggtttgagttgtgtagtttttacaagttggcatcattgtaggtgaagttggtttctcgttttcgtggcatagactaggataattgacctgagctaaacaattgtggaacttcctagcctaggtttagaattggtgtcacctcttttgttatgtccatttcagtaactgttttttattccttttggcatgcaggagcttatcgtcattgatgatctcttatctgcgttggttggaattgaagggagatatatttcaattaaaagattccatgggaaggaggatagtatagctttccaagttgatccatcaatggatttggcactacaggtaagtagtactcaacacaataacttttggttcctatcccaaacatttttatcatgatggtctacagtagtcaactgcaaaaaatctgtgatttctaaccatgcttgatctgttctttcttagagctaccggaattagtgcatatgtatcatgtatgtacaaagtctttcacatattgagactgttacagtgatgtttgcaaagtgtatatttatgtttatgaaacttgatgcatttcattggtgttctgacttcttgaaagttcaattatctccgaagtccaataaaatggacacatgcattactatgttatgtctaggatggttctctcttttgaataggatttttagagatgttataacggattaacattgtaattctttatttaattggctcttctcatatatattgaccgttgcaaataattttgcaggaattggcgaaaagaatatttcctttatgtgaatattatctgctgattgaccaatttgtggagtcaagctcgcagttcaagaacgggctagttaaccatgcattcgcggctgcactcagggcactcctccttgtatgtgatataggttgctagctttgtggaaattgtgatccattgtttgttgagttatttttcgttccctttctgttacagatgggggattttgcgaactggatatggatttttttaactaatagtcaagtttggggatttactcagtaaactaaaaatatgaacttggaaagctcattttagaatgctcttagtttgtttattgggtttctttcttgtccactgaattggtgtttttttatcacatttctgagtgtgtgtatatgcatatgtatgaatatctaagatgacacatatagctcttactgtcttctttgttccaagttcttactgtctctctaatccctctcttactattgccgcattgaataaactgatagtctgattcttttctttccatttcacatcttgagtttcgtgtctaacacatgtcatgcattttttggactgaggatatcattttatgttagctttgaggtaatttgacaacattctttgctattgttacactagtattaaccatcctctcttttaccaggattatcaagccatggtggcacaattggaacatcaatttcgacttggaagactttctatccaaggattatggttttactgtcaggtctgtctttcttcaaataatccaagctacaagttacgtaaacattatgctgatcgattgtttttcgtatctctcagcccatgatgggatccatgcgcgcattggctgcagtaattcagcaggcttcaacgaagcagtttgtgggttctggtgttcttaatctcttgcaaagtcaggtagattcctgctttggtcattaaaagtttttggatttttttggtactagaattagcttttttattaaatgtcctaatcttgaagactatcatgcctaggctaaagcgatggctggtgataattcagtgaggtcattgttagagaaaatgacggagtgtgcaagcaacgcatacctaagcatattggaaaggttgattaccatgcctctttctttcttgctcgtaactagactcccataaaaaaaacattgtgctacaatctctgccctttcccttttgttattgcttggaatgctcagataaatctaagtccaacctgtgactatgtttttcctttgtttggatggagtgattagcgaacatgtttgttatcttttggtttggcagatctgtacatggttaccctatttgctagatcgcttatattattattctttgatgtgtcaactaactttaaatagtgtttaattaaggtgggtctatgaagggatcattgatgatccgtatggggaatttttcattgccgagaacaggtctctcaaaaaggtacttcgattgctcagctcgtctgcactattgttaattgcttgatctaacaatgtcaatttttttttgtacaggagagcctcagtcaggactctacagctaaatattggagccaaagatacagccttaaggatactattcctggcttcctagcaaacattgctgcaacaatattgaccacagggaaatatctaaacgttatgagagaatgtgggcacaatgttcaggtatgattgtgaatgaatttcctgtttattaatacaattaacagtgtttgtgacactggacccgacattggctgattttttttaacaggttcccatatcagagagatctaagttaacaatatttgggtcaaatcatcattatcttgaatgcataaaggctgctcacgaatttgccagtatagagcttgtgaatctcatcaaggataaggtaatacttattttgttttatgatgactgcttctttgatgtcgttcctcgtcaatacacctctctgaccatcagtatatgattcagtatgaccttgttggaaggcttcgatctataaagcactatcttcttctcgaccaggtatgctggttctgttcatgaataaccagttatcttcagagttcttcagaatttcctaggcacaaatttatcaatgtgaaaagtctgttgttgagttgttttcttcagtcattgattttggtataacaatgtaatgaactacagggtgatttcttggttcattttatggacattgctcgagaggagctcaacaaaaaagtgcatgaaatatctgttgaaaagttgcaggtacttttttcccctttagagcatgattcaaaatattagacaaagcttcttaccattattaaatcgttatggcctctacttgtttgctggaatctaaatggatgtgtattatttagtctttgctagatcttgctctacgtaccacagcggctgcagcagatcctcgtcacgaagacttgacttgttgtgtggtgagcagttaatttgtcttttcctggatgtgatgaatttacagagtttgtacattatatgttctcactttgtattcatatcttaggatcgagcttcattgcttacgactttgggaatgcacaaggacactgatagcaatagtattgaggacccaatgagcatcactggtctagagacattttccttgagctacaaggtctgctcctttcttgccttgtctgcaactacctgtttgtatctggattcgaactattttgttcgtcgagatatatataagtaataacacagcttaatggctattaatggttgttatatataactactaatgcatttctagagtcatcattcatacttatataagtaatcgacaaatgcatattcgattggctactcaattgtttgattgttggttgtggctttgtgtttcaggttcaatggccactatctattgtcatatcaaagaaagcattgtcaaagtaccagttaattttccgctttctttttcattgcaaacatgtggaacgccagctttgtggtgcttggcagatacatcaagtaaggactgatataatattgtgtagcttgtaatttgtttcagttttggtttcttctaaaaccattttaatcattttgcttcgctaacaaactgctgtgaaaattctacaggggattcggtctatgaactctaagggtacagcaattcttagatcatcgcttctctgccgtagcatgcttaaattcatcagtagccttctacattatcttacattcgaggcaagtctgaatgttctttttgttttgttttgtttgttttttaaaacatttttttttgctaatagaatggaatctgaatatttttttgttttttaaagattctgattgtctattcatagatcctgttttccattgtgattttgcggtgtaagtctctggaaaactaacttctagaattgctgacatacactctgtatattgaatccagatatctctgtagtcgtaaaaaccatacttacaaatgtaggcacttcttgcaactgtgtttttcgagaaatacattcttgaaaacgtgattctggagaaataagtacactatcaatgaacagaggagagaaatcacaccagaagtatataaagacataattctttatgagatgatttggtgtttattttagcaactattgcctctctaagtttttctaatgttgtttttgcttgtctttatgtgggatgtctcttcaggttctcgaaccaaattggcatgtaatgcacgatagactacaatccacaaggagtgtagatgaggtaagtgtagagacctgctttgttttggtttgcagggaaaacattcttcattgaacaatgtgccatcatcttgcaggtgatacaacatcacgacttttttcttgataaatgtctgagaggatgcttgcttcttttacctgacgtccttaaggtttgtcgctgttccactaaatgttatgttttctcaggacagatgtaacagtgtgatgtgcttctctttcgtgcaacaagagcaaaaattctgaacgcactaataatagtgtaatgtttatcaatattttacactcatatttactgatggtgcagaaaatggagaagttgaaatcagtgtgtctgcaatatgctgcagccacacagtggttgatatcatcgtctatcgacatcaatagccagtctcatccacagaagacaatgataagagacacaaccgttacagagtccatattgtaagtagtaacaaggaattgtttttcaaactaatggctacactatctctacaaaagccgttgctgttagaatttttgaacttcattatcacggtattgttctaatatgtctgttacgtgttctaccagcaatttcgaaagggagttcaactcggagttgcagagcttaggaccagtcttgagcaaaggctcccaggctgagccatacttgactcatctctcccagtggatccttggtgtttcgaaagaataagaggtgagactttaactaaacaaactcaggcaattcaatttgttttttaatgttatcaaatgatattcagcttgagaagttgttatgagatgtgtgcgtgtgtttaggcttttgttgtcgtttctttattttgtttgtgaactccacgatataagaacaagtctcaggctctctgttaaaaatttgcattcaagatttgtgggttttcactgcaactacatgtctcttgagggaagtatctgtgaatcttttactgtgtaactaaaaagtagttttgttcaaattttcttacaatgcattactcgctcacaataaacccagatccatctgttttactggctaatatacaataaacaaaatccaattatgcaatccaaagagagaagtgaaaacactctcgacaaagtacagaaaaagtttcagaagacgaaaaagattttgcttcagcagttgatgccacacttggaagtgtcaggtcctttggtcttgagcacaaaaggatcaattcttacccaaagcaaagagaagatagatgccaataacactgaccaaatcaccacaatggttggtgttctgttctgtctacccatcagacctttgaggaatgggtagagatgaacaatgacccaaaaggagaagaagagtttaccaaatagaggtccccaagactgatatccattgttaatggcatctgagatgcctgcaacaacgccaacaatgtttatgattaagacagttgttggagggatcagcagtgttgtccatttgaatgcgtaaagttctccaaagtcatcatcatctgttgcctttgatgtgacggtgaagtttgtgtcaatgcctgctaagattttgaggagaccttggacaaccgcaaagagatgagctgagattcctccaatgacccagaattgctcgtttctccaccattcctcaatgctaactccgctccatctcaattccaagattcccgttacaatgatcgacataaacagtgagatgaagaagagactagcaaatgtgcttatctgaaagaaaaattgggaaaacagatagttagcacatttgatgcagcttctaagtgcttttctctgataattttactaaccggtggcatgatgaatttgtcagtaaggagacagatggctggaaggatacagtaggcaagaagtggtatagatgtgaaggggtagattgttgtgttggcataagcaaaacgctcaagccacttgagtttgcctcctttgtagccataccagagaggactgtgccggctgaaaaatatctcaaccgatccaagtgcccaacgcaaaacctggtttaacctgtctgatagattaataggagctgaacctttgaatgcaggcctcttaggcatgcagtaaatagacctccatccacggcaatgcatcttgaatcccgtcaaaatatcctctgtgatagagccatagatccaacccagctgcaatttcgagatacacaaacgttttttacaatggccagctactaaatcacaaataagaaggtgatttctacgattcagtattattacctcagttccccactcagtcttgtcttcataaccgcagcttatgacatggattgcctctttaaggagcactgcaggacttgatgacggaggaacaccaccttcttccatcaaagttgaggttacaaagatggatgattgcccaaatgttttctcaaagttcatttcagacatcaaatgctccttatcaccttctgctcctgccaaaaaacactatcagatccgcaagattccaacataaacgaaatctactgcaagaatggactgatattataaggttgttgggataatttacctccaagggctgctacgtcaccattcatgtcattcttggaaaatttcttattctttctccggcgcccaaagcaaggacaacaaccacagcttatcatctttggacgtttaggaccctttggtggttcataaccatacagagcttgtcgtttgaaaacacaaccagtaccaacgtaaactggaccttggattccatctagacctttcatattgatctgtagcaaacaagagtgtaagcaagagggtacattttcatttagaccagaagttggaaaaatatgaattgagtcttacatcaaagaagactgtgtttctgttggcgtaacgatcgtttgtgtcaatgccatcaaacctttgagggaactgaacatagcagaccttctttccaatctgaggatccatcaaaaaacacattgcttccctcacggccttgctgttgtttacatagtgatcacagtccaagttcagcatgaaaggagcatttgtgagtacgcctgccactcgaacctgacagaagtatcaggttaggtccaagacacggagatcagtttcttgtttggtccaaggcagatcaagaaaattaccagggcattcatggcgccagctttcttgtggtgttgaaaaccaggacgcttctcacgggacacgtacacaagccgaggaagctcatgcccttcgacatcaaatcctccgctgtggccgaggaagacttggatcataccggggtggtccttggtgttgttccctggccacggtgttccatcttgcatgatccaaccttctagaggaacctttgaggccttcgccacttgagcgttgatcctgaccttgaactcctcatattctctctgtcatatgtcaatttcacttatgaagtttagattatagtgaaaagatgggtggtggtataactagatcaggtgatatacactgaccttcatggctcgacgttccttaacaaatgttgggtggactttgtcctggagataatcaactttcaacgtgaagtacatctccggtgcccgtggctctatggagaatttcttacagaagggaacccattttcttgcaaactcagcagtttccgagagagattcgaatgtaagcattgaagcaccgtcgtcagagacatagcaggagattttctcaactgggtagtccatggccaagattgacagcacagtgttggatgtgacgaggggaggctccttcaatgggtccaccgtactgacaaagacatctacaggggcaagcatatttggttcaccttctctctcgtacctgtataaacaaaaaatatttacatccaaactccaacgtcatagattttaagacttctacttgagaatctgtggattttacctgagggaaagccgatctagataggtctcacgttcaatagggaaccacttggggaactgatcaagaatccaagagacagcgaaccagatttcacagatcacagaggtcagccataatcccagagcatcatgcactggattcaagagcctataccgcagaaaaactgctagaatcacaagcctagcgacgatgaccatccgatatggattgatcttgcttgaggcaatgggaactttccgcgagagtggctgccgtgcctcgtcgatcctacagccatttccagtcaaatccaaaattttgtaagcatgaatccaaatcatacaaaactgatgtcttagataaatgtttgtggaggcattacagtcccatctcaggatcatcatctggttctggcccaagatttccatgctggagcttccagtcatccattctttcccgccatcctccctcactccctaccacattaaaattacacacataaacaaaaaggaaagtattgttagaaaaagggtctgctgatgaatttcatagaaagaatgtaatagaacccaaagtccatgtttatgaaactatgtccctatctactattaagctggaaggcctcatacttatgttatttgcacatatggagatatgcatgaccctaactaatcatcactgtgagacattcttaaatctatatgtaagttaacatttccatgagactcaccagcttcagatgatggatatgggtgcacacgcttatgaagcccatgttctccattaccataacctcctccaactggaaattctccactatgaccaccagctataacaggtgggaatctcccattctcatcatcctcaggacctcttccatagctcattttcccataaagcatagcctcagcagaatgcttatgcttatcttgttcatgttcgatattaaattcatactcaatatcatcaatatcttcttcgtcttcatctccctccactcttgggcttccttcagaaaccaaaaaacagatcattactctccaagttcaaactaaaaaaaggaacagcctttttaaattttcatagaggcatttcgtcgaacaacacaagagcagagggagattaataaataacttacctctgagacgcttgtaacgagtcttacactgaggacagttttgtgttccttctcttctctcgtactcatagcaaggtctacacgccggaaaaccacactcattgcaagctacgaagaggtctccttctactgttaaaccaatctgatctccacatatctcacagaattgtccatctagattcttcagaggctttggctgttataattacacaaaagtttaagttccttaaagacgaaataaaacctgaaatttctaatcaacaaaaaaagattctaatgaagtaaagataataaaaaaaatgacagcgattaaaatggttaaacctgacttctcaacttaatattaccaacaaaattattatgtttgctaacaaagatatgaattttctacaacattattgcaactacagaatacagattataaatttttgtctcataataagaagatgattttaaaaaatgatcatatttttattcccaaaacatacgaatttttaaaaaatagtaaccaaataaaacgaaaaaatgcaataatattttactagcgttggtaaaaaaaaactttggtaagtgatgagaaaaagtaaatgtgaaaaacctcttcatggttgtgaatgacgactagttcattacggttatgagaaccggcgacaagaccggcgctagcttccatagggacggccggagattagcagcgatcttgagagaacaaaacggtgatcaatgagagacgaataagtttggtttttatgtgtgaaaagcttttagtttctctctctgtatggtacatagtttgttgtagagtctccattgccttcaagctaagctttcgttttatattatttcttttttgtaaaaacaactgttttagtaaaaatttctacacaactgcaacaaactcatcactcacatccatcagctgatgacatgtctttctttcatcgtcgcggtttccttaagcttctcttttttatcctttgcaggtctctctcattttacttactgtcctaatctcatttccttctgttttcattatactaattatatatgttcattttattcaaaaggatcctattattttaccctttaacaaaaaaaaaactatatacagtatatgcatgctgataattcgtaaatataataaatctggtatcttattatataaagtgatcggccaaaatactagtaattttgaattaaaattagttagggggtaaggtttggtgagaggagtgcaagccaagttacgttccctgtccttaattaggtgaattttctgcatacataagctaaagagaatgtaaagatcatatatgcctttgatcttcttcaccctttcttgttcattctgtttccatgacaattcctctgcgccaatcctttttcttttggagtctgcggataaagatctagtccatgggactaggcaggttcagaagcacaacgggctgggccttgaccagccatggttgtttccaaatacaaaacaaatcgaatcaagtgggcagctacttgaattctgttaacatcgaaaccagaattttgagtctcttgcacctatcaatacaaaaccaaaaaaaaaaaaaacttatgattcggaaacaaacaacaattttatagttatacaactaaattagactacactaataaataaataaaatgatcctcaatctgaaaattttatccaaataatcgaaactatgaaaaaagttataagaaaattacccaaaaaaaggaaaaagaaaaacagaatcaaactgttcgcaacatacaaagcaaacaactaaaagatcttttacttatttttctaagtgtcgttccaaactgaaaacgttggagccccttctccaccaccttccccgtgaaagtacatgttagagctatggttattcgaaatcgccaccggaaaatctcctcccggcgactgctgaatctgctgttgttgctgatgctgagcatagtaataatgatttcttgcgttgtaagcaatctcagcagcagtaaagggatcgtaattaaccgatgttccaacagggattgcgaatccttgataaccaccataactaacaacatttccacaaacggtaacagaatcatcagaggtcgagctatgatgatcaacattagtcatgtgactcggcgagtttctcaagaagtgttgttgttcctcctcttgtttgaaacaaaccctagtactctcggtagacaagtttcctccattgtaataaccaacgtacctctcctgctgttgctgcaataagctcaaatccattccctgatgatgctgaaacgcagtgttttgccaaccgctaacattatttgcactctctgaaacgttattactaatcatcatagctggaaccggattattaacgtccttgagacgtttcgcagaactaccaataggtagactcgggctctcgaggattgctttaacattgtatctgttcatgtcgaagttagtcactgcgcttaatcctctgaatttaatggctgcaatgtcataagcctcagcagcctcttcctgtgtgcctacataatttgtatgattcacttagatatatttgtgtatatttaatatcttatagtatatagattttattggaaaatgtaccgaaagttcccaagtagaggtctttgttaccggcgactcttccgatcctagcttgccaccttccatgttggtgatgccttttggaaccattttaaaggaaatattaattagattagattaatagtattgtatgacaattattatgtatacatcaaaaaaaataatgaaacactgtattcgttccatatctagatggattatacgtaccttgttactcctcgataaatcgatgcaccacgagagaaaccactacttttcctgcatatttacatgtttcttatatctttccaaataatgatttattcaatgttacgatatattttaataaatatatacgtgatgggtttctaaaatgcaataaattcaagagtttcattctgtacctgcgcagagaggcaacatactcttgcctcgtcatgtgcttcatctcttctacctctttctcatattcactcaactgaatattatatccaaccaacattactaatttttattgtaacaaatgtaacaatataaacatgacagttaatagtaagataatactagtttaagagattggcattattcagactaaaattggttagaagttaggaatttatgtatatattattgattaattaacatacggggaagttagtagtagtggtggttccccaatactttagtgcggctaaatcgtaagccctagctgctttttcttctttgtcataacctcctgtaggatcagataacacaacaattatattttgcttagaatagatttaatagtcatctattattaatttatagcttaaaatcaagaacttacccagataaactgaaaagagagccatcaggtgcaaattttgatgaaacacatgaaaagaaaacctaaattagtttgaaaataaatggtaaatgaaaattaaaaaattagctttatatatatagtaccttgtcttcctttgcgagtctggccttctcttttgcaactattgtcccataaatgtgcctcgtatctacctgtccaccgatgcctgacattaaattcaaacattatatactatgatcaagagcataccatatatatgacgtattattgtatatataaacccatgtacactaattaatgtttctctttaatatacattgagagacattccgttgcactctctctcaaccgaaccattagaatgtcccaaacaataccaagaaaatcacaatttaagcacaataaaaatatacatagatgaatgaaattaaccttgtaacaccgcggtatatagacgtcctttgtccaaaactctcaatagttttcttcggtgtagtttctacgacatcaacaatagtcttctcttggacgacatcatcattgttgttgtagttgttgctatcactagtagatgaattcatagagagggacaagcctcgtgcaccgttaccattgtcttgatgattagcattagcaaccgaatgattactcagccatgtttttatcatcgaaaggcctagtgagccgccaccaccaccgtctcctcctccacaatcgccatttccatctacaacggtctcgttggtattgtaaatcgtggtggtgcggccgaggaaattctcaagctttggtccattttgttcgttattgttaatgttattgcatgcaccaccattgatgtcccaatctatagacaaaaaacaaagcgatccccaacgttgggtttgattcatcaccgatctataatatacgaaatggaattttcattttataaggataaaagggtacaaaataaatgtctagtttcatgttttactaagtttaaattcatgagatgtgatcatgtgaacaaacactaaaccccactcatggaaattctcaaaagagatgaaatcgataaacaatgaaaaacaaaaatagggctacgtgcgtgagtcttggtctttgttctatgcattggaagaaggggaaaaaataacaaaaacaaagataaaataaatatttttaaaacacaaacctcgggagtgactattattgtctctggtgaaagcttcgagggtgacaccgaaaggagaaagaaaagatgtttgaacggcagaagattcatcggagggagcggccagatcaaaacagtaccctccggcaacatctacggcggttctggtggtggaggagtcaacatccgtacggtgatgattttgatcatgaggagagagagagaagcctaaccagttattcatcgagttcatataatattctaactactccttgtgatagatgagagaagaagaataggaaaaagaacttagttagggttcatgcatgaagaggagaaagaaaaaggttttggtgttaaatgaagagagaagaggaagaagaagaagaaaagtcaaaaatataatgttcatttcttccgaggcgacatattatgcgcatttagagaattttgcaattaaattcagaaagaaaaaatatttacttgaaaaatgtggagatgtattggtcggtttgaagggtaggggtagtaatgtcgtttcaactggataatctcgtaatcccaatttgttttgatgacactttaattaatcagtcaaaaaccatttcaaatctctgctttctgtctctctctctcttcatgcgtataaaatgttaaatgtaaatgacaaaaatgggtaaacatgtcgaggaccaatagtaaaatccaaaaactcactcgttgtcgatttaagaccaatgatgctgtgtctcttagagacatgtgtatgtgtgaacgtatgacacgagccagcgatttagtttggcattttttccaaacgcgaactcgtcacttttagtattttttaacaaactcaaaagattcatggtttcgtgttttgtgatattttgaagtgcgggtctaagagatggttcctgtcttccacgaaacatatgctcaactagatataggatatgtgattcgcatcagacgtgatcaatgcgatgaactatctcatatagtaacttcactaaacctactatatatagaaatattttattgttgttattatgaatgtactctaaatcttaggcaaaatgtataaccacgttaaaaataatttgacatgcaaagatattgtaaaagtatagattttcctatttgaattttgaagtcttagtgtcttagtggctacagttcaaccagtaaaaaacgcctcaaattttcaaacaaacattgtaaacgaaagtaaaaaagtacttaaaacagtcataattatgtacataagatgtggatggctagtagggttcggatgctagatatgtactgtacatgctaagcaacaatagtaaagtagtttgagcttatccgactaattgtatcaaattaaaaatgatttaggggaattagagtaattagggaggaaactatagggtatacacatggatcaatgagacgaaagtgggcatgtgcatgggtttatactctttcaaagatttatatacttaaaaaaagtttggactggtaagatatgattcaatggattctcgtcttcctatttaattgtaatataatttcacttcttccattattatgcctgcaatatctaacacaccaccaacacacgttctagaattgcctcgtacctacaaaatcatattattttttcctaacaatttgttcttatctgctttttatatatagtaccccaaaacctttggtacccaattatttcaatacctcaaacccaattagtagatctagaaattaaaataggttttacattttcgatacgcggtacaaattttcttatctctacaaaagaaaattttattcacttactttaggttttgatccggggcgggacgatatataacaaataaacaaactatttatatatcattcacgaatgacttcattgcatgcgtttaaattctaaatacgaaagaacggctgaggttttataatcaaagttttgtgtaaaaaacagtacttcaaaaccatatgtatcatattatgctatgtttcttgtaaatacaaaaactaaattttttgggggccgtaatttattgaagtgagaaacacctgtagattgagattccatctgaaaataaaaggaaacacctgtagatgaagatatctacaactgacaagagcgtgtgaccaaaaataggaaaatgaaaaatctggaagtaagtagaaaatgagaaaaagaaagaaaagtggtaaaaaacaacaaaagaaaaagaagaaaaaactgttattaaaatcagatggatgagtttgagatatttgtcagtataaatgctactgctactgcagctgctctaccattcccccacccaataccttttacattgcccattcattgttcatttgcatgcacttttttttactatataatatccatatatatgcatatacactaatacacacattagtactatatatcattgatggcaaattacttctttgaacttctttatccgtaactaagttgcaagacaatttcgtataacatgtttttaattagtcggaagtattttgtctactcttatatacctacgaatatctaagagccagtctagactgagtggttttctttgctttgttctgtatgtttagtattcctaagcaataaaccttatatctatatcatgcaagacatttaaatcaatttataggtcaattaaactgtatttaattagactagttaatcgtttttgaactgttttagttaagcatttgtccaattagtgtgaactcttctcatgtttcttcttactagctagtagataaagatagatatagtatatacaatattttttatttgttatgtaaagacgaatatatgtggaaatgatgagggtctgcaagactgcaagagtctgccttgcgtacgaaaacccataacattgtcacattgcaattgcaccagccacggccagagtcattgtcatatcatcatgttatttatatttatgctctattattccatatttttcagtggtcaaataaatcaacaatttccactttttcattttatatgtgaaaaagcttttggttccccccggttaaagcgggggagttcttctatttcactccacatcacactgattctttgcatgactgacatctcatttttcttttccacaaacttttcttttcgtgtcttaaattagtgtttattggaaaagaaaaatctttagatttgttcagagattcgtaatcgatcaaatggtaaattggcgtgcgattcacagtactgtcccatgaatgaattacaaaaataattctcaaaatttatacaaaataaaatactatgcaacaaagagaaacacataattgaaagtatgctacagtttttgtttttataaaaaacttgaaaaaacacacgttttggtttcatgctcaaccatttttttttaaatccaccacgcaactgattctagttagatacttttcattttaaaaacatatgttacatagatgattattttgttcaggattccattctgtttaaccaatataagatcatttttctatgttgcagttaaaaggaatcgaacgtgaaaaaagtgatagttttagacttcttaagtcttatgaattactacaagttgagaaaaagaacattgtaattggcagatacatcatacaactccatctccgtccagatatgaattctcaagctggaaacagaatgagaattgaagaatcaattatgtacgctaaagtgaagaatcgcaaatgaaaaaacagttttggcagcaaaagaaagtgaaaacaaaagtaaatagagaaatagctgaatcatactgtttaagaaaggctaagtcactctttgtcataattgcaaaaactaaagtatggcacaattaaagcaagtgttagattttgtagctcattgttctttagtgatcaccggttttctaggaatatatagaatggatctaataatgtaagataagttacttcgatactaaaacagagaaatttcaaattctaatctaaagaaatacctaagatggatccgaaaattgcataaagtccatttttcatcaacatcatcagagactatataacatatgtacttaacacaaaatattcaaagatcacataattaatctttaatctattatgagtccaatatctcaaaccactggcaaattggttgagtgaaaacataatgcatcagaaatttatatgacatattacatcagaaactttaaactcgacttgagaatcctcgaagcaaaaacaatatgtaaccgagcattggtggcacttttgcaaatattatggactttatttagaaattttcgtacaaaaccccgatacttttaaattgtaataataaaccctaatttcgggtaaaattttaaattatttacctttagggacctataatgatactgaaccctaattaacaaaaaccccttttggtctctgtaatcgtaagctt

SEQ ID NO: 1442 - DNA, 26604 bp, Arabidopsis thaliana
tcaatcaaaaacccaaatctctctgttcgcagagaggatcaattcgtgattcagagaatcaaacttactgtgagagagagataacgaagatggacgctatgaggaagcaactcgatgtgctcatgggagctaacagaaacggcgatgtcactgaggtcaatcgcaaatactacgaccgcgatgtttgccgtctttacctctctggtctctgccctcacgagcttttccaattgacggttcgtatttatattcatcttcttcgatacccaattcctttcttcttcttttgctcaatggctttctcattagtatcttggaaaaaaacttaatttcctcatcctttgtgagctttgattcataaagttttagtattggtatgtgttaattgatgtagttgttttggataatgttaaaaatcctagcttgatttgggggaggttgttgatttaggtaacaatgtggctaatttggtttatgagtagtctttgacatgtttgttattattatcagaaaatggatatgggtccttgcccaaaggtgcactctttgcagctgaggaaagagtatcctttttttaatgaatgtaaagtctttttcttcttcgtgtgttgttatttctaaagtccacactagttattcagtaggatgttatttcgctcctctactgttttgctttaactcgtctttagatataaagatgcaaaggcaaaaggtgttgacaactatgatagggaattggaagatgcgatagataggcttattgttgagtgtgataggaagattggtagggctcttaatcgtcttcaagaagaggatgccaaagctgccattgcaatttctgtcacagaatttactcaggtgatgatctaagtttcaattcgttgagtttttttttgtgttttttttttcaactcaagcttttttttcatcatcatatcatcgttgtatcgcagtcacctgaaattcttgaattatcgaagcaaatcaaagaaaagatgaaggaagcagacctgcacggtaatataaaagaatattataactttttttggctgcttaattgaccttttcttaacatctaagccatttagtgattatacagaaaaatgctttcttttagtgccatttagtgaaattcttgattgttgtgtgtgtgttttttacattttattagatcgggtaatttttgaataactggagttcttttacctttgattccgtaaaactttggatcctgctgtaatattcagaaattatgttttcatatcgcagatcttgaaggcaaaacagatctgaagattagagctcttgagttagttgaagagatgaggacgaagagagctgacctacaggtctgttattatgtaatttgctatttgctgctgcgcctggtacattgttaacagtcaagtcttttgtcttgtttacctacaggctgtgctactgttggatgcctttaacaaagataggacatccttgcaacaggcagttccagctcagcaaccagctgcaactttacctccgcccgatcctcgtactcaagaaatgatcaatgaaaaactaaagaaagcagaagagcttggtaaggagcaaacctcttattcgtatctgttttgttatatgtggtgatattgaatcggtagctctttaagttaccgtttcagtggtgcaaaattgtggtttctgtacttttgataattcttatcatttttacattcaacttctttgccaacggggaagtttctggtggctgatctaaaaatttaattggcctattaattgattctttatgaatgtacaaaactgagcttaggaaacctttgggataggcaatgttagaagaagacagtttatggttacatacatacataaaaactgaactttttcaatgttggaaacagccacagtacagttatgatatctgtacgtttatttcaggtgaacaagggatggttgatgaagcgcagaaagcactagaagaggcggaagctcttaagaaggtttgttttctttcgtaaattagttttctgtttcgttcttgtttccaagttacttcatactttataagatttggagatgttaatgaagtctattgacacagggatctctctttgtcttggtggttaatttgcttgaatagttctgcatgttccttatgtctctccctactcacttattgtataatattttcccctacttttattagttcctaagagtgttgtgcctgtacatgtttcagcttactgctagacaagaacctgtagtggattcaaccaagtacactgctgctgacgtgcgcattgtaagtcaagatcatcatttatatcaccttatctccgacatgataatatattgaaatccatttctcatagaggccctcaagattcttaattcttaggttattatcttatatagtttgtttagtctgatgaacattagaatttaaggaagatagtcctaatcctagtatccaaaaagaagtaatggcttataaagtttgaggacaattaaaatgctttggttgaagcatgtattcagtgttctcaattgtcaaacagcgtaaacagaaattgcttttgaagtgaagtatataccattttctcatctctgctcgctgtatattttttgtcactgtgttggttggtagtcctcattctctcttctcttattgtctcagacagaccagaagctgcgtctatgtgacatatgcggagcatttttgagcgtctatgacaggttaactttaattacttaaatttgtttatgttttatggttccgtggcgtttcataagaaagctagaaatagattattgggttgcaagtggttcattatttgaccccggctattgtacctccttttcaccagcaggctatttgggcccagttttacgaggattacttttgcagctaataaatgtgcgttctttcttgatttattgtgcctgttagagataaataatggaactttaaactatatctttgtcaccaatctgttatttgcatttggcaatgtcaaaaatctgttgtactgcctttagtgatcgtcggttagctgatcattttggagggaagcttcacttgggttacatgctgatccgcgacaaattggcagagcttcaggtaatatacagtagaatctttctagtgattttccttttctctcttgatatagactgtatagttatattctctctgtcttcttcaggaggagaagaacaaagttcacaaggaacgggtcgaagaaaggaggtttatttttctcaagcatttgaacacattgtttgtttacttcctttaatcttcaacatttttgctgaaaacctaaaccaatctcagatcaaaggagaggagtagagagcgagaatcaagtaaagacagagacggaggagataaccgtgaccgaggaagagatgttgaccgcaggagtagagatcgtgacaggcaccatgaccaccgagaacatgacagaaactataatcagtcacgtggctatgactcaagaagccggcgcagttcacggtcccggtctagggaaagaccgagggatcatgatcgccgcaggtaactttgattaagaacatacacacatcttattattacttctggctacattaaagtaagtatttaactaccttgcagacgccatgaccgctactaaaaccctgccaaagatggttgcacctggtttaagaggttcttacagatgcgtttaggatctatttggagttacaaacactttcttttttctttgctcaagtgttttaaggatttttgagattgtaacttactttaagtttgtaagaggagcttcttcagatatctttaatttgttttttatgttgttgacatcaaagacttgcgagtagaaagaagattttgttgatctcatggctctctctctctcaattgagatgtgtatggcttaccattaaattggtctccttctgtagtggacaacattttatcaattttttttctttttaataatttgacatctatccatacaccaagaaaaagctttggcaaaaaatttaagacaacatagaaaacttgtggtagttatttgtttatttcttatgacaaaattaacggtcgatttaaagccgtaaaagaccacaacagtaaaaaaacatgaattgtgtccaacacaggtggcttagaatctacgagagacgatttaaaaattgtctgatatgtttcagaaaagttagaatataaaaactgatcttacccaaaaaatagcataaggttcaacgtcaagtcagcgtactctctccattgtacttctctcggttttctgcgtacaccttttactattctgcgttaaccttactgaaacatagttcgattccattgaaaaagccgcaactatatattagtaaggagaagaataaatgattatccaagttaaaatattacaaaaaataccaagtcagtcttaagcctcacatatttttagagcaaaatctaaaacataaccacaacttcatgatgaatacgaatcagcatttaaatattgttgaaactcatcaccgtcaaaccttatcgcatcacctcctcgtactcgtaacaccctcctaacatttaaacaaacttttaagagatcattaattttgggttatgtcatttagtttcctagttgttatcgttagaacaatctaattatctaaatatcacgcaaatatctatatctacaaactatacacctatattgaaaatatcccaaaaatgctaatatatccattagtagaaaaagggaaggtcaaagatcatttgtaactcaacatcacactgtatcacaaagcatctcaagttttagcattgttctatgattttattcaaaaaataaataacggtcaccattcattttagtgtttttaaagcatctcataatagtatttatatatagttttaatgatttttaagttgatggaatcatattgggcaattattgggactttctttctaaaaaataagaattgggtgatgcagaagccacactcgtttgaatcgaaaccaaagcaaaggtcaataaaaaaaagagttttgtttaataacgccaataaattctcattacactatagtatgattaaagaaactgaaatcaaacatatctataatagaggtctcttgtttcagttttaactcgaattgatgactaggacaagattcagctctcatcaaatgtttttatgttttttgttgatctcatcaaatttgttttgatatatccttaattataaggacaaaaaaaccggaattaaaaataattgattttatttcatcattggtttaccatagttttttttttccttctcacttttgttcctaatcaaccttttgcttctacaacatttttatcgtgaaaaaatattgaatttattctgaaaaatagactactcaaaaaaaatccaagaaagcctacatatgtacatggaatcttgaatgcatgtcacgtaactctcttctccttctctattaagaaagcctctttcttcttctctctccctatatatacactactcacaaacactcacatacatatatatacacaaacatacaatatacatattaatttacacacatttgatcatatacacatagtttttttgctgacgaaaaaagagaatgggtgcatttgattatatctctagcttttgttcatatacatacgctaatgccaaaaccaagcgtaagccattgcaggtctgttctttctctcatctcttttacaagctagctactctgctttttttcattctttatatcacacataatactctattatctttatactcaaactgttttggttaacttcaaaactatatgctaatacgttatacgtcccatgcacaaattcaaatgttacgtttcaaaaatgtgaatatggtttttgttaaatacgtttcttcaaaacttcatcaaaaaacaattcgttatacatagctaacacaattggtcgaaagtcgaatctagaaactcattactgctgaatataaaatatgcatgtttattttaataattggtaattaaatgggttttgtgtagacagtggatatcaaggtgaaaatggactgtgatggttgtgaaaggagagttagaaacgtggttcgtcgcatgaaaggttctctttccccatctctctctctgactttgaatcaaaactttcttcaatctctctttttttccctttttgtttccattttctttattctccatgcttttctcttttaaagattcttattcctctcttaaaattgcaattttatagctggccagaatatatataattacaattactaatcatttgctcaatcctttgattggaaaaactgtaccaaacttttagtccgaaaatattatgggtcaaatggtcccgaatctacctttatttacatatgttaaaagagtcccatgaagcattatcagtaaatatgatccaatcacatttttccatggagttattagtttctttactttataataattttctaataaaataaattttgtagcctaaaaaatatagtaaaagatcataaatatggtagtaaaacaatttggtaagaaaaatacttttaatcttaaactccaacatagtatgatattatagcaaactagaaaacaattttactgatatagatatacattttaatattacaaaaacttgaatgttgaaaccgaccggtacaggggtgaaatcggtggaggtgaaccggaaacagagccggataacggtgaacggacacgtggacccaaacaaggtgttgaagagagtgaagagcaccggtaaaaaggctgagttttggccttacatacctcaacatatggtctattacccttttgctcctggcatgtacgataaacgtgcacctgcaggccacatccgtaatcccactcaatcgtttccaacagcaaacgctcccgaggaaaattacgtttccctcttcagcgacgacaacgtccacgccgcttgttccatcatgtgagccaaccaaccaaaagattactcataatctccattttgtaatttgtatacttttgttaaaatcaaaaggtaatgtaggaactttgtaataaaattatagagacaacaccggaatctatttgatggtttatgtttcgaacaatactttttgtccaagaagaagtcaaatcaataaccataagctatgtagaatcttaaaagtgaaaaataggtataatggaccaattaagcaaccaatgtttgtctaatttctataggacatgaatgacactttgacaataatcatacattaataaaataattaaagaagaatattaaggaagagacccaaaaatcagaatcatgtgatttgttaggcaaattgcttcatttttactattttgactagaataagcttcaaagggcaagagagtgtcacatttacaagttccaatctttttaacaccaaaggaaaaaaagaaaacttttgaagatcaaaagaatgcaaaaagctgtattcttcttccccaaaaaaatgtccaagagggaccaaagcatctttagcttttctttcaaagcttctttctttagaagaaggaatcataaagaccagaatcacggtaaaggaaagctgtttactcacggtaccgcattacaaatttacgatgaaataagacttgagtggatatttttggaggctgtttggtgttctctaagcatgctttaaacctacaaagatcattctgaatcaatataagattagtttaaagaaatggatttgatactttaatcaatcgtttgaaagaatgaatggactcacctgttaaatctatcgaaatcgttgaactagcgtggagcttttaccgcttcttcgctttccttattctggactgtgccttctgccatttcttcctaggcactagtttactctttggcttcaactttatttcaggtgtgaacttgaagtttggatctctcattcgagtttgtatatccttgaagaactgcatgttcagtctcttgggtccaccttttcttagctcttcatactcaggtcccgagataatgttttcaaatgctccaatcagaatgtcaacatcactcattacttcccacacgtttgtgtagcgcccatcaggccctttattcagtttcttcaacgcgttctcaacagcaagcttcctcgcctttttaccgggtgaaagctcctcaggttcattttcagatttcaacaactctgagattgtcctgtactttggtttctcctcaaactcaaacaacttatctaagtatttatcagatgcctcgttcgggcgtggctctgttggaatatcgtcgtcatcatcaccttcatcgccagtccacagcgttttttcctcatcacttcctgaccaaacgctgtacaattcatcactatcatctccatcaatttgatcggtgctatccttagcttgttgtctagctttcttaatctctttttcaagacggtttcttccgctttcttgttttgtcttatcattgctttcgtcttcacttcctgaccatagagtatcatcatcctccatttctttctcccatgtttttctaaagtcatcatcacctggtttcacattaccaaatagattgtagtcttttcctcttccacttgcataaaatcgagttgctgcaacacattgaaacaaccgaagtgtcacatatattgagactctacttttaaacaatatcaccttcccaccagtgtgtactcaattccaaaaaaactaaactttaaaagagtcatgaacaaataaactctctgcggcatttccacgaacacctggtctactacttggactaatccgaaccaaaaaaactaaagacaccaatatacgaacaggctcggagatatcatagaggcttaaaagatcaaaacatgttggagaaaaatgaaaccttgtatagtctgacgaaactcagcaaatacccaattttgagcagaagttgtcggacacgaaagcaagcgactttgtgatctacaattaaaacagagaaactacatcagcttcgtaattaggaactattggtgctgttttatggaattttcagatcaattgataaaccttttggttacgatagagaatagagaggagagtcttcgcgcgaacatccttttctcttttaacggcttttttgatcgaatcctattttatgaagcaaactttttttactattcaatacttaccgcggtaaaaaggtaaaaacaaaggtcaaacatggaatttgattggtttctcccgcgattctcagttctgtttcgttagaacaaaaatccaaacattctcgtgttctaaaaataattcatccgtaccaatcttactcgttatacaatggattggatagctttgattcaaagatttagggttttacgatgcagctaatacttttctcaatcataagaatatctttcatgaaactttattagcttgcacaagtatattacaaaacaaaacaaaaggtacacatcaagtaaatcaaattgaaaagacaagaaacaaagtatcaattttaacataacattatttggtcattataacggatactaattctggacttagataccttatgtgatcacatatatctaaaaagtggaatcattatttgtcaagcaaatacaaagcatgattataattaatgacaagaaagtcaaatgggaatagatcgagagactttgggataaacttttctggccggatgacccattatacgacgacccttggcgtgtttaaagatatacaccaccgcaccaactggccactcgatgattccggttatcagaaaagccacgaaccctaaagttggtccaaccactttgcaccgacaggggttttgtcttgttccgcactgtacacacgccggaaacaccatcgttttgagaatatagtattgtagtacgatctattatcgatgatcgatgtagtttttttgtggagaaatcagattcaaggagagtggaaatgtgatttgtttgatttgtgagagttggatcttttatagagacgaatcatatgagtttttttaatatctttcttgtttccacgtagggtcagtgtgttactatttttaatcgttatagatatttttgggttattatgtcggcctgttactatttaattattatttttgagttttgagtttaaagaggggtcgataagatagacacgtttcagggccagcacaaaggtcactaaacacgtggcttaagataattggaaataagtttgtgaaactctcttacgttaggcttttttggagggtcaagttatgactaattgactatgtcggcgtggcacgacaatgattgaggtattcaagtattttaaccgtgtttacatttatgtggagtctctctttgcaagtcagaaagatcaatcgatagatctttaattttgataaatataggtgattattgttttcttacatatatgcttatgcattcgtaacaatctttagattcaaaaatatggtataattttgatgtggcgatcgaagaagagcagaaacatcacgataacatctaatacttacagcacctcgtcaagtatacggaattacggattctgcaagatatcacgagtcacgactaccgttttgagaccgggacgggaccggaccattaagccttacatggattccgaacttagttttaactggattaactgttaggctttgggctttgaattttagaactttgaaagttgggcttttgagtagatataaaaacactgcagatatttttttccaaagattaagagaaagactaaaacgcacaagtttgggtcgactaaaaaaacaaaagataaattatttctgttgagtaatttctaaaaattttggtgttcaaaacaaaaaaaactaataatctattaagtgtttttttttttctcttggaacgaatcattgataatgaactaaatacatagaatccaaaattccaaatggatcaatttagctaacatggaatggaatagagaaaaacagattacgaatatcttgagattgaccgcttccaaagagatcaaaaataaaactctatatatgtaatattaattttgtttttttcttccataagactataagaggtttagagtttcttattaaactgaattaatcgaaattaattagtttgaaaacaaaatagatcaacacaaatccaaattcataagaaaaaggaaaacaaaaacaaaatattaaaaatctgagaagaatcattgtaattttttgttgttacaactcatcatagtcttaaactcttcaaaactcacaaagccatcaccatctgcatcaacggctcgaaccatcgcaatgcattctgctattgtttgtttttctccaagacgtttcaataccacatgaatctcactcgccgatatttttccatcaccatcaatgtcatacaaatcaaaagcttctttcataacaatgtcttcgtcctctttatttccttcaccaccaagcatcaagcaagaagcatattccgcaacgtcgatttggttatcaccgtcgacatcaatctctctgaacatgttatcgatttcttcagatgttattgaaggagaaaaggcgcgaatcgcttcagcaaattcgtcccatgagattttcccatctttgtttttgtcgactctctcgaagatctctgcaacagacattcttgctttgagtaatatgatggtgatgatctaaagtctatgaaagagtctgtgtgaggaggccatcaactaaatctctatttataagagaaaatctcgaatgttgtttggattcctacaaaaatttagttttggcatgtgagatctaattgcctttatgaataaattttttaatctttatttcctttttcgaatcctaaaccattataggtttggaaaacaaacaaaaaacaaaagtaagatatcctttttttctctgataatcaaatccataaattttcttcttaaaagaaacatatatagcacatgccgagacgataaaaactgaagtaatgtacaaaatcttctaagttctcacaatgggtatgtggtaataactcacaagacacttgttaactctgaaacaatgtaagacttgtgtgactagatctcctttagcatttttggtctggatgattaaaagaaatgcagtgattttggttaattaatagattttgttacttattatctttaaatagatgtagatgtgcttattttgtcaacaataaattttgtaaatataatgtaaatatttagtacagttaaaaagatatattgtgtttatcaaaggtacattttatagatattgatctaaatctccaaaagaatacttttcatatttttcttgtcttatcaaatttattttgtatagtttacagattttagctacattttaatgaatacatcaaagtattataatgattccactactttgtaaattcagtttcttattttcttaaaacatctaagtgtatttaattaatgtagttttaaaatatataaaataataaaatatttagatatttatacacaaaagatagaggtaaatagtggaaattttcttggtctagttaatggccagccaatcttaatgaaagtttgagatggtaagaaataaatatttttaagaaatgatttgtaagtattataaacagagacagaaccatagattaagatttaaattcgataatggaataaatccattagctacttgaatctaaattttgttcaagaccaagtcacatcctaattttgctaagtttaggttttaacttggaccaatttcgttcaattgttgtttaaacattcctccaaaagttcctaagtaaaagcacaacctcaactgttcattccactcaaagatttatataatttgatttttccttattcctccaccaataaaaagaaagattgttttcatcttataaaaacgcgcacacaaccacatattcaccaagacattatggctgatgcaacggagaaagccgagcacgaccgtattttcaagaaatttgatgctaatggtgacggaaaaatttcagcagccgaactcgaagaagctcttaagacacttggttcggtaacagctgatgacgtcaaacgtatgatggctgaaattgatactgatggtgatggaaacatatcgtatcaagaattcactgattttgcaggtgccaatcgtggacttatgaaggatgttgccaaaattttctaattttttttgccatacttttacttttgaaatgtttgaatttttttatatatattgagagatttggttctaagcatcgtcaattcttatttttgttgtttttacacttggtgagttttaatttatatgattgtatcctaattccatgtaatgtgatgtgagtggatcattcttgaaaagggggctagtttgttttgttttggtttgttgaacaccacaacaacgaatgttttgttttaaaaagatataaaaatggctttaacagtgaagagaaccaaaacattcataatttgttttgttccttaaagttcattatttggtttaggcttctcgcatatacattttaaatcattgatataaaataaagtaactacatttttagaattacttaaaaagtaaatatattgcggatgcattctctttaacgtaaacctctccgcctatcctctcggtctcacctcaaactttctcctaagtccatgttaggacttagccggagaaaccaataactatgcctacacagccgtctcatccatcgattacgacatgctgtggctgtgggactcatgttcctctttgttaggaagtcttatatagttatatttatataaaatcaaaagctgatattgttcggattgtttagtcttgactactcagatattgaagtgttgttacgggtaaaatcaagaaatggtaagtctgaagatgttccaagacttgaggatatttaaacattgccatgtttaaagtgagtttagagaatgagaatgtggtccaactttatcatatctttctatgaatacatgtatttttcaaaagtggtgataaaattagtagtaaatatcaagttttcttttacacattcctaagcaaaacggtttcacccacttgatcaaaagctgacaatgaaaacctctcaaaaaacccaaaagtagagtttggactccggcttttcagaataaaaagactcaagtgaggtttagcttctttacttctatcatcatcatcatctcccagaaacgttagcctctatgtaataatcgagtcggtccaaattcattcatgcgtcattttgtatatattttgggtgaaattaaacgtaacgtcaattcgttgacaaaaaataaaataaacgtcatttctttcatatttattcaaactatgaaaacacttgctcgtgctgttgttacatacacacatgttcctcgttctcgaatctccacgaccaacgaaccaactgggtcccaaaagtataaggcacggaatatttcgggcgaaattgtcacaaaacgaaactactggggtaagttaaagtaaaataaaaacataaggtcacgttcgctaagtcttttttcttctcctctttatgacgacgtatctaccgccgcaactccgccgctagtttccacgccgatgcagcgattagaggtttcgtttgccacgcaagcattaggcttccgtcgttctcctccactctgtatccatctccaccgccagataacgccaatagcaaactcgcttgcttaaacgcgtctgatccgaggttaaccgggtcaaacccggcggatcccatacgttttcgccactgagccagcgtctcgtgtcgctcgatcctatcgcttccttccgtcgccaccaagttcaatatctgtctccctaagtaaacctccgacatgactcggtcttgactcggtatcacaacaccatcttcgagcgagtcgaacaagctcgagtaatagtgaagcgcttcgttaaaccggtctaagaaaacgtcaccgttatggttcgcttcttgttccaccactgttacgagacccggtttaaccgccttaaccgtcgctaacagcttttcgatcgaaccgggttgggataaaaccgggtgaagctcgaaaaccgaattaaccactagagtctccgattcggttcgggtctcgaacatatccggttctaaatcggataacctctccgtcgttagaccattgaatttgaattcgacgccgatggcttgagccagctgagctagcttccaacctaactcttgaatcccttctcgattcgacggattcccaacgccggtgagacgaaacgacggtggaccaccgggtcggagagctaaggcttgcattaacgccggccattgcataccttgattaagccctagatcgattacgtgtacgacacgcgacgtcgtaacagcttctagaatcgcctgattggccgtgaaatgagcgaatttcaggtagggacacgagtcgtagaagttcatctgaagaatctcttcgaaggaaggatcaatggcggcggcggaaggatgaatccggtaaattcgacgagctagggcttcggcgaagtaggtagcgactttccccatggctccggcttgagaagccgcgagtaatcccacgcgcttgacgagagcatccgcgaggctcagattctccagctgaaccgcctcggcgcaggccactagcgcctgaacgagtctaactcctgtctcctcgataagcaccacggaacgagttgactcgctggtcactgagtcacaccaaggaccgagtcgaatcctcttgttgctgttactattgctactgcaacactcatcgtcgtctgtgattggtctcagatcgcaaatccggttcgggtcaagatccgggtagtaattaagatccgagagcatgctctgagcccaaccggagagatcagaaggattgtaatgaacggtgtcattgaaggcattactagaagaggcaatatcattggacaagaccatttcaagctgttcaagcttctgtgcaacatctgccatgtctgaagatcgaaccttgtaacccaaaacagcaagaaactcgtccatgttatcgtctccaccaccaccacaaccattttctaacttctccaccattgaaggagcttcttcttctacagacgtttcttgatggcttcgtttcatcgtcaagaaatggaattttttggtgttggaattggttagacagaaattgtggaaagaaaggagaagaatttaaacaggagaaggtaagagaggagagttagagaggtccaatgagggaagtgagggacctggagagtgtaagtaaaagagataagaaggaagagaggcaggccattataatttcgcatgtgttttcttctctattctttcttttccaaattatttcatttttattactataactttattgaatttctgatccaagttacaaaaaattcgtcgctctgataagggcgtgtagtttttgtttaatggtccaatggactgtcatagtctattaaactattttttaatacccactaaatgttgaatttagagtttctagaattattaaattgggtgctgcagtagatattagtcatatcatatgacctatattgataacccaaatagttcttctcgagaaatggaacttgtaaactccgaaagtaacagcccgttttcttcaagtatcttgtttctataacaaaattttaactagttaacgtgacatactgtaataattttactgacaaaatttgatatttatttttttaaatgatactatctcctaataatttgtttgccgaaatggtataaaataatactaatttttaaaaaagtttgagaagaaaatagaggtcccgatagaagtacagctcaaagtattgcagttagggagacaacgtgaccaacctcacggtcgacatgtggcggcagtcgacattaggtatcagacgtctacaacattacgttgctttcttattattattatgttttcatttctttatgtgtgtaaattgaattttattccccataccaaaaacatcattttaaacatgatagttacatatatagaagatttttataatagagtagaactgaacataaaaatagatttcactcttgaattagtttgttggtctaagtacaaatggcttattattttccgttttgtgaaaataatgtataatcctgtataaaataaagtttcgagtaattttatatgacttagcgaatgaatacacaagctaaatatattagtatattacccttcgttcgttgatatattggcaattttgagggaaacaaataaatgacgagactatttaatggccggatacgttttgaaatgttacccaagttactttctcgacattttaggcggatgatccattgactaattatcctcttaattattcgaacaataaaaaaaactacactatccaaaacgtgtggtaagaagatatttatccacaatgttccgtaaatatctcatttatttacattttgaaacctatcatcaaactaagtaaccaaccctgaaatatttagtcaattatcttacaaaagaaactcaacaaatcccctatcattgtgacaaaaacccttgatttcactctctatatatacttaatgatcttcctaaaacacagtcacaacgaaataagcatggcaaaagcaatcgctttaactgtctttttgttcttattcttgtcattaatatctctaaccctagcaacagattatccactattcacaaagtctcgatggatcgtaaacaacaagggccaccgcgtgaagctagcttgcgcgaactggccttcgcacctcaagccagtggtagcagaggggctgagcagccagccaatggattcaatatcgaaaaagataaaagacatgggattcaattgtgttaggctcacttggccacttgaattaatgattaatgacactttagcctttaatgttaccgtgaaacaatcatttgagagatatggattggatcatgagcttcaagggatttacactcacaatccatacattgtcaatactcctctcatcaatgtctttcaggtataaatacataattaatcatgtgattctagtattacataatttcttcaactcaaacaaaaactattcttttcatgttcaattaaaaatccatggtttttaaataagtcatttgtgactgaaaaatatgactaaaacatgttttatcttatattgcaataatgattatttttccatttcttttcagatctgatcatcgttgtaatgaaaaaaatatatttcacatgcttcttgtttttactatatgatatcttctaacgcaaggcaacatgtttgtgtaggctgtggtgtatagtcttgggaggcatgatgtgatggtgatacttgacaaccacaagaccgtaccggggtggtgttgtagcaacgatgacccggacgcgttctttggcgacccaaaattcaacccggatctatggatgttgggtcttaagaagatggccacaatatttatgaacgtgaaaaacgttgttggtatgagcctgaggaatgaacttagaggctacaatcatacatcaaaagattggtacaagtacgtatttataaattccattttcatttatttatcataacgcccatgtgaagcttgaaggccaaggaaattaatacacgttaattatctgtctattttagatcttaacagattatattccgttgtgctatacataattaaatccacaataatagttaagtacaagtacattaaaaaatatatatttatattggttaatataggaatccaatgtccatcaatttaacaacaagaatcaacgcatataaataataaattaacttgattctaacctttttttaaatagaaaaaatgattattatttttccacatgtaggtacatgcaaaaaggagcagaagcagtgcatacatcaaaccctaacgtactggtcatactctcagggcttaacttcgatgctgacctaagtttcttaaaagatcgtccagtgaatcttagcttcaagaaaaaacttgtcttggagcttcattggtattctttcactgacggtactggtcaatggaagtcacacaatgtcaacgacttttgcagccaaatgttctctaaggagcgtcgtaccggcggttttgttctcgaccaaggctttcctttgttcttgagcgagtttgggaccgatcaaagaggtggcgatcttgaaggaaacaggttctcgaccaaggctttcctttataattacatttagatatttgcttaccaatcaaagcttaaagtacttttatcaaccgtataccattaggtacatgaattgtatgttggcatgggcggccgagaaagatttggattgggcggtttgggcggttacgggagtttattatttccgcgaaggcaaacgtggtgtagttgaagcttacggtatgttagatgcgaattggcataatgttcataactatacttatctccgtaggctctccgtcattcaaccaccgcacacaggtattcatcaatcttgcttgtaatttaaccagattattattacatatagtttgatgtaaatttaataaacaggacccggtgtaaagcacaatcatcacaagaaaatatttcatccgttaaccggactctgcctagtgagaaagtcacactgccatgagtccgagctcacgttaggtccatgcacaaaggacgaaccgtggagctattctcatggaggcatacttgagatcagacgcggtcacaaatcttgcttagaaggagaaacagcggtcggaaaaagtgtgaaacttggcaggatatgcacaaagattgagcaaatatcggccacaaagatgcatttgtcgttcaacactagtgacggttcgttggtatgcttagacgtggattcggataacaatgttgttgctaattcttgcaactgtttgaccggagatactacttgtgaacctgcaagccaatggttcaaaatcttctgaggtttatttgttgatttaagctaagagagaataaatgtctaattaggattagtgaattgtttagttattctacgtttcccttcataagcttcgtcctctgtgtttttatggcagagagaagaaacaattctccgaaacgatgacgattttgtattgccttacttcttcacaaagttaactcaaaactttttaggttagaaccctaaagcattaatattaccctagttttcatattatcttttaaggaaaaaaaacaaacaaaattagaccaatttgatgagaaagtatgcaaaaatcctccacctgaggattaaatttgtgtaactattacaatcttttcacatatcacaatcaatcattccatacatggccaatacataaccaatacaattctgtaatagtaacttacatatgataatctattttagctactaagctttactatctggatctcttacaccttctacaagattcggttactaggtaaccagcctctccatctccatgtatcatgaagacactaatcatcaacatgtaatgcacacatctaacttatgctacaaaacatcaaacagatacaagaaatgcttacttggaaccatcattggtaattcagatagcggagagcaagagtatcattaggctttgagtctgactatcagatacccatatacttgacctgaacctggcatatatagcagcttgaaactatagaaattggagtgatatcaagagcaactgtaatttcctttccagtttctaatacatgagactgcaaatagtcttcaccttggtcatttaccggctattcaaatcaaattctcctgcttcacgccagttttcttgttcccctgtctctccattctcattctcctcatcattcaagaaatcttctgaaggttccttgtcctctctctgactgttgtttccccatccattcatcatctcatcagggttcatgttacgtccctgttctcccatctcgtggctaagctgaatattgctgccctgatttccaaccgcattagcccttaatgggttacgagccattatctcagcatgagattgagactgtccagcttgagctaaagccgccatccgcagcttagcctcctgagcctcccggccagccttctccctatccatttctgctttcagttcaatcaacgctttcctttcatcttgtagcaaagcttgttctaccatcaacctttcctcagatctgaattctcccatagctctctttcgagttattatgttaaaagctagtgcttgcttctcaaacgttgccgtgaattcagcaactttcgcagcaatgttgttatcccattgttgagagcgggacaaggcctggcctgttgggtctgaatcaaggattctatcatcctcttctgcttcgtaatctgctacgacatgataaggtaataatctgcacaggttgtaagaatacacgcaatgtgagtagtgaccgcagtaaaccagaaacagaatgttcaaacaaggcaatggatctatctagcaattataaacctaatattacgtcaatagaaccttttcacacagatatggaagaagacaggtaacaaaaatagcaagaataattagtaatatccacggaactcagtaatgtttctcaacactcaaaaggaggtatttatagcttttacgagaaaagacaggacgtaattccaaattgatctcaaagaaatgaggaccatgcagagatgccacatcaaactcagagagaagaacaggatctcttatacttatagacagggaaaatataacagatgcagcatctacctttttcagaaagatacctattcaagaaactcatgcttccagtagacaaagatcccgtttttaatctatagtcacaatctatagttgaccaaaaggctaacatatagtatcattctaattctactaccaaataggacaacagaaagcctcagggcgactcctaaggagataacaactcaaaacccaaaaaaacgtgatagatcattaaattcaattattaatagatagatcaatgtttgatatcattaaattgagactagaaaactatactaattgctgcggctttgatgaatttcatcaaaagtatataaagtttgataatttgcatttgatacaacaaacctctcgcaagcatcttcgagagaagagaagggttgtttaaaattggggtgacaaacacgccaagcgtcctgataagcgcattgaagctcgatgtgattcaatggcctcatcaatttctgctgctgctgctgttgttgttgttgctgcatcatctgctgactcgatacattctgctgctgctgctgttgaaaattcggtgtctgctgtcccaaattagggttaggggtaggattctgctgaggcggaggattaatgggtcggttctgaatcaaccccggtggccggagatgcacgtcgatgttcgacgggaatctagacattgctgcttgttgctgttgttgtttttgcaattgctgcaatagaagcatttgttgttgtctctgttgttgttgtagttggtgttgatagagaagttgttgttgttgctgctgctgctgaggattgttgttacctcccaatggtggcttcgtgtcctccatttttgctttctttctcttttagggattctattttgggattctagggtttttcggggaaatgttcttcgccgtgaataatggttgtcttgtctaagtgagagaagaaagaggcttgtgatttatctgggccaatctaattgggcttttatgattaaagaccacaaatattaagccaactaatcagactaaaccgggaaaacgatagccaaagctgaacccgggaaaacgatagccaaagctgaaccgagaatgtttcgattttgatttttgaccgttcaatatcaaaagttatttttgatatcagacattattttactatatgattcaagtaaaaaaatacatgaaattacagagtagttgtcttataacccttaggaaaaaagaatgaaaatacatgtaatctctatggacttgcttgaacaaagggcgtttatggcgtgtacattcattcattacggtccaaaaacaagttctttcaaagatctaaacggcgagttgtgaccataagccactgcatctctccacaaagccagtcctgtttcatacaaatgggggaagaaacggttaaatgcgttcagagagtgatttatgaacatctcacacttgaatatatggtggaaaacaaaaatggaacgatgataatgtaagagagagtatctgtgaagtaaccaacctatccatgagatcaaaccaattgtagctgccacgaagaatgactggctggtgcaatttaccctgtggagaataccggattatcgataaactcatttacttgtgacaaaagagagttgtgtgcaagggttcttacaggtataagcaaagaatatttccatatccataaaagagagttgcccatagcgaaccagtgagcctgcgtcatggtttaatgaatatcaagcagtttttttactacgggtgaatatagtttaagctgaaaggtttcgaattgagagagcttatatttaccacatcaaatcacggataaatagtgctcgagggatcataagcccgtttcccatcatcgagagcaacattgtgattgacgataagccttttatgttgtccgggtttagaaaatttgtccactgaagtgtagaagaacatcagatatccaatagggaaagagcaattaggagaaagttcaaagaacgagagaaaaaatgagttgttataccatttgggaaactggcatccacatgaacataagagttgctgtccatccagataaagaccctacaaacctaacacctttctctgaaagtttcccagttcgagcctgcattcttaccagtaggtagttaagagaaaagaagaacacttatccatataaacaactacacatcttaacagttgttttgaaggatctacgaaaccaggaattagttgtcagagaatcctaatacagacttggagaaaaagcatcaaggccaccattttttttttctataaaaaagaaaactcctatttcctgacatagttttttttgttcataaagcccaataacaacacgaggactgaagcgaaattgcaatgaaagagattcggcatccaacacttagctcaatgcaaatggttacaatattacccaagctaataatatgaaaacttgttaaaaaggtttcgagataatctcctagaggctaaaagtgactgatatgactaaccaatgtcaacacgttacttacagataaaattatggggggaaagtaaaaagtttttgaaagcttaccatgattatagctgccacagcaataccaaaagcagttgtcccaggcaagatactgtttggtacaagagggacaaatgttgaccacatgatctgcaattttcaaattcgaagtgtcgaattaattaaaacaagtgtctagtctaatgcctttggaatacatgtcaatggaatccactgagcaaacccaaaacttaaaaagggaaaagagtagtaaagagagattacttgaggaagaacggagagtccaccaatagtgataacgtcttcccacagttgccacacagttttgctaagcttaccgaaatagtacaaacagttcacaatgagaccgatggtgacaacagctgaagtagcaacaaaatactgaataggcattgcttcagccattgtgagctgtgcaagcacaatgtgagtagagaccactcccagtgtttgcaccacagctgcttctttttctctcttcttagcaaaataagaaagcaacgaaaggtttcctaacaaaccagtcaacattccctgtatccaaaaaacaaactctagcagtttcagattctatctatcacatccactaaatcccctgtagaaaaaactgatctatgtaatataatatctttcattaccagccatgggacagccgaaagagcggtattgtttcccgccaaaagattctgggtattgaggatgatctgaggcaattggagcatgagaaacggaatgtttgctccaccggagaacttggccgtccatgagtcccattcttggtattccttaaatttccccaaacctggatttccctttgagaaaaaacccaaaataaaaaacatccaccaaccaaaaattaacaaaattgagcgtttgattttagaattcatatgctcagaaattcaaaccgcacctgctgattctcgtgagggaagtcggagtccgagtccgattccgagttaattgaacgaacaggaacgagtcggcgagtcgaaacaatggaattccaccgagtcaagccattgacgccggaacaagagacagcaccaccgatagacgcacgctttagaggcaggctagagagccgggatgtaaaaacgaaggaagagcgaggagaacacgggaatatcaatacacgatcaccaccgagagacgtcgcgatggctttaccttccatgggaatgtgagagaattattgtagtacttgggtttggaacagagaggaggaagaagaagggtacatcagtgaaatcatgtaagtgagagtgttcttgggccgggaaagagatgcacgtggacggttggtattatcgttaattgtagcaatgatcatgtgctcttttgtattgatcctagattttgttttcttcaagtttcggtaacagaggatataaaaattgagtcaaaactagaagaaaaattcaaaaacacgaatatcttttgaaatggcttgaaacccaatagctttggctagagaaaagtccattatgttgtgtaagcccattatctcacaaacgtcttttgccaaaaacacaattctcaacaactacacaatcgaagtcgaactctcaggattcaatcttgataccaaagagaaacagaaataaactaacatcatcgctactgtcgcctataatcttgtgagctctttatcgtcttcaatggaaggtagactttcttaaatgaattgcttttgataattttcagttttcattagtcgattgtgtagtcgagcttccaaagctggatccttcaaaattccttagtgttggtgtttgattcagttcgatgatgtaaaaactcaaataagagtgattctagaatgggaaattttctatagaaaggtagactctgttctgctgtctcattttgaagttttcctttttggattaccaaacctgctagcttcttactcaatttcacctttttagcaatcaattttttcatctgttgacttgaaaatttccgggaagttttatgtttgaaattgagagaaagtggggttttttttttgttttcaggaaaggttttccaaaactttaatgtagtacagagctgctaccgacaaaataagcagtttaagacacgataccaaagagaacctgacctgttcatgtctactttacttccctgtccaagagagaagatggcatttaacctcaactcttccatgcgtgcccacactttgtctaaataccagtttgttctttcaaagcaaagaactttttactgcaatggtccgttctaggcttctttagtatttttttcccggcatcaaattttttatagccctgcatttgtgtattgtt

SEQ ID NO: 1443 - DNA, 8040 bp, Arabidopsis thaliana
aagcttaccgaaatagtacaaacagttcacaatgagaccgatggtgacaacagctgaagtagcaacaaaatactgaataggcattgcttcagccattgtgagctgtgcaagcacaatgtgagtagagaccactcccagtgtttgcaccacagctgcttctttttctctcttcttagcaaaataagaaagcaacgaaaggtttcctaacaaaccagtcaacattccctgtatccaaaaaacaaactctagcagtttcagattctatctatcacatccactaaatcccctgtagaaaaaactgatctatgtaatataatatctttcattaccagccatgggacagccgaaagagcggtattgtttcccgccaaaagattctgggtattgaggatgatctgaggcaattggagcatgagaaacggaatgtttgctccaccggagaacttggccgtccatgagtcccattcttggtattccttaaatttccccaaacctggatttccctttgagaaaaaacccaaaataaaaaacatccaccaaccaaaaattaacaaaattgagcgtttgattttagaattcatatgctcagaaattcaaaccgcacctgctgattctcgtgagggaagtcggagtccgagtccgattccgagttaattgaacgaacaggaacgagtcggcgagtcgaaacaatggaattccaccgagtcaagccattgacgccggaacaagagacagcaccaccgatagacgcacgctttagaggcaggctagagagccgggatgtaaaaacgaaggaagagcgaggagaacacgggaatatcaatacacgatcaccaccgagagacgtcgcgatggctttaccttccatgggaatgtgagagaattattgtagtacttgggtttggaacagagaggaggaagaagaagggtacatcagtgaaatcatgtaagtgagagtgttcttgggccgggaaagagatgcacgtggacggttggtattatcgttaattgtagcaatgatcatgtgctcttttgtattgatcctagattttgttttcttcaagtttcggtaacagaggatataaaaattgagtcaaaactagaagaaaaattcaaaaacacgaatatcttttgaaatggcttgaaacccaatagctttggctagagaaaagtccattatgttgtgtaagcccattatctcacaaacgtcttttgccaaaaacacaattctcaacaactacacaatcgaagtcgaactctcaggattcaatcttgataccaaagagaaacagaaataaactaacatcatcgctactgtcgcctataatcttgtgagctctttatcgtcttcaatggaaggtagactttcttaaatgaattgcttttgataattttcagttttcattagtcgattgtgtagtcgagcttccaaagctggatccttcaaaattccttagtgttggtgtttgattcagttcgatgatgtaaaaactcaaataagagtgattctagaatgggaaattttctatagaaaggtagactctgttctgctgtctcattttgaagttttcctttttggattaccaaacctgctagcttcttactcaatttcacctttttagcaatcaattttttcatctgttgacttgaaaatttccgggaagttttatgtttgaaattgagagaaagtggggttttttttttgttttcaggaaaggttttccaaaactttaatgtagtacagagctgctaccgacaaaataagcagtttaagacacgataccaaagagaacctgacctgttcatgtctactttacttccctgtccaagagagaagatggcatttaacctcaactcttccatgcgtgcccacactttgtctaaataccagtttgttctttcaaagcaaagaactttttactgcaatggtccgttctaggcttctttagtatttttttcccggcatcaaattttttatagccctgcatttgtgtattgtttccctattttgcttggcaaagagatgtggtgttccttaaatctcttttttcttgttgaaatgggtgccttactttggagttttcatttgcagctacttcgtcaagtgctactgtgccatctcttgacaaaaatgattttctgaagctccaaaacggcaggtgaaccatacatcacttaccagctaatcatatatttctctgttcaacaacatttagaaagtactacaaatatccacattttagaattccatgttgactcacgctacgtttcattgttgaatccccagtgatattcggggtgtagcggtcactggggttgagggggaacctgtaagccttcctgaaccagtgactgaagccatagctgctgcttttgggcaatggctgttacacaagaagaaggctgaatcccggcgtttgagagtatctgttggccatgactctcgcatctctgcacaaactttgctggtatgtatctatttccttgatttgtgggacgttttccatgtggcaacagttgagacattaagtattaacctctaagtatttggtctacatatctctttactcggaattttagcccaagacgtttttgcacttctggaaacagtctctttatgcaatgaataagtaatttatccactggaaatttcattgtttactttgtaggaggcggtttctcgaggtcttggtgtttctggattagatgttgttcagtttgggtgagtggtgactagcctttgttgtcctcaacagacgtaaatgaaaatttcattgtcaaatattacaaaattatattctcacttgttactggaagcaatgcaacaatcaagaattttgatagtgtagtgctgcaaggtcatataattgtttgaatcacatttcccatataacctattgaagcacatctcttgaaaattggtttatgtttttttttttttttttgcagattagcatcaacaccagcaatgtttaatagcacattgactgaagatgagtcattcttgtgcccagctgatggggctattatgataacaggtgattcatcaatctcgattttcataacaagtagttttctccttataatatagtcaatagtcatcactaagtgatacttttccattttgtacctcatatggtactatgctattattttgagcagcaagccatcttccttacaacaggaacggtttcaagttctttaccagtgatggaggacttgggaaggttgatatcaagaacattttggagcgagctgcagatatttacaagaagctttctgatgaaaatttgaggaaatcacaaagagaaagttcttctattacaaaggttgactacatgtcagtatacacctctggtcttgtaaaggcagtccggaaagcagcaggagatttgggtattactcctttgagatatttcttttttcaggaatcttagcataatcaagaaagttctgaacttctatttatctgctgctaatatatcgagcttaatgtatggcgtttctgattcttagagaagcctctagagggatttcatatagttgttgatgctggaaatggagctggaggattttttgctgtaagtccaatgcttatgtttcttactttcagttgtagataggacttgaaactgaattgtctgtccaggcagttcgttgtttagacctgtctggagttgattttttcttaatctgaaacctgacaggccaaggtgcttgagcctttaggagcaattacttctggcagtcaatttctggaaccagatggtattatctatgcgtatgagtatatcttgccctatttttaattgattgttgatcaaaccttttggatgatttcaggtatgttcccaaatcatatccctaatccggaagataaggcggcaatggaagctataaccaaggctgttcttgataataaggctgatttgggtatcatctttgatactgatgttgataggtagtaactgcagctatctctgttacttaggagaatttattagattgcctcttacaaagatttttgtgaaggtctgctgctgtggattcatctggccgtgaattcaaccgtaatcgtcttattgccttgctatcagccattgttctagaggaagtgagatatgctctaaccattctaccactaccgtgattgggtatcacatatattgtgtattaacagtttttgtattctgatgttttttccttgtccatccagcaccctggcacaactatagttacggatagtgtcacttcggacggtctgacctcatttattgagaagaagcttggttagccaacaatttaccaccatgttgttaattttctctgtgactttttcactgacccagacttattttaggcggaaagcatcacaggttcaaaagaggttacaagaatgtcattgacgaagctattcgcttggtaataaatgatcgtatctttcgagaactcatgcttcggagccaattgttgttagctatcttaagttgtgttagaattgatacagtatctaaaagtgttgagtatagaaaagggtatattattaagttgcagttgagttagatagagaaaccatacattctggcaggaaaagcttactccgccttatggaccattgataattcttatctgaaatagaagttgtgatgtgatggcagaactcggttggggaagaatcacatctggctatagaaaccagtggtcatggagctctaaaggaaaaccattggctcgacgatggggcctatctcatggttagcatattttctcatttttacatgattttcgttgtttgaagaacagaaaaaagaaaacgaagtttgtcatttgcaggtaaaaatcctgaacaaactagctgcggcccgagctgctggtcaagggagtggcagcaaagttttaacagatcttgttgaaggtctggaagagcccaaagtggctttagaactgaggcttaaaatcgacaagaatcaccctgaccttgaaggaaggtatgattgatgacttgcttcagttctcgactagtttttttattgcatttcactaattagtgaaaattgtagtgatttccgggagtatggagagaaggtcctgcaacacgtgtcgaactcaatagaaacaaatccaaatcttataatagctccagttaactacgaaggggtgagtgttagatatatgagggctccctagaatctgcctccactacatagtataaatctttcatctcttttgcaaaaaatagatccgcgtttcgggctttggtggatggtttcttctcagactttctctccatgatcctgttcttccccttaacatcgaggtaaacatatgtataaagcttaacttagtttcagtatctaaactttcactcgaatttttcaattggacgcaggcacagagtgaggatgatgctgtgaaattaggccttgtggttgctacgacagtgaaggagttcaatgctttggacacctgtgccttgtccaacctcactcactcctcctaagattggcatggaacaatgtaggtacttggtttctctacattgtctattaatttcctggtgcttgttgtttctaatatcaagaactaatcagttcttaatctccaaaatcctccaggtaacaaatgcaaacaaatacagagagttcgagtttctttactaagacaatcattgcattgaagttatcaataaggtagtttttacagagaagacatgatcaatttattagagcttttgcttcctctattgaatacaacttgaccattaaacacgccttcaagctcttccacaaacctctgcatcgccttctctggcaaacaaaccggtacaacgatccctatctcaccatttctcttctcaaatgaaacgtagaagctagcccccggaaggtcttcaactccggctgtaccaattcctccgtaaactggtttcccccaaattccgaaatcaatatctgcgaaaattcttacatccgaaaccaagtaagctccgtccgacgagaagcttggtcttccctttatcaccatcagatccgcaagtgatcgcatgtactcctccgtcacgctcgatttcgcctcttttattagtctcagagcaaactctaacggtttcttagttagttcattagctgttgcgattgcgactgggaacgcaaaggcatttccgtagtatcctcgaggtagtggtggatttttaagcttagaacgtgcgttgacaattaatatgagccgcatctccttgtcctggtctggtcgtagagcgatggtgcgataacgccataagaaagacgttagcatttccatattggtgctgctgttgacaagatttggtgggaggagcctgcgtattgcggacatctcgcagggaccgaagaagagtgaccggcctaccagattgtctcttctactgccgagttctgtacctattgccggcatttcgtcgtactctcggtgtgcgtgtgtcacacgcagcaggactctggcgctcagcaggtgacgttcccacaccggagcaaccgtaggtgcatgataaccacgcacgaactcgcacatcgttttgaggaacagcgtgagaccgccggcatcggacattgcgtggttgatacggacggcgaagataaaaccgccgcatttcaagcgcgtgacctacacgaaaatgcatgaccgtccccaaaattattgttactacatcgcttctattacatttcacgtaataacgtgaagaagtcttatcatattattttcattttgttataacaaaataggacaaaaaatattctttgcaaaacataaaactcattaataacattcgaagaaacgttaaccaaactttatttctatgtgtgtatttcttttataaatcgatactatgtgaaactgacctgcatgagcatcaaaggagtgttgagcatttcacaagaaccttcaacgttaaacagaagctcttcaaagcaagggaaaggaggcttaagagcatccttctcttcaaactcaacaagtgtcacgtcagcatcagcctcaataaacaaaacgccttcaccggtacaatccacagccagtttccggttcggtccttcccgaagcctaccggcgaacggatagtagtaaaccagcgtctctgcgagagctctccgaatgactgcgacaggatcagagttagtagtagggttgtgtctatagaaaaagatagtgggaatgtgaaatcttagtccttcttggtcgtcaatatctgagaggggtttgagctctcttggcgttggcttcgccggagaaactaactccggcttctgccggtaaatcttaaacgtgagtgacccggacatcgcgttagtttggttgtacagtcaggattattttgtggttacaaacttatattgatcttattatatttatagaaagagcgaagtctcaagtttgacatatcgtacttttaccaaaaaaaaaaaaaaaaaagtttgacatatcgtatagcattaaaactagtttcttaccaaaaaactttaattaaaataatactatttttaatcaattttgtttagagttatttctcaatgagaaactctctttcttacatgtcgagctttcttcttagtttatttttctttgtaacaaatcaaatcatttatagtttataacattaacctttttaaaagaatcacataaaaattatcttatattaagtttcattatgtataagtttaaattatatattaatattattttaaagttcgatttatgtttcattgtggttttaaaaataataaaactctttaataatattatttttataatttatagtactatttactgttgcttttaaaattatgaatattcataaatatattatttacttctataaataaatataattattaagtatgaatgactctattatgtaatttgatatgtttaaaaatattaaattgtaatatctaataatataaatattatattgataacttatcaatagggatatctcactaatgaaattataattttagtatgagttcttctaaataaattttagtatgtattttcattggt

SEQ ID NO: 1444 - DNA, 96050 bp, Arabidopsis thaliana
gaattcgtttccataccccaactctgacatgtgtctttggacgcagctcacggggaacagaagcttctgctttgtcaagaagagacaccaaagagtttgctgcttgtcggggatcagtaggatatgcgctcaaccctggttttagctgaaatcaaatcagtaaatagcttagagataaagttccaagaagcaccactaaactgcaaattaaacaagaaattcaagccaccgcaatgtgatgaaactagtaactaaatgatgcaagcgaggtgagttcaagttttatcttagaattccaggaacacagagcacaagtcaataatatacattgaaagcaaagttctaagcttcccgtttatcctattgagctttacctcagggcaagagatattaccatgatcaaatctagaggaggatcaaatattaaaaatccttcatcatccaaacgaataatcttcttctaatcgttttcgaaatgcgttctaatggcaaatttcacataatttcagtttttaaagatcgtcgcatcaggagataaagtttcattgtatctcaaacaaagtcatattagccctattcgatccgttgggagatgcaagcttcttcaccaagctctagcaagtaagctacacagtgcaagcctttccacacacaaacaaccatattaacataaaataacacaaatgtaccacaaatcaccataagcaatgaatcaaatctcgggaatgacacaaagatctatcaagcacttattaagccatagattatgatccagaaagaggagaaaaaaacgaaaccaatgtatcacctgtaagaagagctcaagttcattcccaagaggaataagatccaaattctgatcaaaacagtaaacatgtacacggctaccagaacttccagcatcaaaaatcacagcgtaattcttcggacctctcgaattaggacctcctttgcgattatgcacagaatactcttcaacgacggaatcagaaatcgatctcccaggcattagcagaagaacgagaccgatcaacacaatgggaaccgaaatcacaagtataatcccacgatggcgttggatcttgtcagcaagagattcgtgccgtccaatcccacgcttcgccgtcatcttacctccgtcaacagagtcggatgtaggagaatggttaccagactccaggagctcagtggaagaaggcgaacggtagcgtatcttaccgttgccgttgccggtaccggaggacgccgtggtctgcggcggatcctgtaacggctccagatcgacggtgaatttgggaaagcggcttgaatcgccggatttgatctggaatccgaagcttgtgtgtgcttcagatctgaattttgtatgagagagcgatggatgcaaacaaaagacgttatgggttacgattgcgggagatgggtaactcccaactatgtttaactctcacaatgagcttacgcataaattagttaaagttgatttttttttatattgaaattaaacagtagtaataaataccaaaatatttaattaagtacttcctctgttttaatttatttgtattttaaagtttttgttgaaaaataaatgctattcattaatatttttttgcaaaaatttatgattatttatttcttttgattatattggtattatgcagaatattttgttattggttgcatatattattttaaataaaaaatgacgttatagtataaaaaagataaacaatttacataatttatgtagtgtcttaactttttatgtgtatgcaaaattcttaaattataaataaattgaaacgaagggattatcactaatattttcactaacaactcctaatttttcatgagatttttaatttgactgtttactttttatatttattttttttgcaattttgtgatagtgaaacttggttgaatcgaacttggtataatttgataaaaatcaaagctaagtggatatcaaaaccatataaacctgagctgtatgaaattcggtttgagtactctggttaatagaagttgtaaatcgaaaacatgaaccttaaccggattaacccaccctgactctccttcacgtaccgaacttaaccaatactactcaaccggacgagagtgaatttgtagattacgcactaaccgagaaaatgtgaatccataaattttaaaaagaaacgaattttttttttgggctataaactataaattaagtacaaatacgacaacagcataaaacatacaacaaatgggattatgattcatgaaatttttacttagatttttccatttttttctcaagctttcttctgttttttctgaaccagaggtggagccggaaatataattctaaagagcatcgcagataaaatagctccggtgtaggagctgatccaatacacataaaaatggtcccatgtgttgtgagacttgtagatatatgcccacccaaacgcctgcatcacaatatataccacaagactatatatcaagattcatttcaaaatgtaataaaaatgaattaacaattcttgagtaggacgagtatgaacttacaatggcaggattcatgaatggtctagtgaatttagaacctacgacaaacaccgatacggtagcgagtgcgagcaagaacgttttcgcgagcagttttcgaggacctcttaggataattagtaaaaccaaaaatgtaacactaaaacttaggaccacttcagaaatagctccattgtgtgcaccaaattgcaatgaaggctttcctccaatcctagtcttatacttttccggtatcatctccatgatcgttatcgcaccgcctgccgcaccaattgcctaagatatataaaaggttacattacatatggaaacaaatatgccagtgggtacttgggccaaaatctccaattaaaaaagtttgtacgttattcaaaaacacacatggaccacacacaataaacttcacatagatccaacaaacaaagaaaatacattgctctaacaacaaaataaatgtaaagaaattcataaacaatgtgtaaggataaaactttaatagattcttattcgaagagacaagacacaaaagcaaatactcatatgaaaagatgtcacaagtatatgaacaaaaatctttctgttcagaacaaaataaagaacaagaagaagaagttggtttggtttcaaaagctagcttagatcataaacacacacctgagcaggagatctaatggccaaggagaagagagaatcactggaaacaccggcggtataaaacgctgcgtttccacaaggattgaagctagcaccaccaagaacgtttccaataaccgtaaaaatcgagatggagacaaaaacaaccaacgttgagatcacaagaggagcccaagtgataccatgaaaccctacggcggaaacaatcgccgccgtctgtatcccaaacgtcgccgagagaataacccacaaaaaggttatcaccatatcacctaacgccgattttaccgcactcatcgtaagtatcgtttttttttctttttcttgaacgtttgggtttaagaagattgttttcttcttgttgaaaagaatatatttatcagtccactcaaaactaatattctttttttatatagaaggaagatatgtatgactatgagtgactcacctaacggttagctgaattttgtagaaatgtagatagactatcccaaatttatatagaaaacaaatatacttttgtaactcttagaaaaagataattgaaaagtttgtagagaaaaagatgaaatccttatgctctgattaacatagagggcctgtttaattccaaaatgggtttgttgtacaaaatatgtaatgagttcatttccatattctctgccacctcaaatgaccatggttcctttttggtgagctctgactatggaaagtctatactgctttttttctttttcctttttagtgtactagtgtacaaattataatgatcaaatgaatgtagacactattgagaacagatacatgtaaaaattaacttataggaattgagcacaaacaaaaaccttttttctttcctttttccagtatatattagagtaaaaaaaaatgatatacataggctggtatatagtcaagatattataaaaaaagaaaaaaaaaggacagaacctaaacgagaaacataatttatggttctgcagaaagtatacccaagaggccaagaccccctcttgggacgaaaaagagagagtttgttgcatttcttgatattcaagtaatgagatcgcatgttattattagcataaattcgttaaacgatattagctaaaagaattaggatatgcttatgagcataagtatcaggggtcggccctgagattttattgttatctaaccttagaacccaaacttgtggtctgtttagccaaggttaagaaagaaaggttaaccaaaccattgctgactattggactctagataggcccagcccagtgcgaaaccatacaaatttttttgttttccttttgtatctcctctacataattttttttttcaaattgatgtgtttggaattattgggccacaaaataaatgtctttagttttttgaaaaattattaactattattcgtttatttttttgacatcattattattcgtttggtatagccctgtgcctattggatttatttttataaaaataacatgaaaaacttgtaaactttcctttttgtatatttatatatatccaaaactaatccaaattagataatattcaatagtcggttctcaatcatactccactttatataaacctcattagaggaggttcataattaattctctctcatttgactcgaggaaatttcagaagaagaagatgatgccgatgactgaagaattttacgatgaagaggaagagcttggttgctttagatttaatccttcagaagaagaactcatactcgattatcttctaccaaagcttggcttccaccaaccaaacacgatatatttgttagaagacagggacaacatctacgccaaagagccgtggcggcttaatcacacagagaatgatatctttgaacctaacgagtggttttatttcgtgaaaaggacaaatcgcaaagttaaaggttggaaagccactggagagttaaaagatgtcgtgtcgaagaaaaccggtgaagtgatcgggaagaagaggaatctcaggttctacgttgaaggtgatgagagcaaaacgagtggttggaccatgagggagtattcttccattggcaatcaaaaccaacgtctctgccaccttaaaggaccatgattctgtttggtgaatatccctcaaaaatatgatgattatggaaaacgatgacttcttttttttttttttttttctaaaggtagttacgttactcatcatcattttatttcgttgtgtttcgtttgaagattctcccgtattcttatatctttattagtatacacattataagtcaaggatctgagagtctcaatgttttcttgtttatttaattaaagattattcaagttttttatgaggagctttgcagctcttcgcatgttacttttttcatagataacaataatggtttccttttttttccgaggaagacagtacgtattattcatataatgtatgaaaatataatgagatattaatattttcttgagaaatatatgaaataaagcttgtatctaaactctaaatccaaaccctagagtagaagaggtaaacatgtttcaacaaacttttatgataagaacttatcttttgtacgtagtatatatcaacaaaaaaggaagtttgctagttttcttgctctatttagtcaatctataaaagatgaaaaaaaaaaaacgatattgctatttgatttcctatatttttgtatgaattgattgtagaggattcttcttcttctgaacatattgtagtaatatatatatttttaaagaaatattagatcgaatctcacaaacggaagaatctttccacgttttgaggaatacggtctgtcactgtcacctacacatatgaaatataagtctgtttagggtttttagcgtcggtcttcagattttgttggaataggatgtcctaaacatcaaagatctaaaaattaaatcaaaattgaagaaaaaaccttagatacagatctatttttggacatttagtcactcttttggacgcttctttggacacacaaacacacataccttagacacatttttcaaacatttaaaattttagatcctctatatttggatcccatcattggacaatgtcaaatataaatctagttcaaatgtctatttgtaaattttttattgtaaaatatggatcccattgttgtagatgctctaagggaaaatacgtatggtcaattttgtcaagattgagaaagaaaagttgaaccatatataatataacttaacattgattatgtttttcttgtggtatgttttgttgttttgttgtttttagttgtagttttcagtcttactctcttctttgtttgattgtttccctattaatcgctgatgcaattcaaaaatggtataaatatttaacgttataaattaatataaggtgagcaggaaagctttatatttctttattacttgcaagtttcattacttgtatttcatttcaatatttataggataaagttttataacataaaaaatatagtagcttcaacttttgttattatatagtctatgcaaaaccattttaaaccgacagataaatgcacacaactgacaaatttgttgttggttgaggtatggattggcagcaaaaaggaacttttaaaaatgtgaactttgactgtgaatctcccaaaaactcccaacttcttcaccgtcatcgtcaagcttacgccaaccacttaatttattacacatagactatcatttttctagagacaacccataaacaataaagctactttttcaaatgtaacccccatattctttttgttttgctttgtcaataaatgtaaagccattttttattttgtaactgaaacattttcattactatttggctaaattagctaaacttttcttcaatcgtttggctcacgcttctttttttttttttttaacgcgtgcgtttaattaatctaaatgcaaaccataaatctataaatactttttactaaagagagtcagttactcaaatggtgaatagctttatcattcagtagctacaatttacgggaaaagaagtaatggtatccaaatatttaatttatagtgctctgaaagattcaccatatattgaaaaactagaaatagaatttttctattaccattttaattatggtagacaatgtaaagctcatgttttttttcttcccaaatcttgaaaatgagttgtttagatttttaaactaatagatgtagtattttttccaaagtcaatagccatggtttagttacagaaaataaaatggctacgatttggtcaaatgatttatggcttgtagattaatattcgatatttaaaattacgaggatcataaacaaatggattgaataggactataggagtgattcattttctaattttcccattgggaaaatagcaactaggtcaacgacaaagaaaagtcaagacttgtttatttctgaattctgaccgtatatcactccacgaggccaggctcctgcaactcaaacgtctggtttcagtttggaccaataaataattttagagtttatatcttctaaaatcaaatgtagaatttgcatggattatatatggagatattactagtttaagatatcctataataccaaagtcatcctcaaatgtaaacactgaactgtttccatttattagtatagactcattgattgaaaataatggaaaactatagatgatgataaataaggaaacatcaaagagctaagtatttataatagctaataattaaaaattatatccatcataaacaaaattcaggaattcccatgtgaaaagaaaagtggaccgacaatataatagtcaatcatcacaaatagtaagaacgtaacatagcgttagatgcgtattcatataacattatgaaatgctaactgattgattttttctctttttaataaagtggacatctttgtcaacaaaatgggtagatttttttttaatgaactgtaacgtaaagtaaatgtgtcactgacaaaacctaattaataaaagccgtggactatagcgcgtttcttctctcctttttcacaccttcccctgcactcttcacttttggtttttgtttttcttctattataatggtttaataaaatatatatagtctatataatataatataatatgtaacaatgaagttttgtattcgagtttttatccaacaaaaatcaggaaaatagctaactgttttttactagtaaatttctgattacaacttttaaaaaatatataacacttattgtttactttgaattttcatatcaaggtgacctagtagggattgaactgaagtaaacttataaacacataattttttggaaacgtaagaacttgaatttgtgatctatccaattgtttttttttcaatcaatccaacttagaagagactctactctccactagttgtaattaaaaaaacaaaaacaattaataaaatgaagaaataaaactttgtatatctctcataaagtcgactatttagacttttagaggtaaggacaatatcttctttgcttacataccccactcttgttataaaagacagtaacctttcttgagatcactctttcttatttgtgtgttagtgcattgagagagagagagagagatagaaagagaaagaaatcgtcatggctcatgtaagtgaaacttctctaatcctctatccttgtttcttcctgtcgtctttaacatatagatcgtcaaaacctgcctaataatgtcttatcctcacataacacctttttttttatctccatctctctgttacttagaaccctccattcatatatacactaggtgccaaatttggtcacgtgtttggcccttcacgttcttgactcttagctagatccttgtttcttgtggattcttgaatcttaaatcttgaatccctgagttttgttggttcttgattttgattctcgattctttagtcattgattattcgatctttgttggtttttgattagagatttaattagcatatttatgtactaataattgaataaatgggaacaggggagatatgatacttacaagaagaaaagtggacagattcctcggtttggagaatgggaagaagcaaatgagatgccaataacacaatactttgagaatccaagacaagctggtctgattcgtcaccaatacacaacaacttcttctgcttcttccactaccacttcatcttcatcttcttcttcttcttctgcagaagccttaaagcttgcttctcaccatccccgtccacgtcacctccacgctcaaagacaggttcattcatctaatcactacttatttttcttaattatataacatttatttaactcgataaacgtaattaagtatctaaagaagaacgcgttgtttgtttgattaatgacttggcgtagacggcggggacgaaggagaaaagaggaccacaaaggcgtgtgcgtgacgtcagtgcacagtcggacaagtattacattgacgtcaacggtgttaagcagttcaaaaacgacgttgctctgacttgtaagccacctaagcccgttgatgaagatctctacaagattcctcctgagtttatccattcttcaacaagggtaagagctccttctcacacacaacttattttactgcattttataacaaagttttatatatttttaatcaacttttcaattttatatcactttttctttaactttgtttgttatttaaaaagagttttaaaataaatttggtgttgcagaagagaaggcctagctttttagcttgtttggttccatgcgcatgaatcgaaaaggaagagcgaagaagaagaagaaaaagtaggatcatgaatgaataatgtaatttgttttttgtttttgtaatttcatcctaatatacagatatgatatatacgtggtttgacagaaaaagagagcatacgagtggtttttgaaaaagagtaacaaagtaatatcgtagtaaactagagtaatatatccttttgtcttgttacatatctactttataagattttctctcatttttttttcacgtacgttctcaacatttttttttgtgttttgtaagagagttttaaagaaggcttgtacatctttaatttcataatcacagatttagtaaaagaaaacacttacaaagactaactatcccaattttattcttctcttttatgacttactagttcatcaatttactaaagtcacaaatagatgtgtagtatagcttgagtataattatgattttttttatgaataaatacattattgagtataattttttttatgaataaatacattttagatgtagattataattatgaataaatacatgattgagtataatttttttttgtatcaatgtacattatattaatttcaattttggaaggaaaaaacttacataatggttgttgatcgaactaataatatccgaaaacacataagagtaacaaagtcattggtagatggcctaaccaacccccactatatatttcgatttcccttggagtcaattatcactcattccacttttgatttttgattatcccgtgaccctaatttatgagagcatatctatgatctatcatgttaatcaattgtgggtaaaactccacattttgaatatggtgatggtgattggtgagtgtagtgttttgctacaaagttatcacattgatttgattctccatgttacatcgccactttttcttgtccttttccttccaattttagccccacattagctcaaccaattaccaccgacgccctcctcaaaatccttaattacgatccattaaccccaccataattatttttaacaagtaattgattatctcttcaatctcgagtactaaaaattatttaattgttgattggagtcaacttagcataatcaacacataagaggagattatgaccggccatataagccgccgcctattgttagattcctaagttatccattcagttgacctatatctacggtaatgccattgccttccctttggcttttatgtctatcattgtcattataaccattatggcattcactacaaaaaagagagaacctctgcttttgtaatcctccaaaaccctcaattcacgatcatgaatcagaaagtcaactaagagtagcaaaactcaggcctcttcaggcactacttatcggtctcacagagactatacaacttttccttctttctttctacactttctaaaactatctagtatttacgatgaattttggatcggtatatatgtatcatggagctattaacaagacctgattttggatgattccttcatgccctctgtggctctttaccagtaacgaatctctttatccactgtaatatcccttgtgcttttctcgctgcacgaactgatccttgcttcgcaagcttcgtaaatgtcccgtgttgattctcctcttctcctaccactttcagtctggacctgtctctgtttctgtcatacatgttgaagacgatcactacagcgttctcaccagtcagcaagctactcggcttcctcaagatactgaacagatcatagataaaccctagtttatccatttcttcaacagcccggttgtgtgtagatatcaatgccaagagagataacaactcatccacattgcttcctgctttgatctttttggttgccgcatgaatcaaacccgctgaaacaacctttcccttgttctccagtacaatacagaggttaaagacagtggaagtggcttctttggtagctaacaaatcaccctcttcgataagatcaatcaaagcctttaccgcttccgagttcccaataatgatcttgttagaatcaatggctgaaagtgatgataaagtcgcagcagcgtttcttcgtgtctcatctgtcccctgcttcaaagactttgtaagcagagggatcactagacagttttcagcaatcactgttttattactctcaagaatcgagaggttgaacaaagctgtgacaatattctcttgaagctcgagactagagtctactgcctcgtccaaagtagagagcggactgagcaaacgggtgatagaatcatggattccagcgacaaagaagacccgaacattaggaaatttcttggtctggtgacgcagctcttttgcagcttctatctgatctgcaacagaggaggaagaggaaacccgctgtagcaatgcttctatgtcactagtgaacagctcagcgactaattcatcagatggtttttgatgatcatatttgttaacaaggcaccattgcgtaatcaagtcactgatcaaatggtttggtatccaaagacggtgagaaaggacttgtttggttttgggacatgtacgttcatgcttcagccactctgtgatatatctcttttcatacgtctgaaaaaataaccaacataataagagaacaaactcagcacataaacaccagaatctgtatcgtaaatcaaaacttttcaagaaaattagatcaatctctgtattttctacaacacaaacaaacacatttgtttcatggaggatctttcttggcaatgtgaaccattataactctgtttctttttcctctgatactaaaactttgtatgcatatgcataaagaaacaaggtggatttatatatacacataaatagcattcatatgaatatatcgaaattgaaacacatgcaaattcaaagatcaacacactcgagcaagaatcacaagaaattgtcagaaatttggctaaaaagaaaaagaagagaataatcaaacaacctgcccagaagcaatgatcacaggctcgatcatgatcgtattggagagtgtacatataaactctttcggcacttccaccggagaaatatcagattccggtatcttcgattctactttcctcagacaagtcaggattctaaccgcttcatcaatcgctttcacaactccagaaaaagcttcagtctcatcgcgatcattgcctcctccgtcgttcaaaatctccgtcaatactttctgtaactcccgccgcagagtatcggcgtttgtttccgtcgaatccgccatttcagccggagaattctcgacgaacgcacacgtgtatacacaaaaacccaaagcaaaagaagcaaaaaccctagaaactcgagaattaggggaatttgagagagaagcgaagaaactcaaatatgtatgtgaatcagttggctctttttctttaatctttaattaaaatttttgatttttgttttaattacgtacgccacctgtgtatataactgccacgtcatatccgcattctctgcattcttttttgggaatagtttagctaacagacgactttcattggttaggaaattttcagattcgttggtgaataaaaattctttagttcagtgtatattattaagcatgctatggtatatgatctaattaagaattccgtgtaatgttctactgtcactttattagtccactagattagattgtttttagtcttaccatggttggtaatttgtatatccttaatgtttaaggttattttatactcgtctaaataagatcacttcctttattggaaagtcacagcctttttttttatattttgtatatgattttatttaacatatttttctatttttttatatgcttgttttggcaatgtttagttagagaaaattagagaagagcttaattcacttacaccacgcggtttactattctgatgtgtaaacgaaaattagagaagagcttaatttcggatttgcttctactaaatagggacatgttcacattatagattagttattataaacttttatatattgttgtttgtgtatacaaacaattatcttcttcgtcatattatattattagattattactatcgatatatacaaatagaattttatactttattcctttatttcatatcatacttctagaaaaaataaaaattcataacaacttctaaatatttattaaagatgtaatgtaaatcacacgatttgaatttcttgtggttatagtttgagtatacgaaaaatgagcaacatgctggagtatgttacctttttgcgagtatttaaagaaaatgccttctttttttgtatagcttgctgatgagtgtggtctataaagtttgaagaagtttagttcgtttatcccaaccaaaatataagctttagtgaacacgatttagacgataaaataagctacactaaaaatatgatgtcaaacgaaaaaaaggcttatataaagttatgtcaaagtcaaatgagttatggcttgagacttgagagggaataaaaatgggtgggagggatcaaagtgtgtgccgtttcgtgaatgtgacagcgaacagcagaacatttggaagaatacaagagaaaacatccacatgatcacttgctgtttcctttggtttttacgcagtctccattgtgtgcgactcatatttacaggtcggtgtcttaatatggccatgtgtcatgattatgctacttttggtcccaatgttcaactaactcctctgcatcacttttaacggtcgacaaacaacgaaacgtataatctcttaaataaatcaataaatacctgaagccaagaaaacattctttataaaaaaagatagagagaagtagtatacttgcaaaagcaactcaagattctttgcagaatattcgagaaaccaaaggagacacatcatagttgagaaaaatattgatgcataatagaaacggccttttccacgttctccaattcattaaaacagaggtttaaaacagcgtaaacagcttcacccgtggctgataagtcatatgagtcaccgattagatctatcagagccttgagtgcttccgagttccttatgatgatcttgttagaaccaatgcctgaaagtgacgttaaagtcgctgcagagactctttttgtttgatttgtccccttcctcaaagattttgtaaacagagagagcacaagaagtttttcagcaattacttttttatcctttctcaacagtcgagatgttgaacaatgatgtgacgatattctcttgaagctcaggattcgagtctacgtctgagagcggagtgagcaacctaagtcaacaaatttttggtatagtcgaagccgagaatatgtaacattctttgatattatgcaagaagtaacgtgtaagatgaaaaagaaaaacccatttagttgaaattgctctcagaaagtgttcaacaaagaagaaaaagaatatttaggggtttaagaagatcaataagcttggtacaaaatctcatctccactagtggtaattcaaacgtgagcttgatgattactacatgccctctgcggctctttaccgtaaaatccactctaaaatcctttttgctaggctcgtggcacgacctgcttcttggttctcaagcctcgtaaatgtcccgtgtttattctcctcttctaggaccacatcccgtttctcctctcttaggaccacattctgcaaggctttgtaacttttacaaatgttgtagacgatgactacagcgttctcatcattcaccaagctatttgagttcctcaagatactgaacagatcatagataagccctagattatccatttcttcggtagtttggtggttctgtgtagaaacaaatgccaagagagataacaacatagatacattgcttcctgctttgatctttttgattgccgcacgaatcaaaccctctgaaaccgccttttcactgatctcctttactggacagaggttagaaagcgcggaaaaggcttcactggtggctaatgaatcaccctcttcgattacatgtatgagagccttgagtacttccgagttaccgatgataatcttgttagaatcagtgtatgaaagtgaattcacagtcgctgcagagtgtattcgagtcagaactgtcccctgcttcatatactttgcaagcagaggaagcacaagagggttttcagcaactagtgttttattcttctcagaagtcgagaatatgtgcaatgctgtgacgatgttctctagaaactcaggattcgagtcctccgaaatagagagcggagtgagcaacctggtgatggaatcagggattttggcgacaaagtagacacaaacactggaaaatctcttggccttgagggcaagctcttttgcagcttctgtctgatcttcaaccgaggaaggagaggaaatacgctgaagcaatgattcaaggtcaccagtgaacaggtcaatgacttcatctgatgtttttggccgatcaaagttgtgaattagacaccattccttaataacctcgttgatcaaatggtttggtatcataaaacggtggtaaaggacttgtttggttctagggcatgtacgttcatgcttcagccactctaggatatagctcttttcaaaagtctgaacgaaaaacaaaagagtaaaatcagcatatataaaaaccagagaatctgtgtcttggatcctaactatctgtatttgcataacacataaatgaacacaccagaatcatatatatatatatatggatctttctttttctttgatactgaaactttaaatggaactttatatgctcatacgaataaatggaatatcgaaaactgaagcaagaatcacaagagatcaaacctggccagaagcgatgagcataggttcgatcatgatcttgttcgagagtgtacatataaactcttttggaacttccaccggagatatatcagattccggattcttcgattctattttcctcagacaagtcaggattctaatagcctcatcaatctcacagtgatctttgcctcctccgtcgtaccaaatctccggcagtaccttgtgtaactcccgccacagagtatcagcgtttgttgactcgtccgccgtcgaatctgccatttcagccggagatttctctaccaacacaaagaacccaaacaaagaactgaaaacccgagaaacttggtgaattaggagggaaagttttctgtttggaatgtagagagaagccaagaaactgttttatatgatatgagtttgttttattcctctgtttctctttaattacgttacacgactttgattggtctggaaaattcggtgatttaataaaaattcttaagctatatgctctgattaaaaattctgtgcaatgtttttttataaaattttttatcaacggttggttagtacatgattattttttgatataatgtaaacaagagaagttgaagtattttaatcttgagtatttttttcgtaaagtatttcaagcgatataaacaacaacaatcccttgcaccaaaaaaagagcaacaacaatccctagattacaagtctcaaattcttctactttcaactcgaattctttctttctacactttcatctgtatatgtatcaaatgtaactttgctgaaactattaaggtattaacaagaccttagttttgatgattccgtcatgccctctgtggctccataccagcagggaataccctaatagttaatacactgtaaaatcccttgtgctttcatcaccgcaacaactgatccttgcgttgcaatctttgtaaatgtcttgtgttgattctcctcttctgccaggattttcttaatagacctttctctgcttttagcatacatgttgcctacgatcactacagcgttctcacaagtcaccatgcaacttgttttcctcaagatacttaacagatcatagataacccctagattagccacttcctggataacgcgttcgtgtggagaaatcaatgccaaggcagctaaggattcaaacaaatttcttcttgctttgatatttttgattgcagcaggagccaaccccaacgagatcgcctttttccagttctccctttcatcacaacagaggtctataacagcgcaaagagcatcatgagtagctgataagtcatccaactccccgattagatctatcagagccttgagtgctaccgagttccctatgatgatcttgttagaatcaatgtctgaaagtgacgctaaagtcaatgtagcgtttcttcttgtcacaactgacccctgcttcatagactttgcaagcagtgggatcacttgatggttttcagcaagtactgttttattcttctcgaaagtcgacatgttgaacaacgctgtgacgatattctcttgaagctcgggattcgagtctacctcatcgcccaaaacagagagcggagtgagtaacctggtgatcgaatcagggagttccttgataaagaagtcacggacattgacaaatttttcggtctggagggctagctcttttgcagcttctgtctgatctgcaaccgaggaggaaggagaggaaatccgctgaagcaacgattcgatgccatcagtgaacagctccgttacatagtcaatatcagatggttttggggctggccgatcatatttgttagcaagacaccatcgcgtaatcaactcattgatcaaatggttgggtgtcaaacaaactcgataaaggacttgtttggctgtgggacatgtaaggtcatggttcagccactctgtgatatatctcttttcatacgtctgaaaacaacaagtaaagagcaaaatcagcacgaacaccatatctctgtgtatacgcatatatgtgtctttatctatatgaatcatgatactgggcatttcatattcataagtatcgaaatcaaaacacaagcatggaaattaaaacatgagaactaaaatcgagaaagaatcacaagaaatcgaacctgcccagaaaatatgatcacaggatcgatcatgatcgtcttcgagagtgtacacttgaactctttcggaacttcaaccgaagaactatcagattcccgcttccgcttcttcgattctactatcttcagtcgattcaggattctaatcgcctcatcaatcgatttcacggtctcaacgcgatctttaactcctccgtcgtttaaattctccgtcagtaccttcttcaactcccgcctcagtgtcagagtatcggcgtttgtttccgtcgcgtccgccgtcgaatccgccattttcagcccggagatttctcgataaacgtagagaaataaaagcaaagaacactagaaacttcgagaatcagagaagccaagaaataactgttatgtaaatcagttattcttcttcctctgcttctttttatttctgtgatttaattcatttttgtttcaattatgtatgccacttgtgtatataggatgacacgtcatactcgcttttgggaattaaattcttttgtttagctgacagatcactttgattggtcaaggaaattcagattcatcaatagtataattctaaattccatccatgcttatcgtatgatcatgtttaggcctactataccctctttatatatatatactagataaggcccgcctaaataggcgggtgtacccaaaatttttaaatactcgaacgggtctaaatttcaaaacctaaaaaactcgaacccgaaccggaataggtatccaaacatatctcaaatataagtatatattagttatatttatacttatatatagaaaatattaggatgttttggatattttagttattttgtgtatttttatatatatttaagcaaaaccactcgtgttgttttgggaatttttgaaattttcaagtaatttaatagatttgcacacaaaatttaatatttcaatatataaataaatttgaacccgaacccgacctaaaatcttaaattacctcaacgggttctaaacttctaaacccaaaaacccgacccgaaatacccgatccgaatacccaaacgcctaaggctaataattaattaaaaaaagaaaaatccacaaaaatatttagaaaccaaacattgttgaaaatatatcttattatataaagtatggttttcaaagttcctaattcataggattgtgccatgtgtcaagtcaaacgatcaggtgtttacatgtgtcattcaaaatttaacttttttattctctaaaaaaattgaaaatcttaaaaagtaaacaaatttacatatactaatttatatgtctatcttattatataaagtatggttttcaaagttgctaattcataggattgtgccacgtgtcaagtcaaacgatcaggtgtttacatgtgtcattcaaaatttaacttttttattctctaaaaaaataaaaaatcttaaaaagtaaacaaatttacatatactaatttatatgtctatatatttataaacaattaacatttattcaacaaaaggaaaattaacaaatttgtctttaactcatgtaatcataagtgaaaaataaaacattttgagaaaaatagcttagcttataggatttaacttttcaattattttcatttattaattttaactcatttaatattaatttgcatgatgtaaataaaaaagttaaagttaaagattttttatttttttagagaataaaaaaattaaattttgaatgacacatgtaaacacctgatcgtttgacttggcacgtggcacaatcttatgaattagcaactttgaaaaccatactttatataataagatatatatatatttttaagtggttttaaaatctggagtttttttttacatatgtttgaagtcaataacaataaggtgcctaacctacacggataatacaaagaaattatctataagctatatcttacaagaacctaaatttctacattaccaaagatttcattctaatttcagaaatgttgaactatatgcactagaacagttgcagtgccctgagatgggtccaaaggggtgtcagatgatataacttaacaattgtaatgagcagggtttgatgatgaaactgcatctggctcatcattatcatgcaactcttcactgatctttatttatccaaccagatgaaatcattctctttcttgctggagattgatcctgataaattcagaaaaggcagcttgcagtgacgtgtgatacaatcttgatcgaggaaccaaacttccacaataactgagacagagttcctcgatatttatggcttttgaaagatcaggaatctcttttagattctcagacttacttaaatccatctgctttagacttctaagaggctaaagaaaaacaatcagataataatcttttgcaaattgagaaaggagaaacaatcagattttttacatatgtttgaagtttttttttttttttttttttggcagccattataaaaaacaaaacaatttaaatacaacttttatcaaaaaaactagaacagaagcaaatcaagatgagcttgtaagtagtgcttggttgatccatatcgagaaactgagttttatgcagtctgaaatacgcttaagattgctagttgctatcactgctcaaatctaacgacattcttgaaacctggataaaccccagattgattgtgccggatggcatggagctgctcttcttggaaaaatacatcacacggaatcagaaaatctactcacatcacacatacacaaggcgtaacctcattcttttccggcagattcttctccttcagtttcattatatgtctccatgtttctgtccagacagtcttcttcttctgtttattttcctacggtgagggacctcaaaaagatgtacaccgcagcttttcacgttccaggatttagtgtggactatgaagtcaaacataagctcgctgaaagtggcttctttggcttcagggaaatcctcatgtagagagaaagaataatcaaatatatacaagtgatctgtatatccacgtagaactggtgaagggagaataaggatattctgtttccccgtgacgtgacaagacacagacataaacgaatcctcatcctcatcctcaagatttatattgccttttgacagcaagatgcaagctttatatcttaagcgtgaaggaagagtcttagtagttatgttgatcgttagggagcctgaagtatcttggtcagtgaagtgtgcaggaacttctgcaccaggtaagatcgcatattcgcaagctgatgtctggatgagctttctcgcttcttgattcaggttgatgcagttagcaaagtttagacaaatctctgggttttgaaaagagccgtttattctctccaaagattcacagttatttgcatctagagataaaagggaacccggaagctgtgggagtgagacgagatttctgcatccactaacgtcaagctcactaagcccggggagacagttaatgcaatctggaatagtctcgaaatcataactccagaagcgtaatgatattgccatcttgggtagacatatcggtaaaatgtagtgaacttgaaagtctgattctaaagtccaatcatgccggtcagagaactcaacgaatgcataaaaagatgcagcatccccagaaacaccgtcggtaaacagttcaagatcttcaagattcttcaacttagaaatgtttggagatataatattaagcctcttgcatcctaccatagttagagtacgcagaagtaagagattctcaatccatgaaggaacttcctctatctctgtcttgctcaagtccaactctacgatgctgacaggaacatttgggaactccttgaggtttctacactctgacatatccaatctgtaaagacaagaccaagagcatatcgaagatggcacgttctctattgcagtatttctcagatcgagttctttaacgtttgttgaaatttctggaaacattttcaactgtgtacaatcctcaaggttgatgtaggttggaaacgcctgtagatcttcgcattcgctcatgctcaagaccggcaatttaggtgtcttgatagagttggggagagtcaccagtttataacaacgcatgagttccaataccttgagattagttaacttaccaatagatttggggagttcctcgaaactttcgcaatggaaaagatccaacacttggagattcgtggcatctccgatagaggaaggtagctttttcaaaagagagcaacaggcaagtttcaatctcttaagattagtggcttttccaatagagtcggtgagctctaacaaacctgagcagctagagagatctagttcctcgagattagtagcatttgaaagatctggaatctctttcagatccttagagtgactcaaatccatccgcttgagactttttagcggctgtacaaataaagggaacactcaagagtcaagacaggtttatatatctattcaaacactcaagagttaagagttaagacaggtttatcaaaacaaaagaatcatgatattttaccaggattttttcccatagtttctcaaagttgttcccccgcatgacaagctcaacaagaaaatttgcggagaatttagagggccacaatctcaacggacaatagttccaatgcaatactctgagcttaccgggtagacaattcaggcctcgtggtaaactcaacttatccccaaaaccctcattaacaaataaaaattggagattagtcatcccatcaaataccagttcatcaataactattttttcctctatctccgggacgttgagacgtatgcctagaatagacttagtgccctaagcaagaaaaataatgggttagtcaattgacaaacgatatttagaaacgcagtcagctataaagagataactatgaatatatttaccgcggtattgtaggtgaaaacatcagaaatgtcgttaacatctactaaaaactgacgttctctaggctcttgactagattggttacgaacaatttcgacacccagttgttgcagcaaagaatgcatatttaggaaacccatatcgatagatatgagtgatttctgtcttagaacatcaagcccatggtcgacatccaaatcactcttaccaagccactgtttcacatgaccgacttcataaccacgaaacaaacatgctatgtgcagaaagagagcttgatctttacggcttaaggcatcgtagctatatcttagagttttctcaatgtcaccgtcaaggcaagtctttaaccgtggtagtgcatttttccactcctccagggacattcctttcagataagatcccaaaactttcagaccaagaggaagttcacccgcaagttgtgtaacttcgcaagcaaggtactgaaaatcatcatgtgggaagttttgaccaaaagcagaaagacagaagatctgtagagcatcatccttacgtggaagtcccacctcgtagatatagtcgatattatgtgccttcaaaagttttcgatcttgtgttgtgatgataatcctactcccatagccgaaccacccagtttctttcgccattgcatctagttgctctaaatgatccacgtcatcaagaatgacaagaacttttcggtctttgagccaattcggcgccgcatttagattatgaattacgatatctttttggtttaatatttcagacaaaaagttcgtttgtaagacaatcttccttcggtcatcattcatgaacgcagttggcggtttcagaccactctcaccgtagcaacgtctcgggtaggttagtctgatatcgtctataaacgcagtcaactgaaaattttcagagatttgatcacgtaaagctcttgcaatggtggtcttcccaatcccaggaggacccactatccctatcattctcacatcaccagactctaggcataacaaggatttcatctttctcatatgacgtccgattccaacatagccatcaaaatctctcgacatcgtatagttcaactcgtccaatacatcttctgcaattttgtcaatcaagtctgactctttgctcctgagaattaagagagagagagatcaaagaagtcacaaacacacgcataacggtcaaggagatgataaaactgattagctaattgatacaaaccatatgcgataaacctctccgactatattcgagacgtctatcaacgcttgcctccaactctgcttcacctcttccgttttgcccacacaggttgtctcaaaggctatcccgaaatctccggtctgctttctcacatcagatggatccacttcatagaaaacggtcatcacagtttgaccaaactcttccctgcacttcataatattcaccaattcgttgaggcaccaggtcgacgaagcgtaattctttgagagcaagacaatcgcaatctttgatactataattgcatcagagagtacaggaccgatcgagctacctctcttcatcttagtatcaacgaatggaaaaattcctttgcgttcgaactccttctgaatatgactcagaaaacctttgcgtacgtcttccccgcggaagctcaggaacacgtggtgtgtccaggttcgggttggagtagatgaaagagacgacgaggctcgattaggttgcatttcttgttgagaatttgagttttctttgaaaaaagtttgaagaaaccaatcgcaacagaagcctaaaatgaggaattcattagagagaagaataagcaaatagacaaaactttcacgccaacgtccgattcttttaactattcttcattgaaaaattcagcgctggaaattctatgagaagattcaaacaccctagatgatgctaaacatgactcttttaagagcattttaataatatttactcattctaccttgtgggtaaccaaatattgtacaagtacgccactaactttaagagcattttactcttggacacattatatttatgattactaaggcaatgagacagtactttcctataggccgccgaggtgtaatttggctagcaaagattcaagttttgacatttcaaaaggaaaatattcaaattataacacatagttaccgaaaacaaatgcatcggttaataaataggtaccatgaattacaactaaaaaaaaaaaaaaaaaaaaaaaaaaaaaataggtaccatgaattacaactacttaaaacaaacatttttactccacacagatcaaacgaactaaacacaagagctacccgaatgcaagatatgtttaagggaagcagacctggaaactggtttgcctaagtttgatttgtccagaagaaagatcttaacccacatcatggagccgaggcaacaagttctatgtacagtgtacacaagagcaaagacaactatactaacaatctaacattacacatataaacactcaaattgttcaaaagatgttaaaccagggtaaaaacctcaactcaaaatcaatgaattaactattatttacaggtctaaaaactcgccttgttacttgttagaagttatttgatcaagtatagctcagtcacaacaagccacatcattcacatagactaaacaacaagctcaaacttgttgacacaaatgcagattatatgcagtaattgacataacaaatgatcaaaactatgcaaatgtcatacatctcgggacaagaaataaggagtaagaagacaagacattagatttaaaataagaacttgatagtatagttgtctttgcttggatcaaattcagaatttctttttacaaaaaaaaaaaacatttttattttcttaagtggttttatctggaccatttctttacatatgtttgaagtcaacaataataacgtgcccaacgtacacggatatacaaacaattgtctataagctatatcttacaagaacctacatttcaacaataataacgtgcccaacgtacacggatttcattctcagtttcagagatgttgaactatatggtctggaacacttgcagtgcccaaagatgggtccacaggggaaaagtcaaatgatgtcacttacaattgtaatgagcagggtttgaagatgaaactccatctgactcatcattatcatgcaattcttcactgatatttatttatcgaaccagatgaaatcattctctatcttgctggagattgatcctgatgaattcagaaaaggcagcttgcagtgacgtgtaatacaatctggaatagtgtcaatatagttgttcttgaaataaaatggtcgaggaagatcagggttttgaatgtttctcatctccatcaccagattatgacagaaccgagagctctcgaatatctctacaggaaagctcacaatattcttgcaccccaaaaaatctagtgttttgatatgttccagcgtagagatcccagaagagatgcttcttagcttcatgcagctgttcatcaatagtttattgagctttgagagtttatcgatccacaaaggaacttcttcgatctctgtcctgctcaaatccaaccattctatagtttttggaagacatggaaacgtcttgaggttcttgcagcctgacatgtccaatgctgccagacatggccaagacgcgactgttgtgggaatttcttctattgcagtttctgacagagagagaaatccaatcttcgaagaaatttctggaaaactctccaatcgtgagcatccatcaagattgaggatgctaagggactctaagtccatattgcaggggataatctctagctttgagcaatacttcatgtcaagaacaaccaatttgttgaggttcttgatcgaggaaggtaacatcaccaaacttccacaataactgagacagagttcctcgatatttaccgctttcgaaagatcaggaatctcttttagattctcagacttacttaaatccatctgctttagacttctaagaggctaaaagaacccacatgaaacaaagaaagaaaaacaatcagataataatcttatgcaatttgagaaaggtgagctattaaaattagcttacttgtgttccttcccacagcttctcaagctggctctcccttatgtttatcacaacaagaaactgtggacaaaaactcagaggcattgatgtcatggggaatgcatcccaatgcagcagcctaagtttacggggtaaataatccaagcctcgaggtaaatgaagctcaggttgatctttactcgaagaggacttgtagaatcttagaaacaacagattatgcatcccaccaaaagctctttcattcagaaacaactcattgatcttagatatgtccaaagatatgcccaaaacagctccagtaccctgaagcacaaaaataccaattgcaagtattgtttatgtgcaagtgtagtgaacttacaaatgaaagtaacgtagcaaaacatttgacttacagtgttatcagcaagtacatcataaatctctgaagcatccatcaagaattgacgtttgccaggctcggcaatagattgttcgcaaacaatttctcgacccaattgttctagcaaattgtgcatcgtaatagtacgattgcatctcgatatgtgtatgagagacctactggtaaggacttgaagcccaaatgtgacatccaagccagaacttgcaagtatttgcttcacataatcaacgttctcaccattgaataaacaagcaatatgaaggaatatgaccttatccttgtcatgtataccatcataaccgactcgtaaaacatttctaatatcctcattaagactggttctgagtcgaggcaatgctgatttttgctcatctttgctcatccctcgcagagaggaccccaaaacctttagagctaggggaagatagccagcaagctttgttatttcagtagcaagctcgatacaaccatctggtgcagaactctctccaaatgcatattggcagaaaatctgaagagaatcacttctagatggaaaacccaactcatatatgcaagtgatcccatgcgctctcaatagctgtttgttttccgtggtcacaatgatcctacttccagaaccaaaccactgagattgtttcactaaggcatcaagttgttctagtttatcaacatcatcaagaacaacaagaactttcagatcctgcaatctttcttttaccaaacctaaatcatgtatcttcatatgcttatgatcaataacttcagacagaaactgttcttgcaaacgcaactggaagccataggcatcgagctccgaggtcctagaacttcccttaacattctccataaaaatagtgtgttggaagttttcagatagccggttgaataaagctctggcaattgttgtcttgccaatacctgcaggaccccaaatccccaccattttcacttcagttgattccagacataacaaagaatccagctctctcatatgattgtcgattccaaccagattgtaggaatctcgtgataatgtagaattcaattcatatgaaatgctcatagcaatcttgtcaatcagatctgcttcattgtccctatcaataagaaaagattactcccaccaaatcatcaaagaaacttatagcagaggcacatcaataactaataacggaatcagaacaactaaccagttttgagaagactcgccggctatattagctatatagaccaatgcttctctccatttctgcttcacttcctcatctggttgtctttcacatgcttcctcaaacgcctttccaaattctcccgttcgtttcctcacatcagatggatccacctcgtagaaaaccggcatgatcatctggcttactttctttatctccaccaactcattcaaacaccagcttgaagatgcataggtccgcgacaacactacaaccgcaatcctagattctctgatagctcgtacaagctcagaactgatcatttggcttctcttgatatcattatctatgaaagtacggattcccttacgccggaactccttgagaaggtggctgagaaaggttctgcggacatctttgccgctgaagcttggaaacacatggtgtctccaattgcaagactgcaatgacaaagatgaagattcttccatgagagaagctgaaaagtaagtatagcttataatccttctttgtttttttgtaaagttaagttaccacacagcttgagagatgatgatacatatctggacttttgattggcttgtcctcttcggatttgggtcaacacttgagaatcgctttgcgcgtccagaaggttgactttttgccttatgtttgcttctaccgacacgagttttagttttagtagtggaatcacaacagcattttagaaatgaaatccaacaaaagagattagtttgaatcaaagtctaatcagatatctgatcactagtttatagctaagccacatcaagtaacagcttctcataaacttaacaaacctaatatttagcagcagaacaatgagtgaatcaagctattgatagaacaaagcaaatgtcatcatacatcatgggacaagaacgaaagagtgaaaaacacaagatattgaaataaagataacaactgtaagatagcaaacgagtagacataacaaaacataagtttctaggagaatcaccattatccaataaagctgaaaaatataaatctaaagagtctcacaagtccatactccaaaaaaaacttacgataactcgaaattgaaaaacaaaacaaaccagctttttaacggcaactcttctggtaacaagcacgagcaccacgaccaacaaactcttaagaagcttatgctgccacatgatgattgtggattctcgatttgatcctctgtgaggcccagcttcacagcttttctctcgatctcatctcgaccacagacacagttcttgcaagcttttttgggggtctcacaaccgctggctgcaaaaaatgcaagacatcttaaacacaagggatgtacaatgataagaaagatcatgtggctgtctttaattaccagcaggaacttgaggcttcttcaagtcatcctccgttagcagagaatcttcatcaataagatccaagtcatcatctagattatcctttaagagaaattttgcaggctttttgagagcaaatgatgaaccaatcttccaagaattttttttgccttaatctgcatttgacaacatgtttctctgttatatggatgagctatagtgagagcatatatgcaagtttggcatataagtagaatgcagatctttcatccttcatgttaaaggcctcatactagaagcaagacaagacgtgtaaaactgctcaccccaaaggataaaatgaaagtagacagcttaattgatttcaaatcaagacacttcaagctgtggcagcaattgcagttctctaccttcactacaagctgttgtagtcgagggagacatacgttacagtgtggtagcgccttaaatcattacggaacaagaacaccaaaattggagaagtgtaagccttctcaggtatggatattgtgcatcaagttagagccccacttgattgctgcatcaagaacaccatcttgatcccactgacttcgacaataatttagacacaattagtctgcgatgattatatagactgaagaagaatcaattagattccatctttggtggaatttgaaattgattagccaaaactaaagtgtatgcaaaaacaagaagaaacgtataacaacagcatcacttatttttaaggaagcacaatgaatccgtccagtgatcaaagttgaaaggtagagctaggctctgacatatatagcacgtacaaagaaaccacagaagagatactgcataaatatagcacacggagacaaaaaaacagaagaggctctgacatgtattacctttaccatcgaagattttgttttcacaaaatataagttagtattttactttccatttcttataaaatagtttctagcttcatatattacctttcatatatgcaccagagaggtttatacagatgtcactattttttttgctcatcctcgttattgccagattcttctccatctggctgtctgcacaacctctgctactacatctgaagctcttgtcaatcgtctccatgagcatgagggagctccaagagtcgaagaccacactcttttatcgcccaaaagtaatcgtgaaccttgaagtcaaagacaagctcgctttctgcttcaggactgttgcactcgcctagggagaaagaagcttcaaatatatacacatgctctgtatacctatgcggagttggtagaaggtgcacactagatccatactgaatagtgaggccattctgtttgccttcgacacgacaagataacctcatggtctcctgtttggtataatcatcgctatgagggtaactatcataatcaccatagactatgacctcctcgtcatagtcatcatcatcgtcatcatcgtaatcgtaattgatttcatcgtcattgaacagcactagagaagccttaaatatcaaatatagaggaagatgcctctctttcaaatgaattgttacggaatctccaatagctcgatgaatgaagtatgcaggaacttctccagaaggtaacagagcatgtttgcaaaccgatttctggatgagttctcttgcttcttgattcaagttgttgcagtttaaaaaattcagacggatatctggattgtgaaaggagccatctattgtctcaagtgacacacaattttctgcatctagagatgagaggcagtctgaaagttgcggcagcgatacaagcttatggcatctatagaacgaaagctgatgtagttgagaaagatttttgatgcaatctggaatagtcttgaattcattactgatgaagtgtagggacactggggaagtataaaccaactctggcagacaaatttgtaacatatccgactgtaaagtccattggtttgggaagttagagtaccacctgatgtttactatcgaatcaccagagacatcctcatcaccacgagtaatttgcagacaatgaacaccttccatcttggaaattcttgataatgagatgttgtccagcttcttgcatctgatcataacgaagtgtcgaagctgagagagattctcgacccacggaggaatgtcttctatttctgtctcactcaagtttagcactgaaattccatcaggaacaggtggaaacatcttcaggtttttgcaccgcgacatatctaatttatcgagacgagaccacaacctgatcgatgaaggcacttcttctatcgctgtaccactcagattgagttcttggatgtttgtggagatctctggaaaagttttcaaccgtgagcttccgttcaaaagaagtttagacagagatctcatattgctgtcgccaggaagagcacaggggagctccaccaaatttgagcaagcactaagattcaattcttcgagactagtggcattacaaatacaggaagagagcttcaccagacttgcgcaaccaccgagatccaattccttgagattagtggtgcctctaatagaggaaggaatttccaacagactagtgcaaaaagagagaagcaatgactcgaggttagtggcatttgagagatctggaatctctttcaggttcctggcgtcacccagctccatccttttgagatttttaagtggctgtacaacaaaaaggcacattttgtgcgtttatatcaatgtttagacacataaaaacagtttgtttcaatacaattataaaattttacctgaattccttcccacagtttttcaaatttgttcgcccgcatgataagctcaacgagaaactttgcagagaacttagagggccaaatgctcaacggacaatagtcccaacgcaataacctgattttacggggtagacaattcaggcctagtggtaagttcaacttatccctcaaacactcgtccaatattaaaaactggagattagtcatcctatcaaacaccgtttcttctataactaatacatcctcgatcttagagacatgaagcattatgcctagaatagtcccagtgccctaaggtatgtccaaagcaagaaaatatcaagagttattaattatgatttagttaatagacaaacaatattagaaaggaaagagacaactgtaaatatacttactgtattgtcggtgataacatcagaaatctcattaacgtcaactaaaaactgacgtttttcaggctctccaatagattgtttacggacaatgtcaacacctagttgttgaagcaaagaatgcatccgtacgagtcccatatctgtagatatgagagacttattgctcaagacttcaaagccatggttaacgtccaaactgctgttagcaagccactgtttcacatgattaacttgacagccgttgaacaaacatgctatatggagaaaaagagatttatctttatcgctcaagacattgtaggcaaatcttagagttttctcaatttcaccgtcaaggctagtccttaaccgtggtagtgcgtttttccactcctccaaggacattcctcgcaaataagatcccaaaactcttagacctagaggaagttcacctgcaagtgcagtaaactcccgagcaagtttcttaaaaccatcatatgggaacttttgaccaaaagcatacagacagaagatctggagagcttcatctgtagcagggaggtccaccttgtaaacatggttgatctcatgcgctctcaaaagcctttgatcttgtgttgtgatgataatcctacttccatagccgaaccactgagtttctttcgccaatgcagttagctgctctaattgatcgacgccatcaagaatgacaagaactttgtggtccctgagcctctcctgaactgcacctaaatgacgaacctggatatccttctggttgaataactcagacaaaagccgtctttgtaaattcaacttcctttgccggtctccagtcatgatctcaactggaaaatccaaattaccctcatcgtgccagcctttccagtagcttagtctgatgttctctataaaggcagaaaactggaacttttcagagatttgatcatataaaactcgtgcaatggtggtcttgccaatcccaggaggacccaatatccctatcatcctcacatcactagactctaggcataacaaggaattgattcttgtgatatgaggacggattccaacatagtcatcaaaatccctcgacggcgtatagctcaagacgtctgatacatcttttgcaactttcacaatcatgtccgcttctttatccctgagaatcaaaagagaggttaaggaactcgtaaaaacaggaaaaatatgaaatgcgagacgaaccatttgcgagaatcttgtccgagtatgtttgcgacgtccatcaaagctcgactccatctctgcttcacctcttgtgttttgccaacacaggttttcttaaaggctttaccgaaatctccggtctgttttctcacatcagatggatccacttgatagaaaacagtcatcaccgtttgaccaatctcttccctgcaattcataatctccaccaattcgttgaggcaccagctagacgaagcgtagttctttgagagcaagacaattgctatctttgattctctaatggcctgaaacagccccggaccgatcgattcgcctctcttcatttcgtcatcaataaagggaacgattcctttgcttttgaactccttctggatatgactaagaaaccctttccgtacgtcttccccgcggaagctcggaaagacttggtgtgtccaggttcgagatataggagacgaaagagatggaggagatgaaagggacgacgaagaagaagaagactcgattgatgatctgcatatcttcagctgcaaattcttgtgctttttgtaaacccaataccaaattacacaaacaagtgtgaagaaaccaatcacctctgcaatagccattgaacgactacagtctgatggagagacaaagactttaccgatatacgtaaaagaaaaaatgctaagccaacataatcattactattttcgttgaccaaaacaataaaataaaaaaatcaatactattcttttactaactactatactagctagtagcaagcatctgctgcatagcgatctctgaatgcaaagtggcagaaaatctggagtcacttcttcgtcccatgccctttttccgtggtcacaaactcagactgatcctacttctagaaccaaaccactgagattgttccgctgaggcatcaagttgttcttaatttaacatcatcaaggacaacaatagtttttagatccaacactttttttcttttaccgaacctaaatcatgtatcttcttcatatgtttacgatcaatagggtcagacagaaactcttctttcaaacacaacttgaagccataggcccatatgcatcgagttttggaagttttgagagaaacatgcaggactactaatggtttgactttttgcctaatgtttgcttgaaaatacaaattatacaatggagttaataaaagtttagaacttgtggaatcacaaaaattacggtcaggcaagaggtatatgtttaggatcagcaagttatttgattaactatcctttgattattaatcgaggccctccaagcacgattccaattctaacctcgataatcaatagacaacacaaattttgcattgcaaagatcaatttttgtgaaatccaaaagtaagcaagtcaaagggagaaaacttaagatatgattaacagcacacagctagattaggtcaaatgggaaatcaaaagattaaaacaatatatgctatgtgcttcacttagcttacagatcaaaacaacatcaaactaagcataacacaacttctattgatctactcaggagcaaagactaacgttaagtccatttgtttaacagagatttcatcacactgtagtttatagctaagccacattaaacaacagccttctcataaactcaacaacacctagattaagtttgtataagaaacgattaacctaacctttgatcggactatgcaaatgccacacatatcaggacaagatataaagagtaaataccgacaagacaatgaaataaaaataagaaaatagtagacataacaaaacataagtttcttggagaatcaccataatccaacaagcataataaagcagaaattataaaatctaaagagtctcacaagtccatactcccaaaaaaaccttacgatgattccaaattgaaaaacaaaacacaaaccagctttgtttaacggtaactcttctggtaacgagaacgagcaccacgaccaccaaacttcttcggctcacacctcctcggatccgccacaagcagagtcctatcatacctcaccaagatatccttaatctccttcttcgactgctcatccacatacttctggtagtacgcaacaagagccttcgcgatactctgacggatggcgtaaacctgggatgtgtgaccaccaccgttgacacggatcctcatgttcacaccagcgaaacggtgctttccgaggagaagaaccggctcgaagatcttgaatcggaggatctcaggctggaaaagctcgattgggcaaccgttgagcttgatcaaaccagatccacgcttgcagtgagtgacggccactgcggtcttcttccttccgaagcattgcacagattcagtagctggttgagtcgccatggttagggttgctccttgctttagctctctcgtctgccgctaaaatgaaacctaatgcacagagtgggaggtgcaaagcgaaatatagggctttatattaagcgatataactagggcatcctctctaatacgcagcgttttaataaactgttcaaaaaataaaataaaataaaataataaaaatcaattccacgtcactagttactactatcgtctcttctaaggtcaatcttatcggagagatttattccggtgagaaaatgttactccttcgtcgttattccggcggaagtctttactcgatcctccctatcagagcctctattgaatctactattcgtcatttcaacagcctcgagcctttgcaaagctctgattcgactccaactaaaggcgattacttcgccgcgatcaaccacgttgtcaatatcgtccgccgcgagattcacccggagagatcattgaacagtctccgtctacctgtaacctccgaattcgtgttcagagtcctccgcgcaacttctcgttcctccaacgattctctccgattcttcaattgggctcgatcgaaccctagctacacaccaacctccatggaatatgaagagcttgctaagtccttagcttcacataaaaaatacgaatcgatgtggaagatcctcaaacagatgaaggatttgtctctcgacatctccggtgagacactctgcttcatcattgagcaatacggtaagaacggtcatgtagatcaagccgtagagcttttcaacggcgtcccgaagactctaggatgtcaacaaaccgttgatgtttacaattccttgctccatgcgctttgtgatgtgaagatgttccatggtgcttatgctttgattcggcgaatgattaggaaaggtctcaagcctgataagcggacatacgctatcttggttaacggatggtgttccgctggaaaaatgaaggaggctcaagagtttcttgatgaaatgagtaggagagggtttaatccaccggctcgtggtcgtgatttgcttattgaaggtttgttgaatgctggttacttggaatctgctaaagagatggtgagtaagatgaccaaaggagggtttgttcctgatattcaaacttttaatattttgattgaagctatatctaaatcaggggaagttgaattttgcattgagatgtattatacagcttgcaagttaggtctttgtgtagatattgatacttacaagacactaatacctgcggtttcaaagattggaaagattgatgaagcgtttcggttgttgaacaattgtgtggaagatgggcataagccgtttccgagtttgtatgctccgataatcaaaggaatgtgtaggaatgggatgtttgatgatgcatttagcttttttagtgacatgaaggtgaaggctcatccgcctaacaggccggtttatacaatgctgattacaatgtgtggtcgtggtgggaaatttgtggatgcggctaattacttggttgagatgacagagatgggtttggttccgatatcacggtgctttgatatggttactgatgggttgaagaatggcgggaagcatgatttggctatgcgaatagagcagttggaagttcagcttagaggagtttgatactgctaagaaaggcttttgaggcttctcctaaactcggatacttgggattctgtagaaattcagctacttctccattgatctaccctgtatatcttgtagtcgaagcttgtctaactgttggttaggttatacttcggtttgggggttgagtttagttggtctcctgactagtttctttccagggaaagtggcgagaaacattttgttgtactactgttttttttatagatccatctgtcagatcaaatttacgtattgtgcttttcgtacagattacgacagatgaatcttcagagctcacattaccaaagaaacagtgatgcacataatacaagctctgatgttaatgcattgattcgtttgcaaaactaaggtccaagccagacagagaaataattatttaaccaatgcaaaaccgttcttcattgatactaaggtgtgtgctttgtgggcaacccaaacaatattctacaagcttttagagccacaaaataaaagaagtaccaacaaacaaattatacgaaagggcacaaagtaaatgatgaaactactctgcgattagcaaaaggttttggcctcggcgagaaacacccatgtatgaagatgcctttcacatgcttatatgtcagcttcaaggaagttttgagatagggttacctaaagaggaagaaaagttacatgaataaggtgtattcttaaaaggattaacaagactttacaatggtgatagatataaaggattcagttaccttctcgcctaatttgaagggtggcagacccttgtaagggcatgtaccgcagcggaaggcatcaccgagcccacactgaaagaattgtttaagaaattttcagtcttgtggaaccaaaaatccaatgcatactgagaaagagatgggtaaagaagcttacgctgccgcatgatgattgtggattctcgatttgatcctctgtgaggcccagcttcacagctttctcctcaatttcagctctaccacagacgcagttcttgcaagcttttttagtggtctcacaaccgctggctgcaaaagatgcaagatatcttaaacacaaggaatgatataaggataacaaagatcatgtggctgtctttaattaccaacaggaagctgtggcttcatcaagtcctcctctgttaaaagagaatcttcatcaataagatccacgtcgtcatctagatcaatcttaaagagatttgttacaggctttttgagagcaaatgatgaaccaatcttccaagaaggtttctttgccttaatctgcatttgacaacatgattaactgttatatgatgagacaaagtgagagtatatatgcaagtttgacagataagtagaatgaagatcttttatccttcatgttaaaggcctagaataagcctgaaccgaaaaagcaagcttatattcttatttccgttcaagaaaaaacgtttcctcatactaaaagaaagagaagatagacaggacgtgtaaaagtgctcaccccaaaggataaactgaacgtagacaatttaattgatttcaaatcaagacactgtggctcaagaaaaccagccaatgtcactctcctttgaatggtctgcaaggaagacgccataagattaataaagaaaagttcaaagacaccccattatacatagactagatacacgacacaaacctgttgaatttctcccgtttcaccctccaaaactttgcacacagaaaccgtgccgccaggcttcaagattcttgagaactcaccacatattttatcacttgggaaatcagatgttttggaaatggctaataccgcctccacagaggaagcatccaaaggaaactgatctgcaaaaataatcaatagtccaacataaagagaagaggacacaaaagaatatcccacagcatgtcgtcttcaagtgttctcaccctacaaaattgctcatctctccatatacagacacgaatcttcctatctacatacacaccagactaaccatactacaagcttaactaaagcagtctaacaactatttcataacctgagctaaaaaaaaaaatcggagaacaattaggaacagagatttacttattgtggatgcttgagtaataatcagaggatcaaaactctcaatcacttcctttccaagctctttcattatagctaaaacagagctaacaggtaacaccacatcatccgtcacagccaaaacagtcttctgattcatcatcgaatcctacaaaccaaaaaacccaaaaacattaaaagactaaactttgaaaataaaatccacagatcatcaagctacaaacacaaaaagctaacaacttttattgctttttacaacctaaagaagcaatttttttctcccgaagctcttatgacatgcaaatgaatcaagagaaacaaataatcgattcgcgcaacccaacacaaggctaaaaagtttagagatacacaaaaacagaaatcgatctgaggaacaacaaacaatcagaaaataaaattgaagatagacaacagaaacattaacttaccataatggagaaatctatgtaaaacctcgcgagatactcaaaaaccctaaaaatatatatatagctgtgtaaattgtttgcctttgaagaggaataagaaaaatcaaatcttctgacctttgtctctctcgctggcttttttatatctttttcgccgactctttccttttccttggttctgctataacgcggtttggtcaaaccgggtttacgtagagaaatcaggaaaaaaaaaaaaaacgggttacccgattgtttattgtgttttttaaaacgggttcggatccaaaagtaatagatacggcccatttagacacacgggcttagtgcccattttaatatgaaaaaaaaaaaaaaactacttttaagaaaaaaaacgttaactactgtattttgtaacataaataaaaggtatatatatatgacattgtgacactatctcatattaataacttctaaggaaaacaaaatgaagacaattgtttgtttcttaactattctaatcttagtttcatcatgtaagtatttataacttaatcttagaatcaaacgtatatcaataatttaactatattttctttctctaataatattttagttaataataatcttgttgtataataataggtgaatcgaagaacaagaaagtggtgataataccgggcccaaaaggagagcgtcctgatattaaggtggtagaaggcccatcaacagttgaagatgacttttgttacgattgtgtacgtcgttgtatggtaaagggtgtcggtttctattttcgtagttgtaaaggctttgtctgtcgttgttattatccattcatgggtggctacggaccgtagttacaaaaactttgtcattgttatacacctatagtttggtgatgattattgatcatcatttctataattaatcaaataaaataaattttcttgttttcctcttttcttaacgattttttatgtaagttttctgtcatatattgatttcgatgattcaaccatctataagtgagtgctacattttctaatcttttgctttcacttatttctcacaagtttaatcttaaaattcactgtttgcgccaaaaaaaaaaaaaaaaaaaaactgtgattacttgtagaaatacttcggatttcgcaactaataaaacagttttgttttaattaacgtttgataggagaaaacaaaattagcagttttttggtcttataatgaaacaaaaggacacatcttccatatatcaaaatataaagaaacaaatcaacaatcgtcatgaaatgcctctctgaggtaattaaagtctcgaaagcagacacatcattctcaaacctgatatgtgacagcagtgcgcggctttgtttgatggcacaagccgttttgtcttcgagaggacaacgagctttaagcatggagaagatatggttgtttagccgcccaatcgagctttcttcatctcttccaacaaaccgtcccgatgggtcgcacgcccgacacacatgtttggccttgtgtgtccataactcaaaataggtgaccatccctttcttacacattaaaaaagaagaaaaaaaaaagaacattcagacagagaatgagtggattcgacacctctaaatgtaactacatatgcattcattagaacaaaacgattataattttattttgtatatcacttaacatataaaaagttcataaacaaaacgatcaaaaagtttgtgagtattatcttttaatctgaaataaacattcaattactaaataccataactatgctattacttctttgaaagataaatgttacttataaaattaattattttgtaacataagtaaaagatatatatatgacactatggcactctcttatctcaataacttaaaagcgcttagcaaaagaaaagaaaatgaagagtactatttttgttttgactcttctaatattcgtttcattatgtaagtatattttcggttaattagggtaaacacgtatcatgttttatactatgtttgataacaatttctttaccaataagatttcaatataatcgtttatgtttccttttcctttataggtacatcggaaatagtggttccttcttcttttaagcgtgtcgaaggtcctgtaacagctgcatcggctgatttttgttacaagtgttcacgtggttgttatagaaggtatcgacgtcctgttttttgtcaaggctctatctgtcgttgttcttcctttattgatgatggttattgataacttatataattaataaattaaataactttataaagtatatcaacccaatttggccccccaaaaaaaaagaaagtatatcaacccaaatgttatatgttttgaatacatgcaccaaggtgaaagattatgggaaggtactgagtatataaccaaacggacccgaaagccaaaattactaggaacgtctgtgtatgcgtttatcttcggtaacatacaaagaaaactccattgatacaaacgattttccaggttacttgttcagaaagaaaggtggatacatggttattatgaagaagaaaaacacattctggttattgtacaaattgtatcagccaacggtgcctttctgaggtagagtctcgaaagcagacacggtattctcaaacctgacacgtggcagcggtgcgccgctctgtttgatggcacatgccgttttgtcttctagaggacaacgagctttaagcatggagaagacatggttgttcagcctccgagctttcttcatcccttccaacaaaccttcccatccctttcgtacacataaagaaaaaagatattcaaatggagaatgagaggatttaaaaaaagatatgtacatgaaaaagatatgtagtgaaaatctacctgatggatttgtggattcctatgggtatgtgaagcagagacagtttcaacctcagagacattgagtacttggtacgagaaatcaaacaactcaaagtgaagttgctggccgagcaagtaaataatggtgcaaccaccccaagctattgaatcaccgaggacttcatgttgagctgactgtggagctgttatctcctctagatatccctgagttcattgcaaactttatataagaattgaaaagagagaaatgttgctgcgattcaaaaaagatgttttgataaggtttgcggttttggatggcttacaatctgaagaccaccgtatatacggtaaaaatcctttgaagttgtaatatcaacgaagccagtctttggaggagcactccatttactgcaatatttgtcgagcgacgcacttgtgaatgcaagtgtgtattcaagaacactcccaccgttcatgtttgccttgtacaaaagatctgcacatataatataataccgaaaagattaaaactgtcacaaaaaaaagaaagagtaaaaaggaaacgggtgatgaatagctacagctcttaattaacctgcagcttctgcctgtttggacatggtatagaacgcagctggattaagacaacctggacttgatacaactgcagaagttgctgactttaagagattgacaagagggctttcgccgtcttgagcattaactatctgtccttcagcacctgggattaatcccaaccatggagctgtttgcatgaaccgctttgtgtctacctctctctgcgtaataaagtattataaacatatgatagactaaatcagaagaacttttaaatttaaatctttacaatctgtctgacaggactgaccaatacgatatcgagaagtcccattgtatatatcacacttccaatttcctttattcctcgtagaacttctgatttgagttctgacttagtgccccagtttagttgctctcgtataagcttcatacaacctttaaatgaaacaccaaacatatcagtaaatataacatcacagaaaatcgaaacacaacaagaatactgcaaccgggcattaacctgtaacaccaccatcaaaagaaagcaatccaatggacttgggcaatgcttcttgcaatccagagatcattggctcaagtgttgttatctgaaagttttaagacaaaagagctattttagctggttcctttgtataattagtacttcacaaaaggaataaatggtacaaaaagtgcaaatataccttatttgatatatggtccagtaaagctcttattagccaaggcaatgatctggacccaagaagtttaactatggaaaataaatgtggtatcccgaaaaatccactatgcaatcgtgcaaaactttgatgcgctgcatttaagtcctaccagagaaggaaaaaaatgcatgagaacaaaaaatataatatgagaccaaagacactatagaggtaaccacaaaatgggtctataagattgtttctgaacaaattaaaagtacaaaaatggcctaaaagattgttcttacttgagtgccacaatagaaactaggcttagcagaaggcactgatggtttctgagtaggaggaactttcgatgaacggacaaatcgctgagtggtattgcaaagaatgaagtttggtaggaaatcactctgcatctctgaccaaatctagcaggcaacaaaaaaaaaaaaatcaaagattgagaaaaattagactcaggacttatattttgtatggctgacctgtgtagcaagtcgacttgaaaatgagacaagagatatgttttcttgcatttcattcaacatgagactgaaagggtctatggaaagatcttgtgaaagcaattcatgcgagtgctttaggatatctatcagcttctccagttcctacaattgaagagagcatccacttttgtatattttaaacgaaacttgttatacatacagaatcaagattatgaaaaaggaaaacaaacttaccactacagcacataggtcctgggactcaaaacggtcaaaaagaaactccagattctctctaaagattctattcatcctttgagcgatcaaacttcttaaattaattgttctaccaagtatctgcatgtcacaccaaaactcagtaagaagattgtttaaacatgccaagccacacataattagaaccactgcttgaaacataatctaatcctatgttaggtcataacaatggagctaaagattcaactaattgtgactttctctataacaggagagtagtattattattcacctttacttttgtcatcttaaataacgcagtaaacctcacaggctggatggagaacttttcaccattgtccaaggcaaagagaaatgatggatcaagaagctcactgttgaactcgacaatggatgataaaagggtttagttcctcattagttaacagtgaagggggtaaatatatcaaaaaccgtgtaattaggtaccttgctgaccaactcttgtaatatgtgaatatagactccgagagccttgaaacaaatatatcaaaaccatggtccacctacagaaagaagacaggagacaagaaacgatagtattgttcaaggaaccttttcattcaagaagacctataggattatacctgttgagatcagaattgaaatctaattacctcagcttcaatttcatcatagaggaatctctgcctcagaacaaccagagcttgttgagctgagtcattataaatgtcaaaaggtagcagaacactctcaagaaggcctgaattctgggcttccagaatgtagtctatcagcatccatggtagtgaacactcaatcgggaactgcagtaatgaacgtataatttgtaagaacaagtcagggctgcagtgaaaacaaagtggcaaaatatagttataacctttttgtaattccgcatacctgaataacacgtgaagactccaggtaaaattctctaaaccacaggaaccccagatcagtcaatattccaatacttgctgcagccatcgtaaattgaagttgaggagtcagcttacaaagctattgatatggctcaataaaccaaccaaaaagacatttaagcatgtgggttacccgagtagtccaatatgtgcaagaaaaagctgagcttgtaaaaaaaagtttctaattgctttaagtcattaacaggaatctcagagccattatttccaaagaatccccctggcctcctcagatttccaccagagacaacctcatatatcaaaaactgcaagcaatgcacctgaaacaacaaaaaagcaagaagttcaagcactggatcttaccatctgttgttgtacttaaaatcatcttgaaatggacccaaacctgtgctgctgttggggcaacaggcctcggataaaagaaattccctctgctttcatcatttccatgttgtgaagatggcatctcatgttcgggcctggtatttgccatccagtcagctgaaagtgtccgcatatcagaaagaatcctgaaatgcaaccatacatatgataagttaacaatatgcaaagcttaagtttaagagaacatggacttgaaacagaaagaaaataaaggaaaaccaattcaccttgagagatctttcttctttcggaaggtggtacgcaacattgtggctaacgtgttctgtacaaaatcttgaacttcggcatgtattgtctcccataaagcatctgcaactaatgtgtcacagcgctgcagcatcgatcctacactctttatatagccaacaagttctaccaaggctttcctttcttctgcagtataattgaacctcaccacctatttaaaagaatccaaaacttgttaccataaaagataaaacttttcgaaaatatttcacaagtattaccttctcgtaatcagaatatgatccggaggcttcaggagtctctcctgcatccctacatgggcgagagaatttccaagcacattgctcccaaatgcgtgctgtccatctacttaacagttggaaaccttcaacaaccatatcgtacatgtttcctttgacctctctgcaccattcagtatatgctccatcgtttgacttcaacagcaataactgcatgaaagcaagtgagaacaacatcctagagactcaaaataagaacaagaaaattggagctccagggatagagatagcttgagcacctgattcatggatgaagcaaatcggattgtgaaatcgtcatgctcagcacggagagctccaatgtgattgactatcaaatagtgcctctgatatgtaaaatatgttaaggcttgcaattttcaaagcatgtgtacggttaacaataatccagataatagttaaaataggcaagtaacagtgaaaatattaaaggatattctagcgcttcacgtggagggagctcatgaggtgctggaagagtcagaaggcgagtctgtgatgaaaacttttgaaagtataccgacaattctttcaaaattgcagcaggagaaagatggagatctggaaacgcaggaatgacaggatcattctgatagccgaaaaacacacaacaaatatgacaattagcgacttggaaacaaggctttgcggtatattggttgtgaatgcgaaaacaggtataacatgaatctcaataccttgaaaatgtttatcaatctgttgagttttaccctcttgtataaagcctcggtatctttctcagatggtgttgctaagacaacaagaacaggtagaacccggagaagaatataccgctcaggaaaaagtagtgcaaaatccaactccagagactccacgatgaagactatgagaacttggagaatatcttccacactgaatttactaaggaatccaaaagcttgcaatatagtcaaatggcacaagggacttgagcagcatgcatatctcagatagacaaacccataataatgtctttaacagccacacgatggtgataaatgtctggaagaaaggatacttgtttacacggaacatctcaacgtgcaggttgagtaaaatagcccatcttgtgctcaggaagatctgcatacataagaactcacattttcatttacgacaaaccacaggggaaggcattatcaaatgattgcataaacaagccatgcaaacacctgcaagtcgtctaactcttctctcattgtatctgtatcttgccactgcgcactgacttgagtgaatgttctgaaaagagtgaaactatcttaagaacataaactaaaaaaaaaagcttctaggaaactaattcaactcttaaatagagctttagtagctgaaaggattagtaacaaacatcgatctacctacattcaagtgtcctatttgcagaaaatatagataggaaagataaaagtattatatctttcacctcttataccaagagaaatcattaggaatgctagctttagcatttttaagatgatccagctgaaccaagacgtcaagcaactttagcattgacctatattaagtaaaatcacagttaaactatatacacgaggaaagttaatcatccaaggatctaatacaaaacacaaaataagagttataacccaccaaagatgtgtgactgtgggaccattgatccgccgttcaggtctggaaaaccgctgcatgtcagcagctaactgcacagacagagaatatacgcacattatttctgatacaggaatttatataaaacgagttggacgaggaaggatatacaccgcactttagctgaagccgacgattgccatctttgaatttcgcgtaaacggctcatttctaagtccaaaacttgatatgtttctagatacaaatccgcttgactatgcttcatagattcgggaagctgcatgtatatcattaataaagaaagttatgtgtgttatggaagaaatatacacaacaacacccagcaagaagtactgtatttgatattattttcagtaatttctatcattcgctattatttatacagagaactttgttgttgcttttatttttgcattataactgcattatactttgtagttcaaaaaagagtctcgtacagttgctacgagatttcgaataccatgaagaactaacgcatagcataattctcaaagctacattttatcagataaaatgtctaaaggtagatatgcaatggagacaaggagtgtagtgatagatttcacaaggacctgaggcagtgctttgacacaacttctatatgtgtatagaattgacgccatctcttttccttcttgtataagtgtattctgcatatatacaattggttgaaaacttacttgaagtattcaaatataacacgattaacacaacataaccgtaaaaatatcaaatcgtaatttaatcagtctttctaagatgaggcaaatgaagaagaatagccatataccagctggttaagagcttttgtgtcttctgatagagacaaccggtatgcagcgacgtcactatattctacagaatagtaataaaaaaaaaaacatcttgattatttggattttatggtaaaagagtgacaagagaacaatgaagcataccgatgggactatcggttgctgctctttcagctgaaaccatcacagccggtccttggacttctggttgctcatcctataaccaaaattcaaaatgcttcaagaaaatgtactagagtgacttcaaatttttcaagaagctacttaaatcttcaacatttcgttgaaacttattttactgctaacttaggcaaagatccacaggtgattaaacaatatatgtgataattttacacgaaaaggatttaacaagaaatagaaacaataatttcatatcctttctagaagaaaattttgaaatatgaactccggaaagaaaatttgtagtcaaaaggatccaaagacccacaatttctaaattttaccaaaatctagaatatcgaagttacctctaaggagaatgtggaaagagctgcgattgcttcctctacaggaaccgccattgagtcacctggaaagatcagacgaagcaattagcaacattgggcgactaaaggataaagctttcaactttaaggctcttacccaacaacaatggagaggagaggagagctgctactacttcaagtcaattgattcgcctttcttctgattctttacggacagagatcgataaattcgctactactctgtccgaaccaaatatttcgcaaagttggaagctttctttttctatttgtttttctgtaacaaaaaaaaaatgtttctttttgggtcctcgtttgtattttcacctttcagaatttttctttagtacatatttgttcaatccgattaaagctttgagaagaagcattacatttgtgtctttactatgaagcaaacttgatgacagctaaatcattatttactgattcctttatcctcaaccatttcttattttgggaaaatacataagagtaataccagtaacaaaacaaaatagatataaatacaattttacagtgaacaactactgaacataaaataagttactttgtagaatcagtaacaacttttaaggtttaaccggagccttaaaccaatccggataagaaccagcaggtgttggtgctatcggtgtgagcatgtaaaccgttcacggttaagtgttagtagcctaatggaaaggacatgccgtctaagtctaaccagaaatttttgttgtaaaaacatatgaattgagaatgaaactctagaaaaagcgaaaactgtcttggattcaaaataaagtactttctttagctacaaaaatagggaatacaataaaatggagacgaagatgattagaagaagaagaagaagaagaaagagtaaattattcatccaattgtttcaaaagcctgaagagaccagctgcttctcgaacccgagaaaactcaatgcagaaagcttgaacttctatgaatagatccttcactgttacattttttacccaaaaaaaacatatatcacccacaattgtacatcatactaatagactataaaagcttcctctgtgaatgtatctagtgatctttctgtgttattagcaaagcaaaacgcctaatttgatagcaatcagtcagaaacagagaatgcataccgttgatgatcttgttacgaattaagctttgcaagaagacgcaaacaagccgtacaagcctattctgcatgtatttgtcttgctgctacagatcgaaaacaatatatcactataccgttaacaaaacaactacattgaaatcaacaaatccgagaatcatatacacaaagcacataatgcaaagcacaagcagaagttttttcacacaagattataggatggcgttatggatactcatagaaagctttgttttaagtacctaacgggaaatcaaaaggacgctttgttttaataccttagcgttctcacaagacgatatgcaattagtgatgtacatccgtatgaagtccttgggaagttcaactgcagttgtgagcctattcacaacttccattgagtgcaggctcatgtccatatttcctagagcttcataatagctgaagaagcattcttagattcccactttaaaagttataattttggtcgaaagtaaatggtggaaccaataaggtgatgacttactcattaatctctgtggagttattcaacttggtgagaatttcaactgctatctgaggattgtgctctactaattgctgagaataagaaactagatcacatgaaaaaaagaaaaaagaaaaaaaccacctgccagaaaatgaatcacataccggcagcttccgtggagttattccgcagtgaaagacaagctttgggtcatttgccaattctgtaatgatgtcctggccagtaaataaataaaacaagttatttcaatcactcaaaagatccaggttttctaaattcatcagctatacgggcaaggctgatgaaataaaacatcacaatcactatttatctattgcacggttattttccataaactcttactgcagtcaattccttcttaatatcctagatctttaaatccaatgagaaaggaaatactagagtgatagcacgagcacgacttctctctcaaaactactgccatacaatggctgcctttacaacctttaaaatttgtgcatatgtagttactgtcccattgctatgttaacttgcttataagtgttagagtaagataggtaataaaatggtcaatacttgtatgattttatgcgcatatcaagaattaacgagcgataacatacctcttgctccgtaggtgaaagtgtcacctttaaacccttaacaagcaagtctctaactgttgcaccactgctagtatcagcacacattttatcgtcccaaacaagctcatgcttgttatcagggtcaatccaaagcaactgtaagaagttgaaccatttaggtcagttcgataattttctgaaccagttgaataaggggttattcttatttttacctcgctctgatgaactgggtaccttggtggacatggacggatccacctaggacctaatccccccattgtcaaatttcctaagaatccagatagtgcctcatccctatcaccagatccaattctgggattcactccagcttgcacatcaaacctataagattatttgactcaatgatcattcatacaatcaacttcaaattggcacattaattataacacagaacattaagcttggaggaaaactggaagcttgaaagaaatagatcagattcaactgtatataacagttagaaagaaacagaatcccctgactcataggttacgtactctggagagttaggatcacacccacgaggaacatcaggatcatgcaatagctttttcagggaatagtctgcaaaaatgtgactagatggtccaggatcggctttgtcgccatactctcgttgcagctctcctagttccggaaaatcctgacagagcatccccatattagatcaataactggaaaaggtttctctaaatgttctctaggtaatgttaggcataataaaggaacagttacgatgaagataaaatatcttaagagatataattggaaagaagatatctatgcatcaaccgctcttacatgagttgaaggatcaaacgatctgatataatcaacagctgagagtttgagaatctgcaagggagcacactttcgttactttaattgatcatgattacttacgtagtatccacaggtcacagagctcataaaattttacgaatcaggacttgaaaaaaatatcagaaacgaaagaaggcttagcatatgcctgataggagtgatggacttaattatgacagaaataaatgagcccagcaaacaagtttaaggagatcagtagtcttagagagtatatgtgaaaagggaattgcataacatatttatgcataaattttgaattttcatggattagcaaaaaagaagcaggcaaacagctatatcctacctctttcacgttgttgtaactattccattgtaacaggtggagaagaaatgccctttcagacttttccagctgttcattacaagcagcctgcaaaaggcatagatattgttattctttcaaacgataagaccacgtcatgctaagacacaaaacatgttggcttaaatcaatctaatacacggaaactcaacattctcaaataccatgcaacttggagaaacaaatggtctgatactatctaccaagcttaacacttaaatatgcttacgaaaaccaaattatatcagtacctacgattttccaggattaaaaacacacttattacgacgttaggagacaatcaaccagaattgggattctcaacaaaactgagaaagtaaagaaatttgcatttgtacaatgtattagaggcacaatgaagggtgcttacacttatcatttcagataaaaacgggttgaaagatggcttctgtgaagaataacactggtatatgataccaaatgcaattagacgttcagtattcttaaacatctgctgatcctgaaatggaacaaaacttcattcaattagttccgcaaagaaattagaaatggttatcaaatgtaaacacgcctcaaaagtatttgttatcatcactttcgaattgtcccctgtgtatacaatcagtagaagaacactcttaacactagatttcatcaacgaattcaatatacagcacagaagagaccatttcagcagacacgaaaccaaacctcgaaagaaaaccctagattcaaatcaaatcatttcgagtgaaacaatccaaaaacccctaaaactcgctactctcccacacaaacacgaagccaagcatcgagagaaagttcaaaaaagagtaagaagaggaacaaagcatgcctgcaacatcatggaaagagaattgcagacactgaggtaacgagcgctttcgaacttagagtcgaattccgataaaacgtcttccatcggccggagatccgatttgagcagagacaaaacaatcgccgactcttcaatcctcataatcatcatcgttgatcgattcatccctaaacctggattcccaaattcaattcccaatctatctctctgtagggattttgttttcaaagtttcatgctctgaaatagaccttatacctctttctcagtgagaaggttcgagtctttttgggaaggctacttttggtaatttgacttttcctcacagctttattaactttgtaaaggtttttaagagttttgtaaacttagtaatatctatgtttttggaaatatattcaaaggattaaatcaaaatgaatatatttagttcatataatagggagtttgacaaatattaaatctgaaaaaatcagaaagtaaataacaagaaatatatacatttttagattttaagatttgataatttaaactagatttaagattaactattttagactacttttattattacgtatttatgatttttgtcatattttttaaagacttttgtcgtttctaaaaatgattacgtgttttataagattttatgcaaaatgacattaatgtcttttcattgatatatccgtcacacaatatatttaatataaataaattatgtcatatttaaagtcactttaaatttggtaaaactaatatctttattttggaaactatattgatatatgtatgtgtcttatgaataaattttagtttctcaaagttagtattaactaatatgatctagtacttgtcaattaattgattggattgtgacacgggttaaactttaacaactatttaataaacccactttaagaatatattttttttttgctattattaaccaaatttcttttaatcattgctatatttacttacctgtttttcattctatgtcattgggtgcaaaatgcaaatactctataagtaaatcaaatcaaaacaagtttatccaattaaaattttaagaaagaacaagttaaattgagactgagttatcttatttcatactcttgtactcggtagtcgatacatatatcttgcgagtgaaataaacaaaaccgagtttcccacttcaacgtgtgtggctcatagggcaagagcagagctaaggttcatggggttcatatacttggtggtaccggtcaagatatgtcggactatcatgcggtttgctttctcagtcggatgaaacgcatcccaaaagacgtataactcacggttcggacacaagtttgatagaaccgtacacaaacccatcccattgtacggcccttgtccgcaacaagcaaccttcgatgttacaaatcctataacataaataaataattgttataaccctttcttctcgacaaaaagtagataattagaaagggaaaactagtggtaattaccatatcttcgtggagtgcttagaaaatcctcttgcatttggttagtgttagcagcaataaacacatttctcccaatttttttgttaagttcatttatcatttgaagtagctgaggatcatatagagatgcagctcgttgtagctcggccgagcatcttccattcgacgtacctgatctcgccagttcggccggtgcacatcctagtggtccagctcctgtcactagaactcgacccactccaagtgaatttaacctctacaaataacacacaattaaattgtttgcaacaatactcaaatagtcaaatcattgcaagagagtgaaagttcttgaaatcatatgagttcaactgcctaagactatatcatcattccaattcaattttggtcttacaataatgaagcaaattataataagactgttaccacttaccaatagtatttttttgtattcagaaattaggagtcggacgtaatccggtagagtgaattggcgtgatctagcggaatatggaaacaagaaatagttgttcacaaaatcgtttccaccgaccgtgattaatacaagcgcttgactcacgagccgctgagtttgcggtttcccaatcaagcgactcacacgttgttggtattgttggaagtaatcgagttgttggtacattcttataatgttgatctgcatgccaaaatttatatctaataaataaccggaaactaatatgaaaattttcatttgatgtcagactcggttatatatatacttacgaattgaaatccggtatcattgagaattccgataccagcggaggcgaaattagcaccgttaagaagactccggccccttagctctggactaaggtaaggtaacggtggctcttcgttaccgattgcctcacctaaccaatatttaaccagtttattattatgtctttttggtaaataaatagcttcttatgactaaatatttgtatactcatctgaatcaagattactctaaaccggtttatgagattagtaaccaaacgtaactgataagatctggaatgttaagaccgttggaaaaccggccggttggtctccgagttggaaaatcgattccatacggtggagagtcggcacgtgcagttgtcaccagatagttgttgttgccactgtcgacgagcgagtcaccgaacacgaaaaaagcacgtccctccaccactatcggaccagacataacaaatactaggaacatggacatgaatgctataaccgttgatatcgtcataaaagcgttttgtttaatgactgtgacaaaaattacaattgaaatggaaaacgaaggaaggctggaaattatatagctaagagttttggtttctcactttttcatatggtttattcaaatgtattcgatcccgtgttatgacatattgacagccaaaaaggtgcttcaattgtttttaggtttttatagtattgctaccaaaaaacaagaacagactactatattacacaatatttattagaattatcaaagtactggtagtccaagggaatgataatattgtacatttatgtattattatcgtacataagttcacatcctttttctgctattgctatctcactgactactcttaacactttacttaaaaagacctgctttggttttatacaattgtttgttgtatgttataaactaaattacgaatcatcaaatactagtgttaaacattttcaagttagaaccatttttttgtttgttttccttgtgagattatttctctttttttttaacataatgatgagatcatttccatccaattgttatttaataccacctatatccacctctcaagtttcacaagaaggaacgaacgtaagcgttgggacacaaatgacaaaaccctttactctttaacaagaactcacatgaggcttgcgtaatgtttatgacagaacaatgatattatactgtcctagcgatatttgggtttgattgagttaccaatataacccaattggcccacaagtatccaacattctggcccatttgacgttcagtatattatcagcgtggaccatcaatctgactccgcgccacgtcttcaagcaaattaaccggtttggttcgcggtttaattatgagaatgagatatacaaaacagagtcttcgatttcagagttgatttaggtttcttgattctttcttctttcgcttcaacacagtcgagtgactcgccatagcttcaacgccgacgaaacccactattcaaggtagccaatttcttctacagagcaacgtatcgatttgatttcgacctctttttgtttcttcttacttgcccattatctcaatttgtcactgaacagagatttaagttttagagttcaaaagcaatcctaaaaccctaaaccctaagctgagcaaaatccttcataatgcgacctccgtacaattccttccagcctcaagctcgtccttatcgaccgcaacatcaactacaacaacaacaacaggtctttctctttctatttctctgccactcaataaaaatctctcctttttcaccacaaagtaaaaaacttttcgtattgatgtctctgtgtttgctttgccatctgcagatcaatgggttttctaatcatcaacaacaacaacataatgggtatcagaacccaatgaacgctaatcaattagggatgatgaatccacagatgatgaataatccaatgatgggtcacaacatgccaatgcccaatatgccaatacatcctcagttctttaacaatatgcctcaacaacttcctcagtttgctatgcccaaccatatcaaccagctacttcccaatctcttggggaatcttcagtttgcagttgctaacagtaaccttatgggtcactctcttcccaactttttccagccttctcttgaacctcatgctttctcttctcgaccacagcttaattcctttaactcccttccttatcctccggttccaaatccccatcaaaatcaccaatcagggcctccgggtttctcagagccaagaccacaggtaaaaacttcttatttacattgctttttctctatcaaaagggagacttgtctaagttgtttccagtacttcttgctctctaagttaacttgagcttctacaggggcagtctgtcgataataccaatggttcaggtcctaacgggaatgattttcgaaataagtttccaaagcatcaaaatttcaaaggccctggtcaagggtatgttcctactacttactcgcctttcagtgatttgtttgctataatcttggtttatatgtattctgagtttattgtagattccagagacctcagttgcatcaagcagataatggcaagagaaagtctggattcaataaggatcacaggggcaaaggttagctttttacatcggattacatctctggtttgcaattgtaagaattttggtcaaaatggtataaacttccaactctttcagttttccctggatatgtctactgtcattagggagaggattgttgactatagttgttagctatatagctatatatttcaagttagtagtgttgttgtattatcattgtattgccaatatttctgtattcctttcctttaattttctggaacatttttgagaatgtttgaaggtgtttttctgatctctccatatatgacttcatatacagggaacaataataagatgaaaacagggctcgatggatctgatactggtaacatagctaaggagaagaaaaggtagtgttaggtgtcactgaatttcttttcgttcctaaggcattttgactccctaaattttcacgttcatgaagcagtgtgatccttataagtcgtagtattgaatgggatttaatctggattacatcttttgttatcatgtcagccaatctctaatatttttttttgatgttgtttttctccaagagaagatcatatgctttgatgtatacaccaagagaagttcagcaatggcgtgaagctcgacgtaagaattatccaacgaaattccttgttgaaaaggttagagtcgctctccctctcccaccagctttaatttgttgaaattcactcctttggtgaaaattttgaatgctaaattacctgtttgcagaaagtaaagaaaaatgtttcagccagcatccttgatgaggaagcaaaaatgcgtcgtcaggtaccctttattttggtctagacactctgcattaatagaaatataggatcaatttgagaaattccacttaaactattttaggaaaaggtgaataggagctatagctgatctgctatggtgtataaatatgaatactaaaattataagttagtaaatcttcatgaagctcaagtcacacctttaagatcagctggccaataatgaaactgaaatctcagtagtttatggtttttgttttgttttcaagttcaggcctaacaaaatacaccttcaagttaaatatccagaaggttatgatggtgaaaaaagcatctatgctcatatatgtaacgcgtaatgaaaagttattggattcatggtttttctattggcattgcagcaactccgggaagttttagcaaagcaggctgagttaggtgttgaagttgcagaagttccttcgcattatttatccaataatgatgaacaagttaatggagatagaggaaacaacaatgggcgaaagggacgattccagaataatagacgtaataagagaagacatgacagaaaagataagtttgataataagaaaccaagattggaagacaaaaaatcgtctcaagattcttccataacgactagaaaacctacattgcttgagaagctcctaagcgcagacataaagagagacaaaagccagttattacaggtcttccgcttcatggtaatgaattcattgttgaaggagtttccagagcaacctctgaagttacctttgattacagtaaaagaaactggctgtgaagatgctatggaagatccctcaattgaaggtttatgtgatggccttagtgatggcgatgatgtggatggcgatgatagctcatgtgatgaagatgtttgatgtttaaatttgtaagaccggacacatgagcagtataaggatttgtgatattaatctatatgtgttttcgttttgaagatatgtccgcaggaaacagtaagataaataatctgatacaaggaacatgagagtaaaaatagtgtcacattcgaaacttgcttcatctctattaatttgtttttacaaaacgtgtaagaaaattcacattatgcccaaacctatttacacacataagcactacatgcaaggagaaaacaaaaaatcccacgattgatgtataacaaataaacaatcctaagtcaaatataagaaatatgtatgataaataatagtaataaataaaaactctcagaaccaattccatggatgttgaaactcttcacaacaccaattcttgaaatctccatttttgccaatcaacaaacctaaatcatcaatctccaaaagatcatccatttccaaatatcctgttcgctcttccaactccggcctatgcatcctctctccgccgcaactaggaaccaacatactctccttgttgtccgacgatccacacgacgatgacacgtcatgttccgtcttcttttcttgccccacaagaaacctagaccaagctccattgtataatccataattctgactcatcaaattctttggtttcaaattggtcgaaaacgttaacgtagagccaccaccgccttcaccgccataactagtcgtagcattaacggtctcttgatcttgtgaatcactttgtttaggtaataaccaacaaagattcgaaccacttgaagacgaacatcgattatgactatgatcatcatcttcttgtagaaaactcgatctctctgagcaagaacctcgtgaacaacttgcctggccgagaccaaggtccaacccatgaaccatatcgagcttcttattataagcccaagaacccgacccgtggccagaaaaagacaagtttctgttcactactacttgttgttgttgttgtgggtgcaccaagttgagtttagcctcgtgtccatagagtttcttagcggcttcatcgtaagccatggcggcctcgaccgaggtattaaacgtgccgagccagagacgagtcccacggttaggctcacggatctcagccacccatttaccccaagtccgttgcctaactccacggaaagtacacgtggcgttctctggaccgcctttacctttcatgcaaccttttctagatctccccatgtttcgtttcttggccggaggttgctcttcttccatggtgtttctttgagagtctcaaattaaatctggtttagtgaatgaaaaattgaagtgtgcgtgtgtatatatatacaggacacgtcaggagtatacgtattcttacgtggcaaatgtaaatatgagtgtgtacgtgtgttctgtgtgtatacactaaggtaaaggatctctcgttttgtttatttgatttaatgtctgtgttacacgaaagtgacccccgaccactgtcttgatgatgactcacgtgtttgtgtttctctctaagcccctctccttaaaaagtgaaaattaaggagatactatgttatatatccaatgtattttttgatttttttgtttatttaaaacatatagagtagaaactttataaattaataatgttgggaccaataaaattttattaatttatagtaatattaatttatcttataaattaatatttataatttattatataaatattaaatattaatttatagaaatatttacgtaaaatacaatactataatttttaaaaaatgtctgttaatttaattttctatatgatttgttgtttgcatatattattatgtcagatttttatttttccttgacttcttttatttatttttcggtaagatattgtatctgtatatctacgatattaacgtgaacgtaaacacaaacatgaaacttaatccaatttctctttacacaaatcttaccaatgctttctcaaataaaagattttacaaaatcaattatgacgaatcaaatatgcaaatagttatgtgagtaaaacataaatcatacgagttgtattttaaaaagagttgtaattataatttgaacaaaaatttcatataaaaattagtcttaaaatatattcttaagatctataattattaatttataatattattgagactataattttacatagaaatttcaaaaaaaaatattatcttattatcttatcgattttggttaatttttacattggtccgacttgggactaacaaaatttattaatttatcgtgtttattaatttatcaattattaatttatagagattgtacggtaattccctaatatataaatacacatgcataattaaaaaaattataattttaaaagatataaaataaactaatatatgtggaagattttcagaacggtaataaaaattcataaacttttcatcattaatttttcctaatgcaaaatataaaaatggataatctgacacaaaaaatttatattctactgtttcatgatatgtaaataatatcttttaaaattagtttttgtgagtttttaaacaaaaactgattaaaaaaagattaatatatttagtgaatgttagatttaacaataattaattgatttattattttctcttttttttttttttttttgaaacatccgaaaactgtttttcttaacaaatttacaacacaaacctgaataaaaccacactccaaatagctcgagtcatatccatatgtaatacttacagattttgtatacgattcttaggttttcgttttcgaggttttacttagattataagtttcaccgtttagtttttggataggagtaataatataagataaacaacaaaataaatgcgaagtatataagtctacgtacatgcgaaaatggaatatgtcatgttcatatgccaggtgtcaagatcgagggtggcctggcaaacgactcggaacacatggctctaccattgattaggtgcttcggcacgaagtatctgtttttacaccactacttattaaatcctctgtttttgtttcaatcatacatgggattatctatttccctagttggaaaaaaacttcgaatttcttaatattcttaacaattttcgctgaaaaaaaacttacgtgaatcaatgtatgttgatcacacagtgtaattacactgtacacataattaactatactaatcaacattcgatcattgctttttggagaaaatgtcctcaatccgttctacataaacaaattaaagtagttaactaataactaaaaaatgttttgcactttacggtcaataataattgaagttcttaaactgaaaattagtttatttccattgcacaagatgtcaaataaagagagtttacaaaattaggtgttgacgatgtaaagagcatagagcaaaaactttcgtgaaaatgaatctaacaatagttatatatatataaaaaatcaatcaatcaaaagttaagggaaattatttttgactagcttctattaactgagggtgtagtattgtcgaaagaaatttgtagcatatacatgcatattctagaaaggtacagtagccggtataatttaaaacatgagctttagattgcatgaggacgagcaagtcagtgtgagatactatggctctggggatgggtgtcactcttacatcgtggacaatgcgacacttgttttcttcttttcccctacttcttggaagttattattaaactcatatagatacgggtaccttcagagaacctgtatatttacaatatgatcaaagttttcaaataatatcgcttttattttaactgatctagttacatccacatgagttgatttcgaaatatattttcaccatttatattatttttttcgaactattgattgaagcttgaaaatttataatttgattgaatctttggagttatcttgattcaatctcgaatttttgggcaagtgtattggttgggcctgcttgatattaacaatataggttcaaattcaagaggagctcatgatacaagcccaagtgatccaacatccttatctagaacagtgcgtcatcatgacccaaatgacgtttacattttattgtacctcaaaaagcgtaagccatggtagtccattaatctgaccccgactcatacatattacgacctcatcaagcatattagtatattaccggaacgtaccacgtcgaccgtcataatttctttgattagtttatcggattttatttttctctagtaataattctaggaaattttatagaatgatgataaagatttttcatattttgttacattttatatgatcaaaaaaattatgttcaacaattcagttaaattttgtcatttattattatttatgatatgttggtcctccgatcaccaatctcacattatatcgtagtttggttgaaactcttcaatactaacatgtgctagtatgtacatctctttttattgtgcaataaatatatggttattgatgcattatctcccaaaacatgatatagtactttatatctcgaaactcttcaatacttagttaaaatataaatatgatcgctatcacttgaactgcagaactaacatcaaaacgtgttggtcatcgttgtcaacaattggaaagtgaacaagaaaccaatatgtgatttttggcgcagcgtttgctatgctttgaaagtccctcatcatgccatgttgatatccgattatcgggcgaccatttatagttaattatactgtatttatagaaatttaatatatagaaatttctgcctggttaagattgtatataaaaaaacatatatagctatataattgtcacacataaaaagtagatcactgaagttctacgtaacaaaaaggtattattgtagttaagaacatgatactactgtctactgatgacttagtagttgctatataggtaggttcacactaattgcataatgatttaattaatgtaacattataaatacattaattagattcaactagtattacgaatcagacgacgcagaagcatctaaagttggggatttgagcagagtccaaagaaaaaccattataaataatccgttttgttcatcttgaccatcggattaagatatatgtttaccttactctttttcttctaatctaatctaatccaacaacctttctttttgtaatttatatgcaatcttatgataatgtatccaaaaaaatttagaagtacattagtcatatcatataatttcacccacgtgaacattgattgtaaacatgcatgcatatatttttcttttcttttcatttttttttacagccaaaacatgtatgtacatatgcgatccacccatttatttttcagtgactctaacatgtaagcaattcagatttatacacgaaattcaaatgattatttggcacaattgctaactattttgtcggtgtatactgttattcatcacgaattatttgtagtgacactaaacataaacttaagatcttgaaatatttaacaagcttttcaaaacaatatacgattattgtttatcctaagatatatattgttttgagcagactttttttagaatgaaatttccataagttttctctcatgcgaatgatagatatgcatgtaaatcaacgttacagtattatgaacccctcgtccgaaacagctggatcagactccgttttccatcttaaaaagaaatataaaaaaatatacaaattatggggacgattagttgaattgtttataattttcttacatatccatatcccaaaagatcagatcaacttgaatctgataattcttttcgaactaagttcggatcaaactcgagccggatatattgattgacccaattgatagacgtataaattttactagacgatctgtcgtggaccactacaataaaatggtccacagtgactttatatacgcatttgttatttttttaactttgacttgtacatatcatttgattgagtaggaaaaaattaatcttgatcctagattagcatttagatttttttggtcaacgagattaaatattactactatttagttgcacaaaacaaaagggaatataaattttagggaaatgacaaaaatttaattgattataactttgaattcagttggtatgttcataattcatttgttgaaattggttcagccatcgcattcagagtgtgtacttatgtgcatatacgcaaaatatatcttaaatcggtgtgtatgagtacgcaattaaagaacgccacgtgggacaaactaccaaatttagatgatgtaactaaaaaagctggatcgattgagagaccctcaagcaaagatattaaaagtctcccataaagttttactgaaaattcaaaatgattagattattattatactcatgtgactggttttgatctgcctcgtgcatttccactagaaccttaattactagatctttgtaacagaagcaatgtgatgatattatattggacgctaaccagaattcttattgaactcctcctactatgaaaggaaaatgaactcaaccatattaaaacactttctctactttgactctttgctatataatatatagttccaaactaaatttaaaccaagaaaaaattcgttcattttaaaaaggtaaaacaattttggttattgttgtcttgtatagacaagttatacaattcacacgagtcgaattttacgacgtacaagtacaataccaaaaatatgtactcttacatttttggctataaagtattttctaagttggaatttaaattttagaaaaaagagaaaaaagaaaagagtagtgacagatgaaaacattgaaggagtgtcataaaagggaagaaaggtttagttagttgggtaggtctctctattgtatttatagtttttcctttgcttctttttcatttatttcccttaactttattttaatcaattttgctttagtctctctcacacacatgtataaaatgaataatttctcatcttctctcttttttatttataagaaagaaaagacaagaattaaatctatcaactatataaaaatgaagccaatgcagggcaatgatgatgaatcttgatttgatcttcttctcgaaaacctcattgcttctgcttcttctcttccatttccatatttacacttcataatatctcttcacccacttctcttcttccccatttataactcacaaatatatacatactcttacatttatatatcttgggctagctaagtagctatagtaattttctaatatctctttccatttcttgaaatggtcctcctctcaccttaactttataagaatctgaccacctctcaggtttccagtttcttcactttctcgttctctggacactgaatgtgatacatatatagaagaagaaagctataagagattgatcgatggaggtgaatgttcttgcatccaagagaagtcttctcctttttcttcttattgtaagtctctctttgagccagaaggtcagacatatctctgcctttaacgacaccaaaccatacagacaagtcagtagcttgagacttgcgaggatccaaaagcacttgaacaagatcaacaagtctcctgtcttcaccattcaggttatatatatgtacatgtttcaaatgaattttaatttgattttgtctaatcattatgcaaaatatttaacttttttataaaataataatttacagagtccagatggtgatgtaatagattgtgtacccaaaagaaagcagccagctttggatcatccactcttaaagcatcacaagattcaggtattgctgaccacgcaactttttcttttatctattgctaacataaaacaaatagttttaaaactttattgaataattttaacatttttttaggtagcttccaattatgtatttatgaaaaaattggtgatttggatgtgacaagattatatataagctcattgtttttcttaaattttttttttgtcctgaaatgaatagtacaaaataagtcgttttgattatgataagaagccatttttacgatgagaagaaattttgattatgataaataatgcagaaagcaccgaagaaaatgccgaagatgaagggaaaagatgatgatgttaaagaagcagagaatgtattggaaggtgcatggcaaatgtggcacgtgaacggcacgaggtgccctaaggggaccgttcccatacgacgcaacacaatgaacgatgtgctcagagccaagtctttgtttgactttggcaaaaagcgacggagtatttaccttgatcaacggacagaaaagcctgatgcccttggtaccaatggacatgaggtacactcgattctaaatctctcttcttacgcggttgactaatacgactactaacttaataatcaaactgattaattaattttactagcattgaaaacgttaattaatttaactggtttgtctcagcttatcttaattctaattttttacagcatatatatatataatttgttgatacgtagatatgatatatacacgatacctatgtatatgaatgtttaatgtgaattgtctatgtaatcatttaattatggacccatataacagtttccaatgtcagtttcacattaatcagattcataaaatacataaaaacataagcattcaatggattttaagatccggtctcgttatcataattcttgaaagatacaactatcataaaggattaatacagtactaatataaatgcacggcatttcattcgcatatattgggattataaatgtgatttagaagttaatctcgaagtatataataagacttgaatactgattcttttttaatgatttgtggtggggaatgatagcatgcgatcgcttatacagaatcatcgtcggagatatatggagcaaaggcgactataaacgtttgggatccaaagatagaagaagtgaatgagtttagtctctctcagatttggattctctctggatctttcgtaggtcctgatctcaatagtattgaagctggctggcaggtactgtttttactgttttacccttctcataatactgttttagtttacgttactttcataagtcataactactgttaagtgtacatgtttaagaaaaggattatatctaaagctgagattgttctactagtcaggtcagtccggagctgtatggtgacaacagaccaagattgttcacttattggacggtatgttgttgttttctatttgtttgtttttaatattatgatgcaaatcactttcattagtttaaatcaagagtctaaacctaattgagggtataaattgaatatatttgagaagaagataaactttaatgtgttgcttttaaggacaatcatgtgacagtggagtagtttctaggtgtagttcagcgtctagttttggtatataaattgtattcccagatttaccaaatattgctttgaaggcacccttccaatattatactttatttttctatatacagtttcatttttctgaaacaggaatttataatgaatatcatctaaaaattcagtgatactgtgcatgaaaattctgatagggtaacttgaaggtaatttatgctacaaaaacaaaaataaaggatcattttgaagttaatggtagaacagagtcatcatgataatgtttggtgtagagcatttattattgcattaatagcatattatcaattggattgataccagtccaatttctgtactactctccaaatcattaaatttggttctgtccaaaagctagaattaggatgacatatctactcatattttttggtcgtaaattttgaaaatatgtgttaaattgttatttgatcattgcttggcaataatttggttaaacaattttttttggtttttgagcatatcctaaactgatggtaatttttgtattgttaaagagtgattcatatcaagcaacaggatgttacaatcttctatgttcgggatttatccaaacaaataacaagattgccattggagcagccatatctcctctttctacgttcaaaggaaaccagtttgatatcacaatactcatttggaaggttagctagtctttctcttacgacatctctatttatcatctatataacttaatatagaaacatgcttatacacgtacactttcgtattatggatgccacatcttgaatttagttgaacttgaacggcgtaattaattttttctatatgagaatgtggacgacatagaataacggtgtaaaagcatgctactaatacaaaagaattcatttcttctaagaaagatgtctaaattatattctttgggatttgcaggatccgaaaatggggaattggtggatgggtttaggggatagcacactagtcgggtattggccagccgagctattcacgcacttggccgaccacgcgactaccgtggaatggggcggtgaagtcgtcaacacacgtgcttcaggcaggcacacgacgacccaaatgggctctggtcattttccagacgaagggtttgggaaagcaagttattttcggaatttggaagttgtggattcggacaacagtctcgtaccggtgcatgatgtcaagatactagccgagaacaccgaatgttacgacattaagagttcgtatagtaatgaatggggaacttatttttactatggtgggccggggtttaatcctaggtgtaattgaaattaaagtgtacatagttcgggttggaggagtggaggaaaaaaaagagggggtcgaaatatgtaatttttttcaagtatgggtagtgaaagattgaatattggcttattgtttttgatttgtcatattgttggttgaaatctagtaatttattgccctcataggaaaaagaagtgtgtatgcaataatgaaagtatgagacaaatttttctttgctttataagttgcattaatcttcaaatctaaaatcagaaatctttgatcccactgacaacgtgaaaacatttttactgtattggttggctaaatgagttttagttattacaccaagagatttgagttcaaacttcaaaatatactatttttgtttgagtttgttgttcaagtattacatagctgattacagaaaccaaagaaatataagatccaatgtacttggacttcttttctttttttgtcgtcaatttcattaaatccttaaaaggattacatggtgaaaggaaaacccacatatacacaaagttaaagcccaattaacccaaatattgattacgatgaaagaacaaaatgggctaaaaagagacacgtgtgtacacgtggaggcatggatgaaatataagatccaatgtacttggacttctaaaataacaaataatgtaacactagattttagaaaacaaaaaccatccaactcgatcattcatcaatattatatagagaaaacagtcataatgttagagagagacgtatgaatcgaaattcatattactgtatttcgattacctaaaaagtttcgaaaaagaattaaaagtttgtgtggaagattccaatacacgttgctatcggaagaagacttggaaaattattcctcaagtcgttaatgcttggaattagtgactaacaatcatcattattccattgaaagagccgcccacgacgcgtttccattttccacaccagtcaaagttgatgtctcaaattagtaactgatttacaattttaaattacaaaatacaaagcccgtacaagctaatgtaaacggaagtaaaaccaaatacattaacaacttttagtttagctgttcaaaggacagagatatgacctcaaccttaacccaatctttcgtctgtgtttgaaacttctgctcgtaaagagactctagtaaaacccttcggaagaaattttttaggtagtcgccatcatataatttaaagcttatgagacttgttatgttacaagcagagaccaaagactattcataatcacttatcagagtataaaatactctttttttgtcaatcgagtataaaatactctgatatcacttatacaaagttctacgaaactcattaaagatttgagagtgtacaagggacaaaaggtgctataaatatctcttaaaagagagctaaaagttaaggaaacacttaaccaagcaaacaacaaatggctctttcaatcgttcttcttcccttcattctcattctcataccgacttttctcagttcggttttcgccgtttcaccactcaaaactgatacgttaaaaccggggcagcagctcagagactgggagcagttgatctctgcggatggtatcttcactctcggattctttacacctaaagactcatctacttccgaactcgggtcagctggtcttagatatcttggtatttggcctcaaagtattccaataaatctagtttgggtgggtaacccaaccgaatcagtttctgattcatctggttctctatccattgacaccaatggggttctaaagataacacaggcaaacgctattccaatcttggtgaaccaaagaccagccgcgcagctttcattggtcgggaatgtgtctgccattttactcgataccgggaactttgtggtccgagagatcaggccaggaggagttccgggtcgtgttctatggcaaagctttgaccatcccacaaacacattacttcccgggatgaagattgggtttaacctaagaaccaagaaagaagtatcagttacgtcttggataactgaccaagtcccagtcccaggagcattcagactaggactagacccatcaggagctaaccagttactcgtctggcgccgcggggaaatctactggtccagtggaatcttgacgaacaatggaagctctcatttgaacttagaagtatccagacactacattgattatgaattcaagttcgattcaaataagtacatgaagtacttcagctactcaatcaagaaagctaatagttcggtcttttccagctggttcttggatactctaggccaaatcactgtaaccttttctctcagcagtaacaatagcagcacctggatttccgaaagcagtgaaccctgcaagacggatttaaagaacagttcagcaatctgcatcacggagaagccaacggcttgtaggaaagggtcagagtatttcgaacccagaagaggatacatgatggaaaataataccggttattatccattttactatgacgatagtttgagcgctggtcttagcgactgtcatggaacctgctggagaaactgttcttgcatagctttccaagcctttcctgatggatgccaatattgggaaaaaggatcaaagtttgttccttatgatagcttcaactccaatttagtaacttatgttcttgattctgtaaagtgatgtgtggttgtaacttgaacgagcaattatgtaaccagactagtatcagtaaaggggtttattaagaaactaaagaatcaagcagttcaaagacatgcaccaacttcctctctttacaaattgattcaaccacagctccccaagatttgggccctggtatgagacctatcctcagaaatccaataagaacccgaaccccgatttctgtatacccggattcgcaaagccgaaccaccaattcattccaagtagcatggtgaggccaaatccctctctcagacatcacactcagaaacttcaccgctttctcgagctcaccattacaacacaacgcgttcaatatgatcctataactacctttgttcagatgaactccttcagatccccattgatccagcatctgaagagcttcctctgatcttccttcgctggacaagcccctgagtattacattataagttaatgtatcagctctgcatctggatgctttcatctctccaagtagtttcatagcctcatcagtttcaccatttctacaaaagcagttcatcaatgtggtataaccaacagtgtcgagtttcaaccccgttttcttcacctcgtcaaaagtttgtttagcttcctgaatctttcccactttacaaaacccattcattagagctgagtaattgtacacatttgggttgcacccattcttcttcatgaagtctaaaatcttcttggctctctcaacttcccctgcacgacagaatccgttgatcataacattgaaagtcacagggtctggcgaaatcccttctttcgagatcatatcctcgaacaattccaccgcttctttcgatctcgagtgtgcaaacagacagtccataagggttgagtaagtgatcgaattgggatacgaaatcccagaccttttcatctcctccacaactagaaacgcaaaattgatatccccattcttgcagtggtgcttcactagaatattgaaaatgcaagtatttggctgcaatccaagattgtgtttggcatacaagagtagtttccgggacaaattaacctcccctgaatcaataaggagattcaaacaagtactaatggcattgagagaaggcttgacacgagcaatcacttgaatcaagttaaacatctccataactttatcatgcaaatcagacctggagaaatgtctcatcaggttaagaaacaaactttcttggaacctgcaagtctcatacttcatctgatgaagaatggcatcaacagctagaaacttcttgtgcctaacgagattatctaaaagaacagagtatgtagcattgttatggttaaaacctttctgctgagaagctttgttgaagatatcaagcacaccctgaggatctctctctcgtttcatcaaactgacagcagattcgtgagagataaacttggttttggggtttgtttccacaggtgagatagaggattctggtggtgggcttggtttcttcttcttctccgagaagcaaatgggagatacccatgatcgtgaagacgatgagaaccggcgatgttcattgattatcgaagttgtgaagcgcattgtatctcctctgtaatcaagagaagaagacagtaaaattaggttaagaagagtaaagctacttcctttaaacttaaagcaatccattggcattcaattgaacatgaagaatcagatattcgatattaccttattggattgacggcaccaccgtaaggagtgataagttctatggtggattaaagttgtgatttttaatgggttttctcagaaatcgaaacagagcaaaactgcgaaatcaataaactcatcggagaggttgagtgaagacgatggtggaaatccggttcggttaattcaaaattaaatcccggtccgtacggtttggattacaaatggttaaacccacggtttggtttaaaaatgtgtctcttctggttcttgttgaattctgataggatcttgtgttgttgttatgagacataatgacaaagaaagaacaaaggtgtaaccatttcaagacagaattataggctctgttgtttctgaaagttacaatggtgattggtgacacttttacatattttgttgtcaacagaggaaacatagggaatttgatctcgtcgtgtcacgacggtcttctagacctttcaagaaccatctcaccgcgaggtgctctgaagcataagtcatgaaggcagctagaattatggctagacccaccattagacccaacctgttcaatatgtgataaaccagcaactataaggacaagaatgtgttgaatcaataacaagaacctttctttcacgagttgattaagaaaatttacctcgtgaataaagcagtgatccccaaaatgtaaggtaaagaaactgcagcaatagccagaaaagccatccctaatccataatacaatgtagtaacgtcacaagacccacctgctcgctgatgaactattgagacaagaaaaatggtcttagttcccaactttgtagagaatggtacgattaccgattatcacaatttgttgttttcttctcatgtccataccttttgcggaatcatccaaggaagatgattctgattgtatcgctattctctttccatgttgatgcacaaaaagcaagaagacaccaaacaaaagaaagaagattgtaaaagtccattcatacaccaagaccaagccagtccatggcatgatttgcctaggcacaatcgcaaaggaaattccaagagataacagaacagcagtaaaacagacgacaactgaaactgcgcctaagtgttgaggaaccttggactgtgcgttgccactgtggggctgcagacagaagcaatagtaacattgttcagattagatcaaaaaaatttaaaagttaaccataacgatttgatgtagaaactcacttgatagctgggactcatggtagatacaccgccataaccaagtgttccattagatctaactttgtaataaagatatctaatctgattgctgaacgagctccagcacaatgaaccctcacggccctgcgagaaatcagaaaacataaaatcaaattacaatccaagaacgatgaatgtagtcgaggtgaaggtaccaaagaagtcttaacctgaatggatcggtaaatgcagaacaaaagtgcacaaagaggtaacaagaaaaggaacttgacgacgagttcatcatgttggttactaccacctccagttccaggaagagtttcctcaagctttaccctaatgctctgcaattgttcacggtgaaatcagacttagagaaattcactcaatagaaacctaaaaatcatagtgaagaagaagacctacatgccaagcatcaacaggtttcacgagccatgctgtccaccagtcccaaggcttaagagggcctagagtgtagtgaatgacgtgaagtttactgtcatcaaccatccactgcagaaataatgagaaaacacaaagattcaaacagctgaagaaaaagacagttatacttttaaaccaatcaaaaccaatcccaaattaaccactacgtattccaagatcacttcgacttcatagaaagccatagactttaacagcaaaaatgaaaaacagaaccaaatagacaccacgagactaactacaactttgtttcctaactaaataccttattagcaagcatataaagaccaacatccgcattgtataatgtcgaaagcctctccatagcaggaactggtctggttttcaagacttcaggagttacactaggatcgaaaacacgagcattcgggaaatccggataatacgaattcaagaacccttgatctcctccagtataagaagacaaagtcttcactttccgcatcatgtcattaaaaagagcttcagatggttcaacaaccatcacaccagagtttagcctctcagaatgcttcaagtttgcgcaaaacttagaacacttaaacagatcctcaatgttctttaccacaatagtatcagcatcaagatacacaactacacaaaaaaaaagacaaagcttttgagatttaagttctcaaaccggaatccaacgaaaaaaactgctgaaatctcctacctttcttataatcagtcatgttaaagatcttaagctttgtataaacaccccagaacctagtcggatgaacttgatttggatttgccagtaaactaatcttctctactttccatccatcagcctatagaatcaaaagcaaacaactttaaacaaagcagtatgtgatcaaatttaagctcaaactcaatcgaaaggagaactctttagatctttaaactactataactagacaataaaaaccaaaccttgagtaacttcttagagtagtctgagacaccatcagaaaccaaagcgaccatatccttagtggatccagtgtcacgaatcgatttacccaataccctaactcctaataagaactcatctccatacaaaagtgtgacataagctactttacttgattcagatccaaacgaaccatttaactgaattgaaacgagggcaaggagaagaacccagagactcgtcttgagtctcaccatagttattcggatctcaattttctcgaaaaccaaattcctaatttaaggaaagtatacgttgaattgaaataagattttgaattttcttcgttgtttgttctgtctgtgtctgaaacctcacctttgttccttgtcaccgccgtcgttttagaaaccgagaaagtttttataacctacgacgaagtctaccacaacatattctagatccttatgttaattattaaactacgtcgtttcctcgtttcgataagtaaaaaggcacatgttcactaatccaactttgatcacttaggaatctatctatctgtacctcacatggatttaagggcaatttgaatatatatatagagttaataacaggcttgtaagatcgaaatgattaatattgaatccaaaatttgtatacaatttccatatatatatatatacacacttatttacacatacacttagcaaaaagcttcactgaaacagaggagctctgttttcaacaaatttcatctccttcccaattatccttctcctttggtcctgtaggaccttcctcaccgtaaagctcaataggaaacagactctcaaaagaattcctcagaatcagtggaagtagatcaatgatcttattgatctcagctgctgaatcatatactatagttggtccccattctctcataaactgcagccagtacggttctgaaaccgctccttcgcctaaatactctgctgctacgattctgtacctttgactagaatccaccatatacttgcttttcgcaacatcgtttcttactccaatcccgagcttcgacgggccttgaagatacattcccgggtgtgggaaactagcgtgaccgtgtttggatgagtacacaaccggtttattgcttcctttgacaaactcaagatccgatacatcaacccatcctccaccactatgctgtgagaagaacatctgtgtaagatcgccgttgaagttgcttatccggaatgtgaaatgttcccaatcaccaacatgctctccaaggcggttcattggtaccgtgagaagcccgattttgagagtggctggaccattaaatggacagaatatccacattacaacgtccgtgaaaatcccgccaagcgcgggtttcacgtggacgtaaagctctgagctttctatatttcccttctttagattacttctaacttcttcatcttcagggagatcaatccagaagctcccatcgttttctccacccgcaggcaagttcgagccagctgagttaatcggttcgccttgagatttcccaaaccggtgcaacaaagctccgtttttaaagaaccatggcacagacgaaggcatgtaagtctcttcgggatggaagtagaccatcggtccataatggtgaataagtgcatggacctgatcaagatttggcataccttgtaggctcgggtcgagatttttcaaacacgcaatgttcatggcggctttattatcagaagacagatcattagtagagcaaacgaatgacccaacctccactccacgagaccaaatacctctctcgcaaggtttagtgctccaaacattaaaagatcctacaccaagaaccttctcaccggtttcacagctctctgtaagatcctctcgtacacatctcacttcatcaacttcaggctcctctgatccatcagtgacaataactcccacggctctataaccaacaggaggattaggtaaccagaagtagcaatctgaatctgaactccaaactaaagaataattcaaaggctttttcaaaggagggcgatgatcatccgctagatgaccgggcttgttagcccgagctgcaagaacaaagcctctcaatggctgattgtttggctggcagtaatgaccaaggcaatggaaaccttctggtatccccacaggtttgtaaaaagatgcgcatcttaatttaccacgcgaggtgccacatttccaaactctatcgaactcggtgactttcaccacttggatttctccaagacttatccttccagtagcaaaacctctgcctgaaacaaagacaaacaaccattagaaacaaagactaatcaacacgttatcatcatcaaccattactcaacattatccaaagggttgttgggaaacgataaagaattaaagaatcaaaactatgatagagtaattataccatatccattttcatcgtgctacattaataactctttctataaggtcatgcattattgctcacattattgaagctcaaaaaaacctaccttgtgtaagtcagtaactaatttttcttaaggtcaattaaaatgttgttagtccaaaaactttgaccacagaacaaaaatcatgaaacaaatgtcaaaacaatgaactagtaaaacagacaacaacaggtgccaatgttgaatattccaacgaattttattcagaaaaggaaaactcaaaaagtaaaattattatccataacattgaatatcaattcatgatgatatggaaacattaaacatcaatttgatctttaatgtaatgtatagaaatcatgaaaatatccaaaattagaaataaaaatagataactgtttgacaacaaaaaaatctgcaagttgatttgtaaataattgcaatttccaagaaaagatgatggtactactgtaccttgtggccattgaggaagaggagatggaagcgagaagggctttgactcggacgattccgattccaactcggagaaacctttattccagtagaagcaatcgcaaaacatcgttttgatttcgagactaagattatcaggagcaaatcggcgacttctttctccggagactcaaggaaactcacagttcctatcagatcggagcttctctctacttctcagagcttcaaggcgatgagagaaaaagaaaagagatgatagagagagagagagagaaggtgtggtacttgcgtgtgagggaagttcaattcaatggtggtgtgcctttggagtttggagtttggccctttttatttgttttctgtgctttttattccctttttcagattttgtccctttctttcaacgttttctattaagacccctgtatttacaaataattcaaatttcaccccaacaaaaccaaatgtcaaaaaatttctcgtttctttcaaaaggaaattatcttgaaataataaacattggttttgataatgtcagtttacgagaattttatgcacgtctttcagaattttttaataagaaattgtagtatgtttttaacgttttgggattatacataagtttttgtaattcttctgtttgtttgcttatccgcaaagaagaataatgcttacaagttttatcatagtgcgggttggattgtatttaatgcacacttttcatattattttttctgtcttaatgtgttttggaaagttccactactgtttttctatacgcaagaaaactccgactaatttcagacatattaaataccagatatttcttatttaaacataaaatagctaaaacaattctctattctctaagattaaggttttgtatactacttttcatgtttagcaaagggatttagctagtatattagtcatagtgtcataccctatgtgttttttgtatcaatgttactctataccattttttaaaaacgtactaatagtctaaaacacatcattaggttgtttaccgtttccaacatgttaacaacttaacataaaagaaatttccgtaagttttattatactttcataatagtattattagaggtagtagtactcatgaaataaataaataaatctaatgatgatattgatttcagagaaactatctagtaatagaccgttaatctttccaggggctaattaatcaaacaagtgaaattagcatcaacttgataattttacgttatctgaaacataaagtcattttcatcggtttgtcatggagatgattattttaaagaattcttcaaaacgaaccaagccgcctaactagactgtggacattctcttctttttgaacttgggctttatgaatttgattatatcagctaaacttgggatatatcaaaattatgtctcagctgcttaaaattaaattaacactcgtactttcacatgcattaaaaattatgtctttctttccttacaaacatttgctgataatgatatatatatatatatatataaatgtctttctttatttatttttgtctatctatttatcgaaaaacttcaatgagattatttacttgcataaacaaagttttgagagaaaaccaaacatcagaatagtgaaacaaatggcattaatttgacatttatttataataaaacagacccaaaacaaacatatgttcaacaatttcatttaagaccaaaagtaaaagagttgtgtatttagtcaacgagatttagtttgacattcccattagttacacactctgtcagttacaacaagattaaaactttttaggttagtcttcttcttcactctttttatccattcctcacaaaaccaaaaaagtcttcacctttgcaccaaaaaaaaaaaaaaagtcttgacattgtttcgtcggtcgtcacttttgctagctaataaaagccagaataaataattggattaaatcttttttttcttttcttactgtttattattggaacacagctacaaggagggtaaagcttcaatctttcccactcacattcattttctctggtctttgattgcttttcttttcactgcttaggttctttgtctgttaggtttagagagatcctttccaaagatccaaagctggaaactttctagtcaatgctgcttaagatctgactttttcccttcaatgtcgctctgaaatcccctaaatttttgggcccatcaggttggttcttctctcacttatgaaccctagtttctaattgtaagttcaattcttgaatttctctagactctgttttttgggtgtttatcagacaatgcgacggatttttgtgtgttctgaatagtttctattgtcggtagatattttttagttttcttcagctgtagttttctttccagcgtagtgtttagctggcgtttggtctgagaactgaatattctggcagctggcaattcttgggacttaggtacaaatacaatgttggttttgttgaatctgatttttcttagtccttttttgttcaatttcttgtctttttgcttgttcctttccaattttgacttcttaagagagaggctatgtgcattttctttatgggtttggttagatttctatgtttgagtagctcaaatctaatatttggtataagctttgtgtttctggtttgttttgattactttgattcaggtcttgaaatgattcttctcgaacttctttttttcttgtttaagcagcaaaagttatggtttatacaagagttttgagtttaaaattctctgccttttcaggtgaataaagcggaggtcagaagatgggttctggtttaaatgacacattatctcggaactacaatggtttggagctatgggagataatagtgattgttctctccgcgatattcgttgtagttttagctatatcgctatggcttactttcagaagaaaaacctctagatcttcttctaatctaatccctgttagtcgccagattcctcctagtgttcctgaagagattaaagagattagagtcgacgaggtttcttcaagcaatggtgggaatggatacccctctattagtgagaaatttggcgataaagaacccgaaaaagggataaaagcagagtcagaaaatggcgatagtagccggtcaggctcgtttaatcacttggagaaaaaagacggatcgagcgtatcttctgctaatcctttgacagctccatctcctttgtctggtcttcctgagttttctcaccttggatggggacattggttcactcttagagatcttcagatggctactaatcagttttcaagggataatatcatcggtgatggtggatatggagttgtttaccgcggtaaccttgttaatggtactcctgttgctgttaaaaagttgctcaacaatttgtaagttttttttcacaaatggtgaatcaagattcaagatttcatttcttgaatccttttttcttttaatggtgatgtttttgtatttcttagaggacaagctgataaagacttcagagttgaagttgaagctataggtcacgttcgacataaaaacttggtccgccttctcggatattgtatggaaggaacgcagaggtatgtatgttctgttgttgaatgatctgcagtttttcttctgaattttcactaaacatcaaatgcggtaacacttaattaggatgctggtgtatgagtatgttaacaatggaaatttggagcaatggctccgtggagacaatcaaaatcatgagtatcttacatgggaggcacgagtgaaaattcttattgggacagccaaagcgtaagtcttgtggcagctatatgattttgttttcttgattgtgttttttctttattctcatctgaggcgatgggtggtgacgcaggctcgcgtaccttcacgaggcgattgagccaaaagtggtgcacagagacattaagtctagtaacattctgattgatgacaaattcaattctaaaatttctgactttggacttgctaaactacttggtgctgataagagttttataactactagagttatgggtaccttcgggtaagtacttgcatctctctctttatatcatttgacataatacttttgaagactaaaatattgttggtcttggaaaataactaaccttttttgtttttggcagttacgtagctccagagtatgcgaattccggtcttctgaatgagaaaagcgatgtctacagcttcggggttgtactcttggaagctataactggtagatatccggtagactatgctcgtccaccacccgaggtaaaaaatttcgtaagaacctgcacaaacacataaactctgctgcctcaagagagtcttctgacatttcttctttttcattttgtaggtacatttggtggagtggctgaagatgatggtccaacaaagacgatcagaagaagtggttgatccaaaccttgaaacaaaaccatctacaagtgctttgaaaagaacactattgactgctttgagatgtgttgatccaatgtctgagaaaagaccgaggatgagccaagttgcacgtatgcttgaatccgaagaatacccaattgctagagaggtatgaataaggaaaaagatcacaactttggaaactgcttcttatgtctttaaaccaaatatactttttgttgagtttggtgctgaagcttttttaccaattttgaggatttcaggataggagaagacgaaggagtcagaacgggacaacaagagattcagatcctccgaggaacagcacagacactgacaagagtgagtaccatgacctaaagcctgaaggtggatagccattggaaataatggaggtgtaaattgtcgtaaagtctcgagctttatgggaagtttcaagtccttagttcttctccagatcttctgcgttatttgatgtttcttttcttttgtaataaggagagagagagagagtgaatgagttagtgagtgttcatcgttcgtttgttgcttgtatagtatttgtttgttgtattatcgtttgcttctccacgttttgcaatgtaggttgtttttggactaagtaaacgctatttgcaggttttgtagggtatgtaagtctttgagagaaacgacgtgtaatttgcaatttgcttgtggaagatattgttatttgagagagactaacacaggtctttgaagctcaccaacttaactctaataattgactacacaaaagttgaacaattctctccagagtgtgacactgtcgttttgtttccattgagatactcttaaaaaatttcagatcaaatggcattaactaaactagctaagcagaaaaaccatttttggtctggtttcctctggttttccattttctaatctctgccaaactcttctccatcttactaagacgtgtctccagctccagtgccatcttctctattgcaagcgttctctgcctcaatctttcatcaacatcttcttcctttttaacttcactgcaaaactttccaatgcatctcctctcaatttctctatcttcaagtagccaagaatctgcctccttgattccatcattgattattgccttcttctctgcatcacttccatttacatcatcacatgtttgccttgtaatctctgtttttttggtagttccatcatcctctacacttctttgctctactttcattaaagcatgcttttgacaaggccctgaatcatcatcgctatccaccagcatatatcttctacttctttttccaagtgattcagaagcatcacctccagttttcttgtctacatcactaaagtacttattcctagatctgatcaattgagcaacggtcatgcagtcatcttctttatccgtagaaatctcagcatcagcctcacgagctcgcttcatgtgaacatcagactcagttatcttatatctctttgctgatctatgcatcctcgatattctgcgttttgcagtaaagccttcttccaacttctgaactacttgactcaaaggaggtaccttggtagatacatcaatatcaccatcatcatcatctttatcaagatgatcaaatgtattccttgcatcaaaagcttcagtcgattctttctgtatctcttcagaaccaaaatattctgaagctgatttaaaccaccagtcttggtacctggcagtgacataacctcgatcaagttgagaaggcaagtagagatttaaaccctcaagagaattactgtaatcatcccaagcatccttttctgtgatttttctacgacgagtaaccaaaccaggaagatcttgagacaaaccgaactgcctcgccactcgataagggaagtaatcttcaacaaaaccatttccagcaaggtatgaaactttcacacatcgagcaaaagaagcaaatgcatcatcaacactgtcatcaacagtcagccacatagcttcatcaacgtaaaaccgaagtgggttccagttcttcaacggtttagtgtaaggacgccactcgaaaacatcaaaactcagtttcacattcttagatatttgttgcagaccatcccactgagctattctaggttcacctttaggtatctctttagcttttggtcttatgttactgaatctctcccaagtccaaacttggactaacttaaacagagacttcaaattaactttgccagcacattttcctctagagaaatcacagattcgatccaaatctttgtacaggaatgcgagaacagcaggcgcaagagcaattctttcacctctagctaaacgaacagctatagggattacgtttgtcgatatagaacgacaaaatttacctggaaaaacaaaaagtgaaagccacaatacaagaaaagcttcatgctccatctgaccacctctacccatgaagctcgaagtccatgatctttggctcactcgcttagccttgccaagactgtctcgtcttactttttcaagtttctctgcggaatctctcatctctgaacattctaaaggagaaaaaacgggagaacccaaaacagagaaccctagaagcaccatcacatcctctaacgtaattgttgcttcaccccatggaaagatgaaagatttggtttcagaacaccatttctcggcaatggagagaatcgaggacgtgtcttttatgattttgtaagtggatgccttgattgcttcaaaaattccagcttttttccaaatgggttcatacaaagcttgcatttttccaagccatgataggaagaaatgatgatctgcagcccaaaacccagaagaggtattatgcagagaagaatcagagagacgttgttgatcatcaagacggggaagctcggctacagagccatcgatggaggtagaaaagggttttagaaaatgggtttttctcaagcaacgaccttcctcacaaaggcaaaccatgacttcttctctctcttcagtgagtgacgatggtgatgctttctacatctctcaagacgaaggagaagaagcaaaaactttttgaccggtcaatcaattgcgaaggaaagatgcaacttttggttgaagatgaacagagaaaaatgttgccaaccgttgctttatatggcaaacaagcaaaatattctctccaaaatgttttaagaattttgtcagatagattaagaactaaaaccaaatttatgatccacctccacatttaaccaatactaaaacaaactatataatataaaaaatttacaacaaatacgaaataattaattttgcattgaaaattgaaaacatttttaactattatttaatataatacagatgtaatgctcttacttttaaaatttaatttatgtttcacctcaacattcaaccaatggtaaaataaactgttgaatacgaatgatgacaaaatattaaaaaaaaaatgggaatagaattctacgactatgatttttactcataaaatcccgttgctaatatcttaaacttaaatagtaaaaaaaaagtcacattcaatactttgaccatccaaaatgtagagttttggacgttcctcgaattagaggctgaaatattccttgaatctggttttgcaacccaaagaaaattacgggtcctggatgaaactatgttaaaaacaaaaaaaaacaaaaagaattccacataaaattagtcccaagttctgcttattatctctggttatcgacatgaattttcttggttttagactgaagacttttacaagatgtaatttatcaacaaaaataattccaaaaacgaggttactataatatcattaacaaacaaaagaaagagattactagaatatgtatagctaaatttgtttattatctaaaatgtaaatggctaaatgtgttattacaatcaaaattttgttttctaatgttgtattattggtcgaaattaaattccataatcaaaggatataaaaatgcatagattcagatctgataactgaaaggagagtgagtatataaaaactcgtcaaacaaaacttccccgacggttagttattcaatcctcctcttacacgtctctctctcattccccccggagtaactaacaatggcgaaaatgcccctctccgtcgtcgtcttcctcctcttctccgccgctttcctcgccgtatctatggcggagatcaaatcactcgtcatctccgatgacgctcgtccgatgatcctcttcgagaaattcggattcacacacaccggccacgtcacggtctcaatctcctccgtctccgtcgtgtccacttcctcagatccgaatccagaagcatcgcgtctcggattcttcctcctctccgaagaatctcttctccaggtcctcctcgagatccaacagaaccctagattctgcgttctagattcgcactacgtcactcatctcttcacattcagagatctatctcctcctccaaactccagattcaaccaatcttacccagtcacttccccaaacgaatactctctcttcttcgcgaattgtgtccctgaaaccaaagtttccatggcggttcgtacagagatgtataacaaagatccaaacggatctaaagactatttaccagctggatctactcaattaccaactctctactctttcttcttcctctgctacgttgctttcctcggtttctggagctacacttgctggactaacaaacaaaccgttcatcggatccatcttctcatggcaggtcttcttcttatcaaatcgttgaatctcatctgtgcagctgaagataaacattacgtgaagatcactggaacgccacatggctgggatattctcttctacatcttccaattcatccgtgttgttcttctcttcaccgtcatcatcttgatcggaactggctggtcgtttttgaaacctttcttgcaggagaaggagaagaatgtgttgatcattgtgatcccacttcaggtattagccaacattgcttccattgtcattggtgaaactggaccttttatcaaagattgggttacatggaaccaagtgtttttgcttgtggatatcatctgttgctgtgctattatcttcccgattgtttggtcgattcgatctttgagagaaacctcgaaaaccgatggtaaagctgcgaggaacttgtcgaagctcacgttgtttagacagttctacattgttgtcatcggatatctttacttcacgagaatcgtggtgtttgcgcttaaaaccattgcggcttataagtaccagtgggtgagctttgcagctgaggagattgtgagtttggtgttctatgtgatcatgtttcatatgtttaggcctgaggagaagaatgagtactttgctgttgatgatgatgaagaagaagctgctgctttggcccttagggacgaagagtttgagctttgaaaagcatacaatggaggatttttcttggtaagcaaggatttattctttttctcagtatgtctatgtttaaagtcgtctaatactgcaactgttattgttccctttttgttaaattttgttctttacatttaaattttctctgttatcaacaccttttatggctttatatcaatgtggattttggggctgtagcaaattttatttgaaaagattatactatcatcattatgtgcttcacaatttgtcaacatttgtgctcatcccaaagcatatttactgaaactaagaaacactatttcaccatctgcatccacaattcagataaatagaccgactatagcaaaatgaaaagtggtttaacaaacgaaaagaaaataaaaatacatcaatcattgcccattactcattagccgattaacaaatcattcctctttgtctccattacaatcatatcagtgatcgtgcttggcactatccaatatccatattccaaacacacaaaatttaaagacagaagttacacaagaggccgtaatttttttgtaagaacacaattttatgatatatagtttgtataatatttcaacaacagattctcaagtgaccatcatgtgctccaacgatgaacaatctcgaaaatggtaaaacacaaatggtcgataaatccgactttactcttcctcccttctctgccatatacagtttctgtggtataatccgctgctgctgttgctcctcctgtcaagagaaaaaccggacattctcacatactagatcttgttttcacgaagattatgtgcataaactgactgaaagaactgatctaattctaatcttggtttaggcttatagccaaagtgatcaaggcgtgtatgttttaactcatcacgtgaatgagtgagaaactacctcatcttgagactttgccagtgagaaaatcccgatgttgtttcttgagatggagataacgtccttgccccagatggagaaaccggaaacaccgtcattgtgtcctttgacaacaaaaggctgtggtgtccagctcctgttttaccagaaagataataaaccacatgtagggaacaagaacaaaaacttacaagaaaaggaaaaaccgtaatgattgtttttgctcacttccttaagtcccagatccgtaaagttttgtcaagagagctggaaacaagtaaatgactctcaggtgccactaactgcaagaaaatcaaaatttgaagataagaagaaaggccatattggttttgggaggacaaaaaagcttaattcacctttgtcacgtatccgtcgtgagctctccaggaggaaataaaaccattttccctcaagtcaaatagcctacactggccagaactaaaaccagctgcaatccaagaaggtgatactgaagctccgtctccatgttttgtttgagaccctcctgaacaaagagcagatacgagagaagtgaatccagattcaatagcttctcctccccaaagttcaagcttctggcctcgtgctagatcgataaacctgaattgtgcagtggaattgagcaaaaattgttgcatattatctctaatgctcaattagtttgattttttagtgtagtggatactattttacctgagggcaccaaatccggttccaacaatgagctgatccatgtattctaaataatgcatacatgtatacaagttctcatcgaatatcccacttgataatccatgtgacgcatgtctattacacggattggaattattctttgaggacggatctgatgaagcttgatcttgatccgaaggtgactcggagaacaaagatattagtttcccggtttggctattccacacatgtatagttccgtcgcaagatgctacctttccggtggatgacagaataccgatgtcattaacaacctaaaatatacaagaaataattaggtgcatacttcctattttatgggtaagagaataattatgtgtttgccgccgtaagaaagctataataatacaaggaaccaacctcttcatgggcatgataactagatacacaacttaagcttgctagttcccacttctgaacacttcccttaaaccctggatcaattcctgaagtgaaaactgtacactcatcttcagaaaccactaaagatcttagagctccatgatgggcccgcgcagaagacaaaacagatgctctaattttccatcgattctcatctttggggtttccaaaacgcccaatgtcaagcccatcccaacaagttactggactaggaaaccatgaccagggttcatgcaccaaagggtttagaactgcttcttgtccttcaactgggacatgtatatgaagttttaagtgattggaatttcttaacccctgcgactggggaaccgaccgtccagatccattaagcaacaccttaggagtgtgcttagatgcagggccctgttttaatacaggccttgcttccatattgtatcgagaagatcgtccggtgtattcccactgaattacaatagattcagtgataaatgtccatagctcaatggaattttatatattagatattgtggcaacagtatcccagaattc

SEQ ID NO: 1445 - DNA, 75593 bp, Arabidopsis thaliana
aagcttatgagacttgttatgttacaagcagagaccaaagactattcataatcacttatcagagtataaaatactctttttttgtcaatcgagtataaaatactctgatatcacttatacaaagttctacgaaactcattaaagatttgagagtgtacaagggacaaaaggtgctataaatatctcttaaaagagagctaaaagttaaggaaacacttaaccaagcaaacaacaaatggctctttcaatcgttcttcttcccttcattctcattctcataccgacttttctcagttcggttttcgccgtttcaccactcaaaactgatacgttaaaaccggggcagcagctcagagactgggagcagttgatctctgcggatggtatcttcactctcggattctttacacctaaagactcatctacttccgaactcgggtcagctggtcttagatatcttggtatttggcctcaaagtattccaataaatctagtttgggtgggtaacccaaccgaatcagtttctgattcatctggttctctatccattgacaccaatggggttctaaagataacacaggcaaacgctattccaatcttggtgaaccaaagaccagccgcgcagctttcattggtcgggaatgtgtctgccattttactcgataccgggaactttgtggtccgagagatcaggccaggaggagttccgggtcgtgttctatggcaaagctttgaccatcccacaaacacattacttcccgggatgaagattgggtttaacctaagaaccaagaaagaagtatcagttacgtcttggataactgaccaagtcccagtcccaggagcattcagactaggactagacccatcaggagctaaccagttactcgtctggcgccgcggggaaatctactggtccagtggaatcttgacgaacaatggaagctctcatttgaacttagaagtatccagacactacattgattatgaattcaagttcgattcaaataagtacatgaagtacttcagctactcaatcaagaaagctaatagttcggtcttttccagctggttcttggatactctaggccaaatcactgtaaccttttctctcagcagtaacaatagcagcacctggatttccgaaagcagtgaaccctgcaagacggatttaaagaacagttcagcaatctgcatcacggagaagccaacggcttgtaggaaagggtcagagtatttcgaacccagaagaggatacatgatggaaaataataccggttattatccattttactatgacgatagtttgagcgctggtcttagcgactgtcatggaacctgctggagaaactgttcttgcatagctttccaagcctttcctgatggatgccaatattgggaaaaaggatcaaagtttgttccttatgatagcttcaactccaatttagtaacttatgttcttgattctgtaaagtgatgtgtggttgtaacttgaacgagcaattatgtaaccagactagtatcagtaaaggggtttattaagaaactaaagaatcaagcagttcaaagacatgcaccaacttcctctctttacaaattgattcaaccacagctccccaagatttgggccctggtatgagacctatcctcagaaatccaataagaacccgaaccccgatttctgtatacccggattcgcaaagccgaaccaccaattcattccaagtagcatggtgaggccaaatccctctctcagacatcacactcagaaacttcaccgctttctcgagctcaccattacaacacaacgcgttcaatatgatcctataactacctttgttcagatgaactccttcagatccccattgatccagcatctgaagagcttcctctgatcttccttcgctggacaagcccctgagtattacattataagttaatgtatcagctctgcatctggatgctttcatctctccaagtagtttcatagcctcatcagtttcaccatttctacaaaagcagttcatcaatgtggtataaccaacagtgtcgagtttcaaccccgttttcttcacctcgtcaaaagtttgtttagcttcctgaatctttcccactttacaaaacccattcattagagctgagtaattgtacacatttgggttgcacccattcttcttcatgaagtctaaaatcttcttggctctctcaacttcccctgcacgacagaatccgttgatcataacattgaaagtcacagggtctggcgaaatcccttctttcgagatcatatcctcgaacaattccaccgcttctttcgatctcgagtgtgcaaacagacagtccataagggttgagtaagtgatcgaattgggatacgaaatcccagaccttttcatctcctccacaactagaaacgcaaaattgatatccccattcttgcagtggtgcttcactagaatattgaaaatgcaagtatttggctgcaatccaagattgtgtttggcatacaagagtagtttccgggacaaattaacctcccctgaatcaataaggagattcaaacaagtactaatggcattgagagaaggcttgacacgagcaatcacttgaatcaagttaaacatctccataactttatcatgcaaatcagacctggagaaatgtctcatcaggttaagaaacaaactttcttggaacctgcaagtctcatacttcatctgatgaagaatggcatcaacagctagaaacttcttgtgcctaacgagattatctaaaagaacagagtatgtagcattgttatggttaaaacctttctgctgagaagctttgttgaagatatcaagcacaccctgaggatctctctctcgtttcatcaaactgacagcagattcgtgagagataaacttggttttggggtttgtttccacaggtgagatagaggattctggtggtgggcttggtttcttcttcttctccgagaagcaaatgggagatacccatgatcgtgaagacgatgagaaccggcgatgttcattgattatcgaagttgtgaagcgcattgtatctcctctgtaatcaagagaagaagacagtaaaattaggttaagaagagtaaagctacttcctttaaacttaaagcaatccattggcattcaattgaacatgaagaatcagatattcgatattaccttattggattgacggcaccaccgtaaggagtgataagttctatggtggattaaagttgtgatttttaatgggttttctcagaaatcgaaacagagcaaaactgcgaaatcaataaactcatcggagaggttgagtgaagacgatggtggaaatccggttcggttaattcaaaattaaatcccggtccgtacggtttggattacaaatggttaaacccacggtttggtttaaaaatgtgtctcttctggttcttgttgaattctgataggatcttgtgttgttgttatgagacataatgacaaagaaagaacaaaggtgtaaccatttcaagacagaattataggctctgttgtttctgaaagttacaatggtgattggtgacacttttacatattttgttgtcaacagaggaaacatagggaatttgatctcgtcgtgtcacgacggtcttctagacctttcaagaaccatctcaccgcgaggtgctctgaagcataagtcatgaaggcagctagaattatggctagacccaccattagacccaacctgttcaatatgtgataaaccagcaactataaggacaagaatgtgttgaatcaataacaagaacctttctttcacgagttgattaagaaaatttacctcgtgaataaagcagtgatccccaaaatgtaaggtaaagaaactgcagcaatagccagaaaagccatccctaatccataatacaatgtagtaacgtcacaagacccacctgctcgctgatgaactattgagacaagaaaaatggtcttagttcccaactttgtagagaatggtacgattaccgattatcacaatttgttgttttcttctcatgtccataccttttgcggaatcatccaaggaagatgattctgattgtatcgctattctctttccatgttgatgcacaaaaagcaagaagacaccaaacaaaagaaagaagattgtaaaagtccattcatacaccaagaccaagccagtccatggcatgatttgcctaggcacaatcgcaaaggaaattccaagagataacagaacagcagtaaaacagacgacaactgaaactgcgcctaagtgttgaggaaccttggactgtgcgttgccactgtggggctgcagacagaagcaatagtaacattgttcagattagatcaaaaaaatttaaaagttaaccataacgatttgatgtagaaactcacttgatagctgggactcatggtagatacaccgccataaccaagtgttccattagatctaactttgtaataaagatatctaatctgattgctgaacgagctccagcacaatgaaccctcacggccctgcgagaaatcagaaaacataaaatcaaattacaatccaagaacgatgaatgtagtcgaggtgaaggtaccaaagaagtcttaacctgaatggatcggtaaatgcagaacaaaagtgcacaaagaggtaacaagaaaaggaacttgacgacgagttcatcatgttggttactaccacctccagttccaggaagagtttcctcaagctttaccctaatgctctgcaattgttcacggtgaaatcagacttagagaaattcactcaatagaaacctaaaaatcatagtgaagaagaagacctacatgccaagcatcaacaggtttcacgagccatgctgtccaccagtcccaaggcttaagagggcctagagtgtagtgaatgacgtgaagtttactgtcatcaaccatccactgcagaaataatgagaaaacacaaagattcaaacagctgaagaaaaagacagttatacttttaaaccaatcaaaaccaatcccaaattaaccactacgtattccaagatcacttcgacttcatagaaagccatagactttaacagcaaaaatgaaaaacagaaccaaatagacaccacgagactaactacaactttgtttcctaactaaataccttattagcaagcatataaagaccaacatccgcattgtataatgtcgaaagcctctccatagcaggaactggtctggttttcaagacttcaggagttacactaggatcgaaaacacgagcattcgggaaatccggataatacgaattcaagaacccttgatctcctccagtataagaagacaaagtcttcactttccgcatcatgtcattaaaaagagcttcagatggttcaacaaccatcacaccagagtttagcctctcagaatgcttcaagtttgcgcaaaacttagaacacttaaacagatcctcaatgttctttaccacaatagtatcagcatcaagatacacaactacacaaaaaaaaagacaaagcttttgagatttaagttctcaaaccggaatccaacgaaaaaaactgctgaaatctcctacctttcttataatcagtcatgttaaagatcttaagctttgtataaacaccccagaacctagtcggatgaacttgatttggatttgccagtaaactaatcttctctactttccatccatcagcctatagaatcaaaagcaaacaactttaaacaaagcagtatgtgatcaaatttaagctcaaactcaatcgaaaggagaactctttagatctttaaactactataactagacaataaaaaccaaaccttgagtaacttcttagagtagtctgagacaccatcagaaaccaaagcgaccatatccttagtggatccagtgtcacgaatcgatttacccaataccctaactcctaataagaactcatctccatacaaaagtgtgacataagctactttacttgattcagatccaaacgaaccatttaactgaattgaaacgagggcaaggagaagaacccagagactcgtcttgagtctcaccatagttattcggatctcaattttctcgaaaaccaaattcctaatttaaggaaagtatacgttgaattgaaataagattttgaattttcttcgttgtttgttctgtctgtgtctgaaacctcacctttgttccttgtcaccgccgtcgttttagaaaccgagaaagtttttataacctacgacgaagtctaccacaacatattctagatccttatgttaattattaaactacgtcgtttcctcgtttcgataagtaaaaaggcacatgttcactaatccaactttgatcacttaggaatctatctatctgtacctcacatggatttaagggcaatttgaatatatatatagagttaataacaggcttgtaagatcgaaatgattaatattgaatccaaaatttgtatacaatttccatatatatatatatacacacttatttacacatacacttagcaaaaagcttcactgaaacagaggagctctgttttcaacaaatttcatctccttcccaattatccttctcctttggtcctgtaggaccttcctcaccgtaaagctcaataggaaacagactctcaaaagaattcctcagaatcagtggaagtagatcaatgatcttattgatctcagctgctgaatcatatactatagttggtccccattctctcataaactgcagccagtacggttctgaaaccgctccttcgcctaaatactctgctgctacgattctgtacctttgactagaatccaccatatacttgcttttcgcaacatcgtttcttactccaatcccgagcttcgacgggccttgaagatacattcccgggtgtgggaaactagcgtgaccgtgtttggatgagtacacaaccggtttattgcttcctttgacaaactcaagatccgatacatcaacccatcctccaccactatgctgtgagaagaacatctgtgtaagatcgccgttgaagttgcttatccggaatgtgaaatgttcccaatcaccaacatgctctccaaggcggttcattggtaccgtgagaagcccgattttgagagtggctggaccattaaatggacagaatatccacattacaacgtccgtgaaaatcccgccaagcgcgggtttcacgtggacgtaaagctctgagctttctatatttcccttctttagattacttctaacttcttcatcttcagggagatcaatccagaagctcccatcgttttctccacccgcaggcaagttcgagccagctgagttaatcggttcgccttgagatttcccaaaccggtgcaacaaagctccgtttttaaagaaccatggcacagacgaaggcatgtaagtctcttcgggatggaagtagaccatcggtccataatggtgaataagtgcatggacctgatcaagatttggcataccttgtaggctcgggtcgagatttttcaaacacgcaatgttcatggcggctttattatcagaagacagatcattagtagagcaaacgaatgacccaacctccactccacgagaccaaatacctctctcgcaaggtttagtgctccaaacattaaaagatcctacaccaagaaccttctcaccggtttcacagctctctgtaagatcctctcgtacacatctcacttcatcaacttcaggctcctctgatccatcagtgacaataactcccacggctctataaccaacaggaggattaggtaaccagaagtagcaatctgaatctgaactccaaactaaagaataattcaaaggctttttcaaaggagggcgatgatcatccgctagatgaccgggcttgttagcccgagctgcaagaacaaagcctctcaatggctgattgtttggctggcagtaatgaccaaggcaatggaaaccttctggtatccccacaggtttgtaaaaagatgcgcatcttaatttaccacgcgaggtgccacatttccaaactctatcgaactcggtgactttcaccacttggatttctccaagacttatccttccagtagcaaaacctctgcctgaaacaaagacaaacaaccattagaaacaaagactaatcaacacgttatcatcatcaaccattactcaacattatccaaagggttgttgggaaacgataaagaattaaagaatcaaaactatgatagagtaattataccatatccattttcatcgtgctacattaataactctttctataaggtcatgcattattgctcacattattgaagctcaaaaaaacctaccttgtgtaagtcagtaactaatttttcttaaggtcaattaaaatgttgttagtccaaaaactttgaccacagaacaaaaatcatgaaacaaatgtcaaaacaatgaactagtaaaacagacaacaacaggtgccaatgttgaatattccaacgaattttattcagaaaaggaaaactcaaaaagtaaaattattatccataacattgaatatcaattcatgatgatatggaaacattaaacatcaatttgatctttaatgtaatgtatagaaatcatgaaaatatccaaaattagaaataaaaatagataactgtttgacaacaaaaaaatctgcaagttgatttgtaaataattgcaatttccaagaaaagatgatggtactactgtaccttgtggccattgaggaagaggagatggaagcgagaagggctttgactcggacgattccgattccaactcggagaaacctttattccagtagaagcaatcgcaaaacatcgttttgatttcgagactaagattatcaggagcaaatcggcgacttctttctccggagactcaaggaaactcacagttcctatcagatcggagcttctctctacttctcagagcttcaaggcgatgagagaaaaagaaaagagatgatagagagagagagagagaaggtgtggtacttgcgtgtgagggaagttcaattcaatggtggtgtgcctttggagtttggagtttggccctttttatttgttttctgtgctttttattccctttttcagattttgtccctttctttcaacgttttctattaagacccctgtatttacaaataattcaaatttcaccccaacaaaaccaaatgtcaaaaaatttctcgtttctttcaaaaggaaattatcttgaaataataaacattggttttgataatgtcagtttacgagaattttatgcacgtctttcagaattttttaataagaaattgtagtatgtttttaacgttttgggattatacataagtttttgtaattcttctgtttgtttgcttatccgcaaagaagaataatgcttacaagttttatcatagtgcgggttggattgtatttaatgcacacttttcatattattttttctgtcttaatgtgttttggaaagttccactactgtttttctatacgcaagaaaactccgactaatttcagacatattaaataccagatatttcttatttaaacataaaatagctaaaacaattctctattctctaagattaaggttttgtatactacttttcatgtttagcaaagggatttagctagtatattagtcatagtgtcataccctatgtgttttttgtatcaatgttactctataccattttttaaaaacgtactaatagtctaaaacacatcattaggttgtttaccgtttccaacatgttaacaacttaacataaaagaaatttccgtaagttttattatactttcataatagtattattagaggtagtagtactcatgaaataaataaataaatctaatgatgatattgatttcagagaaactatctagtaatagaccgttaatctttccaggggctaattaatcaaacaagtgaaattagcatcaacttgataattttacgttatctgaaacataaagtcattttcatcggtttgtcatggagatgattattttaaagaattcttcaaaacgaaccaagccgcctaactagactgtggacattctcttctttttgaacttgggctttatgaatttgattatatcagctaaacttgggatatatcaaaattatgtctcagctgcttaaaattaaattaacactcgtactttcacatgcattaaaaattatgtctttctttccttacaaacatttgctgataatgatatatatatatatatatataaatgtctttctttatttatttttgtctatctatttatcgaaaaacttcaatgagattatttacttgcataaacaaagttttgagagaaaaccaaacatcagaatagtgaaacaaatggcattaatttgacatttatttataataaaacagacccaaaacaaacatatgttcaacaatttcatttaagaccaaaagtaaaagagttgtgtatttagtcaacgagatttagtttgacattcccattagttacacactctgtcagttacaacaagattaaaactttttaggttagtcttcttcttcactctttttatccattcctcacaaaaccaaaaaagtcttcacctttgcaccaaaaaaaaaaaaaaagtcttgacattgtttcgtcggtcgtcacttttgctagctaataaaagccagaataaataattggattaaatcttttttttcttttcttactgtttattattggaacacagctacaaggagggtaaagcttcaatctttcccactcacattcattttctctggtctttgattgcttttcttttcactgcttaggttctttgtctgttaggtttagagagatcctttccaaagatccaaagctggaaactttctagtcaatgctgcttaagatctgactttttcccttcaatgtcgctctgaaatcccctaaatttttgggcccatcaggttggttcttctctcacttatgaaccctagtttctaattgtaagttcaattcttgaatttctctagactctgttttttgggtgtttatcagacaatgcgacggatttttgtgtgttctgaatagtttctattgtcggtagatattttttagttttcttcagctgtagttttctttccagcgtagtgtttagctggcgtttggtctgagaactgaatattctggcagctggcaattcttgggacttaggtacaaatacaatgttggttttgttgaatctgatttttcttagtccttttttgttcaatttcttgtctttttgcttgttcctttccaattttgacttcttaagagagaggctatgtgcattttctttatgggtttggttagatttctatgtttgagtagctcaaatctaatatttggtataagctttgtgtttctggtttgttttgattactttgattcaggtcttgaaatgattcttctcgaacttctttttttcttgtttaagcagcaaaagttatggtttatacaagagttttgagtttaaaattctctgccttttcaggtgaataaagcggaggtcagaagatgggttctggtttaaatgacacattatctcggaactacaatggtttggagctatgggagataatagtgattgttctctccgcgatattcgttgtagttttagctatatcgctatggcttactttcagaagaaaaacctctagatcttcttctaatctaatccctgttagtcgccagattcctcctagtgttcctgaagagattaaagagattagagtcgacgaggtttcttcaagcaatggtgggaatggatacccctctattagtgagaaatttggcgataaagaacccgaaaaagggataaaagcagagtcagaaaatggcgatagtagccggtcaggctcgtttaatcacttggagaaaaaagacggatcgagcgtatcttctgctaatcctttgacagctccatctcctttgtctggtcttcctgagttttctcaccttggatggggacattggttcactcttagagatcttcagatggctactaatcagttttcaagggataatatcatcggtgatggtggatatggagttgtttaccgcggtaaccttgttaatggtactcctgttgctgttaaaaagttgctcaacaatttgtaagttttttttcacaaatggtgaatcaagattcaagatttcatttcttgaatccttttttcttttaatggtgatgtttttgtatttcttagaggacaagctgataaagacttcagagttgaagttgaagctataggtcacgttcgacataaaaacttggtccgccttctcggatattgtatggaaggaacgcagaggtatgtatgttctgttgttgaatgatctgcagtttttcttctgaattttcactaaacatcaaatgcggtaacacttaattaggatgctggtgtatgagtatgttaacaatggaaatttggagcaatggctccgtggagacaatcaaaatcatgagtatcttacatgggaggcacgagtgaaaattcttattgggacagccaaagcgtaagtcttgtggcagctatatgattttgttttcttgattgtgttttttctttattctcatctgaggcgatgggtggtgacgcaggctcgcgtaccttcacgaggcgattgagccaaaagtggtgcacagagacattaagtctagtaacattctgattgatgacaaattcaattctaaaatttctgactttggacttgctaaactacttggtgctgataagagttttataactactagagttatgggtaccttcgggtaagtacttgcatctctctctttatatcatttgacataatacttttgaagactaaaatattgttggtcttggaaaataactaaccttttttgtttttggcagttacgtagctccagagtatgcgaattccggtcttctgaatgagaaaagcgatgtctacagcttcggggttgtactcttggaagctataactggtagatatccggtagactatgctcgtccaccacccgaggtaaaaaatttcgtaagaacctgcacaaacacataaactctgctgcctcaagagagtcttctgacatttcttctttttcattttgtaggtacatttggtggagtggctgaagatgatggtccaacaaagacgatcagaagaagtggttgatccaaaccttgaaacaaaaccatctacaagtgctttgaaaagaacactattgactgctttgagatgtgttgatccaatgtctgagaaaagaccgaggatgagccaagttgcacgtatgcttgaatccgaagaatacccaattgctagagaggtatgaataaggaaaaagatcacaactttggaaactgcttcttatgtctttaaaccaaatatactttttgttgagtttggtgctgaagcttttttaccaattttgaggatttcaggataggagaagacgaaggagtcagaacgggacaacaagagattcagatcctccgaggaacagcacagacactgacaagagtgagtaccatgacctaaagcctgaaggtggatagccattggaaataatggaggtgtaaattgtcgtaaagtctcgagctttatgggaagtttcaagtccttagttcttctccagatcttctgcgttatttgatgtttcttttcttttgtaataaggagagagagagagagtgaatgagttagtgagtgttcatcgttcgtttgttgcttgtatagtatttgtttgttgtattatcgtttgcttctccacgttttgcaatgtaggttgtttttggactaagtaaacgctatttgcaggttttgtagggtatgtaagtctttgagagaaacgacgtgtaatttgcaatttgcttgtggaagatattgttatttgagagagactaacacaggtctttgaagctcaccaacttaactctaataattgactacacaaaagttgaacaattctctccagagtgtgacactgtcgttttgtttccattgagatactcttaaaaaatttcagatcaaatggcattaactaaactagctaagcagaaaaaccatttttggtctggtttcctctggttttccattttctaatctctgccaaactcttctccatcttactaagacgtgtctccagctccagtgccatcttctctattgcaagcgttctctgcctcaatctttcatcaacatcttcttcctttttaacttcactgcaaaactttccaatgcatctcctctcaatttctctatcttcaagtagccaagaatctgcctccttgattccatcattgattattgccttcttctctgcatcacttccatttacatcatcacatgtttgccttgtaatctctgtttttttggtagttccatcatcctctacacttctttgctctactttcattaaagcatgcttttgacaaggccctgaatcatcatcgctatccaccagcatatatcttctacttctttttccaagtgattcagaagcatcacctccagttttcttgtctacatcactaaagtacttattcctagatctgatcaattgagcaacggtcatgcagtcatcttctttatccgtagaaatctcagcatcagcctcacgagctcgcttcatgtgaacatcagactcagttatcttatatctctttgctgatctatgcatcctcgatattctgcgttttgcagtaaagccttcttccaacttctgaactacttgactcaaaggaggtaccttggtagatacatcaatatcaccatcatcatcatctttatcaagatgatcaaatgtattccttgcatcaaaagcttcagtcgattctttctgtatctcttcagaaccaaaatattctgaagctgatttaaaccaccagtcttggtacctggcagtgacataacctcgatcaagttgagaaggcaagtagagatttaaaccctcaagagaattactgtaatcatcccaagcatccttttctgtgatttttctacgacgagtaaccaaaccaggaagatcttgagacaaaccgaactgcctcgccactcgataagggaagtaatcttcaacaaaaccatttccagcaaggtatgaaactttcacacatcgagcaaaagaagcaaatgcatcatcaacactgtcatcaacagtcagccacatagcttcatcaacgtaaaaccgaagtgggttccagttcttcaacggtttagtgtaaggacgccactcgaaaacatcaaaactcagtttcacattcttagatatttgttgcagaccatcccactgagctattctaggttcacctttaggtatctctttagcttttggtcttatgttactgaatctctcccaagtccaaacttggactaacttaaacagagacttcaaattaactttgccagcacattttcctctagagaaatcacagattcgatccaaatctttgtacaggaatgcgagaacagcaggcgcaagagcaattctttcacctctagctaaacgaacagctatagggattacgtttgtcgatatagaacgacaaaatttacctggaaaaacaaaaagtgaaagccacaatacaagaaaagcttcatgctccatctgaccacctctacccatgaagctcgaagtccatgatctttggctcactcgcttagccttgccaagactgtctcgtcttactttttcaagtttctctgcggaatctctcatctctgaacattctaaaggagaaaaaacgggagaacccaaaacagagaaccctagaagcaccatcacatcctctaacgtaattgttgcttcaccccatggaaagatgaaagatttggtttcagaacaccatttctcggcaatggagagaatcgaggacgtgtcttttatgattttgtaagtggatgccttgattgcttcaaaaattccagcttttttccaaatgggttcatacaaagcttgcatttttccaagccatgataggaagaaatgatgatctgcagcccaaaacccagaagaggtattatgcagagaagaatcagagagacgttgttgatcatcaagacggggaagctcggctacagagccatcgatggaggtagaaaagggttttagaaaatgggtttttctcaagcaacgaccttcctcacaaaggcaaaccatgacttcttctctctcttcagtgagtgacgatggtgatgctttctacatctctcaagacgaaggagaagaagcaaaaactttttgaccggtcaatcaattgcgaaggaaagatgcaacttttggttgaagatgaacagagaaaaatgttgccaaccgttgctttatatggcaaacaagcaaaatattctctccaaaatgttttaagaattttgtcagatagattaagaactaaaaccaaatttatgatccacctccacatttaaccaatactaaaacaaactatataatataaaaaatttacaacaaatacgaaataattaattttgcattgaaaattgaaaacatttttaactattatttaatataatacagatgtaatgctcttacttttaaaatttaatttatgtttcacctcaacattcaaccaatggtaaaataaactgttgaatacgaatgatgacaaaatattaaaaaaaaaatgggaatagaattctacgactatgatttttactcataaaatcccgttgctaatatcttaaacttaaatagtaaaaaaaaagtcacattcaatactttgaccatccaaaatgtagagttttggacgttcctcgaattagaggctgaaatattccttgaatctggttttgcaacccaaagaaaattacgggtcctggatgaaactatgttaaaaacaaaaaaaaacaaaaagaattccacataaaattagtcccaagttctgcttattatctctggttatcgacatgaattttcttggttttagactgaagacttttacaagatgtaatttatcaacaaaaataattccaaaaacgaggttactataatatcattaacaaacaaaagaaagagattactagaatatgtatagctaaatttgtttattatctaaaatgtaaatggctaaatgtgttattacaatcaaaattttgttttctaatgttgtattattggtcgaaattaaattccataatcaaaggatataaaaatgcatagattcagatctgataactgaaaggagagtgagtatataaaaactcgtcaaacaaaacttccccgacggttagttattcaatcctcctcttacacgtctctctctcattccccccggagtaactaacaatggcgaaaatgcccctctccgtcgtcgtcttcctcctcttctccgccgctttcctcgccgtatctatggcggagatcaaatcactcgtcatctccgatgacgctcgtccgatgatcctcttcgagaaattcggattcacacacaccggccacgtcacggtctcaatctcctccgtctccgtcgtgtccacttcctcagatccgaatccagaagcatcgcgtctcggattcttcctcctctccgaagaatctcttctccaggtcctcctcgagatccaacagaaccctagattctgcgttctagattcgcactacgtcactcatctcttcacattcagagatctatctcctcctccaaactccagattcaaccaatcttacccagtcacttccccaaacgaatactctctcttcttcgcgaattgtgtccctgaaaccaaagtttccatggcggttcgtacagagatgtataacaaagatccaaacggatctaaagactatttaccagctggatctactcaattaccaactctctactctttcttcttcctctgctacgttgctttcctcggtttctggagctacacttgctggactaacaaacaaaccgttcatcggatccatcttctcatggcaggtcttcttcttatcaaatcgttgaatctcatctgtgcagctgaagataaacattacgtgaagatcactggaacgccacatggctgggatattctcttctacatcttccaattcatccgtgttgttcttctcttcaccgtcatcatcttgatcggaactggctggtcgtttttgaaacctttcttgcaggagaaggagaagaatgtgttgatcattgtgatcccacttcaggtattagccaacattgcttccattgtcattggtgaaactggaccttttatcaaagattgggttacatggaaccaagtgtttttgcttgtggatatcatctgttgctgtgctattatcttcccgattgtttggtcgattcgatctttgagagaaacctcgaaaaccgatggtaaagctgcgaggaacttgtcgaagctcacgttgtttagacagttctacattgttgtcatcggatatctttacttcacgagaatcgtggtgtttgcgcttaaaaccattgcggcttataagtaccagtgggtgagctttgcagctgaggagattgtgagtttggtgttctatgtgatcatgtttcatatgtttaggcctgaggagaagaatgagtactttgctgttgatgatgatgaagaagaagctgctgctttggcccttagggacgaagagtttgagctttgaaaagcatacaatggaggatttttcttggtaagcaaggatttattctttttctcagtatgtctatgtttaaagtcgtctaatactgcaactgttattgttccctttttgttaaattttgttctttacatttaaattttctctgttatcaacaccttttatggctttatatcaatgtggattttggggctgtagcaaattttatttgaaaagattatactatcatcattatgtgcttcacaatttgtcaacatttgtgctcatcccaaagcatatttactgaaactaagaaacactatttcaccatctgcatccacaattcagataaatagaccgactatagcaaaatgaaaagtggtttaacaaacgaaaagaaaataaaaatacatcaatcattgcccattactcattagccgattaacaaatcattcctctttgtctccattacaatcatatcagtgatcgtgcttggcactatccaatatccatattccaaacacacaaaatttaaagacagaagttacacaagaggccgtaatttttttgtaagaacacaattttatgatatatagtttgtataatatttcaacaacagattctcaagtgaccatcatgtgctccaacgatgaacaatctcgaaaatggtaaaacacaaatggtcgataaatccgactttactcttcctcccttctctgccatatacagtttctgtggtataatccgctgctgctgttgctcctcctgtcaagagaaaaaccggacattctcacatactagatcttgttttcacgaagattatgtgcataaactgactgaaagaactgatctaattctaatcttggtttaggcttatagccaaagtgatcaaggcgtgtatgttttaactcatcacgtgaatgagtgagaaactacctcatcttgagactttgccagtgagaaaatcccgatgttgtttcttgagatggagataacgtccttgccccagatggagaaaccggaaacaccgtcattgtgtcctttgacaacaaaaggctgtggtgtccagctcctgttttaccagaaagataataaaccacatgtagggaacaagaacaaaaacttacaagaaaaggaaaaaccgtaatgattgtttttgctcacttccttaagtcccagatccgtaaagttttgtcaagagagctggaaacaagtaaatgactctcaggtgccactaactgcaagaaaatcaaaatttgaagataagaagaaaggccatattggttttgggaggacaaaaaagcttaattcacctttgtcacgtatccgtcgtgagctctccaggaggaaataaaaccattttccctcaagtcaaatagcctacactggccagaactaaaaccagctgcaatccaagaaggtgatactgaagctccgtctccatgttttgtttgagaccctcctgaacaaagagcagatacgagagaagtgaatccagattcaatagcttctcctccccaaagttcaagcttctggcctcgtgctagatcgataaacctgaattgtgcagtggaattgagcaaaaattgttgcatattatctctaatgctcaattagtttgattttttagtgtagtggatactattttacctgagggcaccaaatccggttccaacaatgagctgatccatgtattctaaataatgcatacatgtatacaagttctcatcgaatatcccacttgataatccatgtgacgcatgtctattacacggattggaattattctttgaggacggatctgatgaagcttgatcttgatccgaaggtgactcggagaacaaagatattagtttcccggtttggctattccacacatgtatagttccgtcgcaagatgctacctttccggtggatgacagaataccgatgtcattaacaacctaaaatatacaagaaataattaggtgcatacttcctattttatgggtaagagaataattatgtgtttgccgccgtaagaaagctataataatacaaggaaccaacctcttcatgggcatgataactagatacacaacttaagcttgctagttcccacttctgaacacttcccttaaaccctggatcaattcctgaagtgaaaactgtacactcatcttcagaaaccactaaagatcttagagctccatgatgggcccgcgcagaagacaaaacagatgctctaattttccatcgattctcatctttggggtttccaaaacgcccaatgtcaagcccatcccaacaagttactggactaggaaaccatgaccagggttcatgcaccaaagggtttagaactgcttcttgtccttcaactgggacatgtatatgaagttttaagtgattggaatttcttaacccctgcgactggggaaccgaccgtccagatccattaagcaacaccttaggagtgtgcttagatgcagggccctgttttaatacaggccttgcttccatattgtatcgagaagatcgtccggtgtattcccactgaattacaatagattcagtgataaatgtccatagctcaatggaattttatatattagatattgtggcaacagtatcccagaattctatatataaagacaggataccttccagttatgatgctttagcagatactgctcaaggagtagccaggttggacaaccctggcgtaatttctccataccaagaagtgaggcgaaagaaggatagaggagcaacctgtgattcctacaacgttaggatatagaacggaattatactttttgtattcactgatgattcagatgaaacacgcacacaagatccatacggcttttgattggagattctggatgaaatttttgttcggcagtcctaatcttccagcttaaagagtcagatgcatctgtacttttctcagagaaagcaaactcatcaaaaagctccttcaactgcggaagaacatgcaatgcagtcatttcttgtccaatccgctggcaaattgacatcagggaagttgcagcaaactgaaaaattggagaaagcaacattttaaaagaaaaccaagtgttaaaaaggctttccatatgcttgaatgagcattacagaggtgcactaatggatcctcctataaataaggcactgatgcatgcctaacaatggaaataccaatagaacaatttcacaacagagcccttaaaattaagctaaatctctttttttggagtcaatcttctttcaccacttaagagtgggacgctcagtgacaacttaaacaaggtcatcttgattatacatcattatccttccctcaaagttactgataaagaaaaagaaaaagaaaaggaaaatcaagaatacctgaaggacccgcaactctagatttttctgcataagaactcttacatgtaggcacaaccgaccctatgtgatgataagacaaaccacaacaatagaacgaaaaattaggtgtttaacgtaaagctagtaaagatagatagataaaattttaaacatactttggtcagctcatgtatgagcaactcgtctgatataagagcaactagaccatcgagtgtgattaggcaatcagacagcgctaaagaacaccaactatgaacaggctctggttttttcatcgaagagagatcgatacagaagcaaacaacatgttccagtaatggcagcatctgtttgacaatgaagttcacgcccaatagtctccctgaaaagttaacaatacaacaatcacttagcaaaatatgaaatttccaggtagagctaaggtgcatgaatcaacagatagggtgtaccaattctaaccagcacatcaatcccatcagtacatattccttttccgaagtaacttatcaatggcagtatagtctgtattaagggacaagtcagcatccaaataagaaattcagaaacacgtgacgtgcccgatgaaaggcatatatataatatatgggtgcaagacaagaacaggaaatcttatctgacctgatgtactgtaacaggggcaccaagctcttcgctcgaaccaatcaacagcacagaggctgccgaagctgagatcttgtccggagaattatacaagtttgatatgactaaaggatgaatcatttcaagatatactctctttccaatttgattccataattctctcacaaacgaatcttgaagaagagaaactttcaaatgcgagtaacctgtggtctaacatattatactctgtcagaagatattaattgaacttaacaagatgttgattttataaccacacagaaatttagaattacaaattccatcgggaaccaacaatatatgcgtaccagtaagatcttctggatagaaggcaagacaagtctctgcacagccattggtgtcaaagattttgtaaattccttgagaagtacataagccaattcacactcgtcctcagataaaggtgtggtgaccagtggcaaacagtacacagcacacatctctgccacaaatgttcccattactttcaagactccctgtttggcaaaacttgctgcataacacaagcgtgtttgacctttggccaaaagttgaagtggagcagcaaacaagtgagctgacctcactgtagctgagaaatacggagagtccaaaagactctttgctgagggcctcctgcatgtttcaaaaggaagagagagtaattagacattcacacatttaaaaaacacaaaacgtgttactacacaatttttatcatcacaccccacacagtcataaacacagtgaagtatcaaagaagaccagagttaacccgaaaagagagagagaaaaataccttctccaatcttgttcaatacatgcttcgacaattacctgagtaggaggaggaagttctttgatcagttcaggtaagtcaccaccttctaaataagtagccaaagacactgagttgaatagcggcttcatcaaataaagttctgccaggacacagccaatagaaaaaatatccccagcaatgtccttggaaatgtttcctgtgcagaaatcttgccgccattgtaacaactcctgaagttcagtcgatgcttcatctctcacctccatatgctctaaaagataattcaaacttatccttgatgataaacctttgttttttgaagttccagggagactagtatttactttcttagtgttttcactgtaagatacatgcaaaggagactcaaccaggttttcacgaaggtgatactttggacatagatgtgttgcatgatcagaaaatgcagatgcctcttcagtttcttccagatactcatcagctaggagaatgacggacctcttgttgtccacaccaaagccatggaatgtatgcatttctagttcatttctactttgttccttctctcgggagaaaccaaggcgcaccggatgaggccgaaaaaagagttggcgacgtccaactgacctcggtactgtgggttcagatgaagacaacataacattcttcgcagtaatagcagcatgtcctgacattttgtaaccaaaagtaatatcaatccagtgatgtattagagatgaaacatgggggctttccagagcatctcgatgcaatctaatgaactcatcggggctgcttgcccatggaggtacagccaaatcagacatactaggatgaagggagcaaaagatgcggggatcacagtaaaactcagggatgcactcgtcaggggtccaatcataaagcctttgcatgtcagagggatattcattaggctcatacaccgaccgaactgcctttcgcaggacactcagtggcagtcttcttgctttgtagctgcaaacagccagctcagaaagacattcatctgatacatgatgcggaaattcaaatgttgagtaggtaaaatctaattgttcatctccttttgccaatctccatttgctttttcttaaatcacgccatcctgaatcactatcattttcaggttttttgctgaaatctatgacccatggcattaccggatgaaatgtgtggtccccccaccttcgacctgctagtttgtttaagacgagtaaatattcaaaattgcttagctctcccttccaccatttatcaaagtgagtctgccagtccaaatgtgaagaaattttaagatcagcataaaggccataagaataacaaccctcaacacaccaccttcttcttgaagcagatgaattggcatctacagaacctaaatcaggtttgctatagatcgttaaccaactccataatgaatcagacaacaatatgtttgacggacgaatgtccccatgtgaaaccttcaacccatgcaagtgagctaacgcagacaatagctgatatattataaaatttctatgccattctgactttatagcactggggctgtagtagagaatattttccaatgtataaggggctttggggagcactgagaccaaacaatcagatgatgtcagaagtcctaggaccggtgatagatttggatgcctgagacatcgaagcttgcttttttcctctaacaacggtaacccaagaagaagacaaaggaaactatgggttgcttgtccagatgactttccatcaatcaggcgatgtaaagaggctaaaatttgatcttctggacactcataatggaaactagaagcaagcttttgaagttcagatgcagaacattttctaatctgagcgattggtaaaagtgcagctacagttctccaacatgaaaaactacctgaatgctcgcaagtaacacttccacaagtaatattctctgtgtcatcatcttcagtagcttgagagccactggttgaacaatccaaacactcatcagattcaacagcatcgtttgaattaccctctcgatccttaacaacaaatttgtcgctgcagaaaaagaataatttgctcaaccacaatgattgatagaatcaaatcgttagcctaaggagaacataaacaagaacgtacacgtatttagctaagcagccatgttcgtccttccggagatactccaaaatgaactgagaagaagtggattcacaagaagaacaagaagcagaaaattcctcgctagaatcagaaacctacacaaacgccatttaaagcagcttaaattccaatacttccaccattgaaatctacaattcaaataatgacaattgaaaaatccaccttaacgacggcggaggatccaaaaggtagcggcgaatcggagacaccgtaagagaagacgatctgatcggagaagtcagagttgatacgttgatcgagacaatcgaagcaaaggtcactatcttcacctctcatcccttctttcttggaggaagagagacgacgtctaatgatccggatccgatcaatctcgacgacctgaaaaacaaaaagcacggccaagaaacgccgtgttttctcctcaacgacgccgttttagcctataactattattgttgctttattttgtttgtatcttaaaattacaaactattcataaatatctcttatttcaaaaaaaatatcaagacggccgtcaaagtttcggtgacggagaatattgttgccgacggaaattggaatgggaggaggagcgattgacgaggagctgacagaagatgagaagagagctctcagaggaagcaaattcgctcctcttacttctcttccttcgtcttctcgctctaagcctcccaggttttgtttttgatcactccttagggtttttgttttccttcttctcgattttgaaattctgactttcattggatgttatgttttatagattggctcatccaggtggaccattgaagacgaataaagcggcggctttagccaagtttctagagaggaagctgcaagatcctaatgggttagcttccattgatccagctcttgtcgaattggccgtcaaaaacgccaaagacactgttatttcgagtgagtacttataaacacgattctttgataatgtttggcctaaaggtttgtaatttggaattggagcgaaaagggatttgtttgtttgagaggcttaggcatttgaaagatggcaatggcattgattttaaggctttcttggtagtgtattagaggaccatgtaattagcctaaaatagtttttagttgattataagtcacggttgatagctcagcattagctgagagctgggtcctgaggtgctacacaaaaattcgttgaggtataaggtgttcttgttaagtctagtgcaggactattgtatttgcaactagtggaatgagtttaggcattctagattgatttaggatcttggtttggggttaggagagtttatggtgctttagtattcaccccagggttatatctttggttatttgtttcagtttgttctctattcgtcttctgtaattgattcagagagtgaatgtagagagaatcacatctggttcttatcaggtatcctgaattttcaagtaatttggttgggaattagggttgagagcttgggacaagttcttctgaaattgttagctcagtccaactgttcaagttaaggaatagataagaacttataattagttaactctcaccttatgaaaagtgggataagttagtagaaactatgcgtagcatcaaacgtgagaccttataagtttggccagaagttcgcgtagaacttgtttcaacgatcatgatagtgtaggagatgtatatgcattgaaacttcactacatcattgcaaatgaagattgtgcgttgatgcattccatgagtttactcagtttaacttcaagagagtttggaaagcatatgtagcattcgttaaatgtaaatacaccgtgactatttgcctgaaactagtttcacactagaagttcatcgtaactgagtactagatttagctcacttaaaagtttaggataatcatggtattcctgtatggttggtgaaaacaacatagcacactgtatcggttttgttattggggaatatatatggtttcatgttattttcttaaactttggggtatgaatgtgaaggcgtaatctgtatgatactctactgctctcaggtggggcctcgagttcaggaagaagaattcaacacgttgcttcattcgaagatgtcgaggtatcttattctctgtactctgtttcattctatctgtacagggaataaaatttgtagaatatgtactgctgaccagttcttacgccttcgtcatcatgtttaggtatcttctgatgacgataagatagagaacactaagcttaacaaaaagaaaaagaagaaaaacgcaaagaagaaaaaagaagagaaaaagaagaagaaaaacaaaaagcataaggttatctccctcactacctttttccttatctcgtctttctacttgcttttcgttttcacctcacagatttttataaagtctttttacgttactttctggattccgtcgctcatatctgcgtatggaaaacttttttgatagcaacagatcactgtcgatgaagatgccaagttaaagagacccaataagaagttgaagctttagtttcctttttttcgctacacattactggttacatatttgatgaagatggtttagctgggtctttagaagaacaaactcaatcactcttatgtgtctgaaaatgtctgatccaaagaatctgttagtccgatggttagccaaagattagcatgatgatctttcttcttaatgtaggttagatttctccggctctatttggttaaatctgagaccggagttgattgtaattttagaacgaatagcttcatggatctgaaatttgtattttggttaaagagcaaatgcttgtgttgttagttatgagacaagttccaattagtaatgatctgcataagttcattgcaggaacatttaatctaacagagctcatgggtataagtgtttgtaccacttcaaagggacaagaggaaacacaataattttaaatcagggagagaacaaacagtaaattactaaattttctatgattttcgtagattcgtttatttcttgtctacatgatgagtttcgaatctcttttttgtcgtcgtttttaaaagtatgttgtcataaaaaggtgctcactgtttaaatcacaacagtaaaacatcttaaatgtgttctaactcattgtttagtatacaaaatcacaattgcaagtgacttaaacatgattcttttgatttgaatatagttcaagatactctatacttgagcatataaatatattatggcgcaaatgaaagatgtcatggtcagaactttaacaaacaaacaagaaatgaagtataaaaataaacaataaaaaatgacactgtccgaaaacaaaaaatgagctcgccgacatttggtagatgagaaggatacgaatgttatggtctaaaaagatctttgggtgaataacacaaaatctccaaaagctgctcacatgtggccaatacctcctctccaagtcaaaccttctgattctatttttattcattccatatatgtaaaaatgcatcataataatatttataatttgcaagcctcgcatcaaaccatgtttataaatgcaccatgaatttgaactaatataatgatttgaaacttttgtcattcattattcgatttttatttttgcactattttttttaatctagagttgaattttctttacctactgaggccaagtatgtgaagacatattattcgtttgtccagcatttttgcagacagagaatctccgccgtctgatattcagaccaatgcgttttatagccgttagattgatcaattacagtgtcgcctttttaagtgatctaaaagtcaatactctcactatgccccaacacaatcctccatgcggcttaaattcacgcgcttcaatcattaaccataaaatgtaaaatccaaactatatgtttttgacctacaaaattcattgttcgtgaactatatacttctccacataccaaaaatgtaaaatccaactatacaagtataacgggtggtgtgaaaaaactcccataaacttaaatcggtttgacaaaactaacttaatgcactactaatgatgacctttgtaatcaatcatccaaagcattaaatttacaatccatagtatacaatatgatttctagtgtgaagtgactcttaaacgtttggtgttgagtgcgattcacactctttgcgtgagcgtgcaagaaaaatactttccgtatttacatctactctttctcaacacgtggaacttctttatttgttgcaaaacaaaatcaaaaatttcttatttgccttcaagtctttcttgtgttcttttgtattttgattgtttgctatctaaacaagtatatttaagcttaagtccaaatcaagacaaacaataaaatatttcatagatgatggttagtaaaacagaattaattttcttatttttcatttttgaaactctactgtttgtcttagactgccaaaaccaaacaatgtggttaagaccatcatactattgctctttatttttattgttttatctaaacatataccttgtaatagtttttgcatgcatgtagaaatgttttttcctttgttcgtatagaaattgtattgtctgtcttgtttgaaacgtacacatgtttaaaataaacaaaattgtcaagaactaaaattatattctctttaatttacgtataggcaggctcaacaaacacatgctagtcaaaaagcttaggcgtagaaaataataacatatcaatcctaaaaatatactcagatgagtcgaggtcaacattagcacaaatatctaactatcatgttccgaccagtgtaagtagtagcgactaagcagtttttcttttcttcagattagattaaaatataattagcagatggaatggttggttgagtaaactaaaaatgttaacgtcaattaataacacatgaattaattttgacaaagaaattggcatattcctatatttgcaacttgagccgacacaatttgttttctttgacttattaaacttattttttattttttcactttgactattttttcttaactattagtataagtaataacgatctaaacaatcatgttttgtgagtaaaaactcttcagaataccattattttttttcttaaaatacagatcttaacattcgatcgttagtgttttgttgaccaaaaaaactgcttagtttcatcactaaatgttattataattttacattcgtaagaaattgaaacataatatatttcccacgccatggaatcattgattgattccttttttcttcttagaaaacacagagatttagattttcttactgttttgctgcaaatgacaatcatgtccttcaccagcatattcgagttttctccacggacgtgtcatgatacaaaggcttaactataatttacgcaacacttacataaaaggaaaatcaaaaatgagtattagtgagtttgagcagtgaaaattttaatgctcccataagggttttagagttttatatatttggtgttacagtaaaaaggtagtaatactttactttcgttttcttctctaaatcttgaacttaaaatgattaaaaagtgagagaataaagaaaatatttttttccttttctcttttaggcgacaaaaatttatatccggtatctctttttgttttctgatcgcatgtttttgttgctaataaatcgatgtaaattatttgcatcaacaagatacgaatcgtttatttaagtgatgtaaaatttctttacatcaattataagtaatacaaatattcaatataagtgatttaaaatgatcttttttttgtagtgtgtgaagatgtgtggtgattggtaggtttttcagagtaacataaataagtcataactgtggtaagaaattacaataaactcccaagaacgaaaagaatagttgaggttcaaataaagccctagtagtacaatataaatgaacagtacaaaaagttaagctatctaatatggtgcatcaactaaatctaggaacaaccataagaatattgtagatcattatttccaattggtaacatcatgatatcgtatagaaaaatagaattgaacggtgcaatcaaacatctgaattaatcaaaaacttggaacaacacatagataccttaatcatgtaaagtgacgaagcaatgaataagatcgtcatttcgaagacatatgtaattcaagaatcaaccgttaaacgaaaaaaaatattatagccattacaactttacatattacttgtaccaccaaaatacgttgttatttctaataactcttctagaacaatttatttgttaaatacgtttaagctaagttaggtttaaaacgattaatataccaaaataaagttttcatctattttatttacttgttaatcatgtaaagtgacgaagaatcgatgaatatgatcgtcagtttgaagacatatgtaatttaagaatcaaccgttaaacgaaaaaacggaatctagccgttacaactttacagattacttgtatcaccagaatacgtaattattttcggtgattcttctaaaataatttgtttgttaaacatgtttaaactaaatgaattctagaaagattaatatacccaaaaaattaataccattatttaaattaatcatcaaatgaagtgattattgtaaatatgattaagaaaaatattgaaacagagaaaatcaatattgatggcaaaaggaagaaataaaaaaaggcattaaattaagagagaagtcatttattctatgtttggcgcgtatattaaccaccaccggcaaaacacccacaaaaaaagcgagcacgcataaagaaagatcaaaacttccccatccctcttccaaaatccatcccctcaaaaaaaataaaaatacttcctttcgaaatttcgctaaaaaaaaaaatcgaagccgaaaacaaatagtagaagaaagaaaaaagtttcagctttaaggaaagagatcaagcgactgagagtggtgtggagacagaaccaaccacgatctgtggtttttttttttttgtccttttttttctccaatctcagaaataaaaaaagtttcttcccgacactcccatttgatcggagggcttcgacattggtgggctctgtttcgccgctccggctaaaagttagtgtaaagcaaaaatggaacggtacggtggcgccggagaagatgagtcacggtcggatccatcacatgaatggtccgctcaaggaaccgaaactggtatcgaaggtaacgttgattatgggtttcctacattttctttctctctttttgttaatgtctgatttttacggggttaaatctgcgattagcgtttttgtcagaattgaaagtttagattttttgaaaaataaatgcggcgtttgtagcttcgatgtggcggttagggttgcgaggtggtggaggtggaggtgaaacgttcccggagcgacccgatgaacccgattgtatctattatttacgaaccggtgtttgcgggtacgggtctcgatgtcggttcaatcacccacgaaaccgtgctccggtaataaaaactctctctctctctctcctctgtttttctgggtttgtttttttgataaagtgactgcctttttttgtctgcttcctatatgtctttgatgttgttaatgggctgatttagattaacagatccattgttgaatctacgatctgatatcactgaaacagaatctaggatttctaatttgtttggaagctctctcattggatgttgttagtttcgattttttcaggtcttgggaggtctcagaacagaagctggagagttccctgagagaatgggacaacctgtttgtcaggtattttgattcatctatttaaacaaaattggttcccaagttaagcaatgcacaagacaattcatcttctttgttctgtatttaagactctgtgatttagtgttgtagtctattctcactttgatattttcttgtcacagcatttcatgcgaacaggaacatgtaaatttggtgcttcttgtaagtatcaccatcctagacaaggaggaggaggagattctgttactcctgtctccctaaattacatgggattcccattacgcccggtttgttcaatcccgccatgctctcggtttcataggtcttttgttttgctgtattgtggtgaatgatctctcaaagtttccttacaaatggattgttacagggggagaaagaatgctcctatttcatgagaaccggtcagtgtaaattcggttccacctgtcgatatcaccatccagtccctcctggtgtacaagctccatctcagcagcagcaacaacagttatccgctggtccaactatgtatccatcgcttcagtctcaaaccgttccttcatcgcagcaatacggagtagttctagcaagacctcagctcttaccaggctcatatgttcaaagcccttatggttacggtcaaatggttcttcctcctggtatggttccatactcgggctggaacccttaccaggtattgctccaaagaaacctttatttgttctaacttttctttctcttgtcttagtaaacctcattccaatcatgtaggcttctgtaagtgcgatgccttcccctgggactcaaccgtcaatgggaaccagctctgtttatggaatcactccgttatctccctcagcgcctgcttatcaatccggtccatcttctaccggtgtttcaaataaggaacaaacttttcctcagcgacctgaacaacctgagtgtcaatactttatgagaaccggagattgtaaattcggaacctcttgcagattccatcatcctatggaagcagcatcgccagaggcaagtaccctcagccacattggcctcccacttcgtcccgtaagtcatatatacgccattaatcatgaaattctcatgatcaagagtagagttttagtaatgacttatgagaagttaaaatggaaaactctgtttcttgatgtgattctgaaactctgttttgcagggcgcagtgccatgcactcactttgcgcaacacggtatttgcaagtttgggcctgcctgcaaatttgaccactccttgggctcttcttcactaagctacagcccatccccttcttcactcacggacatgcccgtcgcaccttacccctcctcgctcggcacattagctccatcatcctcatctgaccaatgcactgagcttatctcttccagctctattgaacctataacaacaacaactggtggctcagaaactgtggctgctggagtctcttctatgaccagtgatgtgagccatcccgagcctgctgagaccaataaaggtgattcagctagcaatgaggctaagacttcaagttaaagagacaaatcttaaaggagagaagagaatctctctctattcttcttagattattatctctcttattctctctatatctctcttcttcttttcatcaaactttcatgaactcaggaacataaaaaggatattttttgggtggagagacaacaacagaaagcaaagcagagagatagacgaaaggagttctctctactcttctatgtcatgtctctcctcttaggtctctcttaccatgttcatattattccttcatacggccatctctctgtcttttgttcttctttttctttttggaaacgatgattaataaatggccttatatattcacaaaaatcccctgtttatttttaaaactttatggaatatgggaattaactaattaatagtccaatttttatagacttatgcttgcggatgttttcatgtatacatgtcaaagtattttcttttttttaatagaaaagtacaacatgttatacagtaaacgcaacctcaatattcgtttgaagcaatccgattctaaagatttgtttggaagagtaacaagaagtggaagagcctgacgaaacagaaagcagaacagaacagatcttagggtcacgtttctttttttgttctacattccattccgtacgacgttgatcatgagatacaaacgtaaatataaatgaaaaagaagttaaaaaaaaaaaaaaactactgttaatgtggaagtagtagtcagtaattctcgtacttggttctttgtgttggtgatataacatgtgcatgtgtgtggtttgttcgttgcgtctagttttactcaaacaacagaaaaaccataatcatgagtttgttcactgaaaacatcacaactaaagttctcaacaacccaataaaaactactcctaatcattaaatgctttttctctgagttactacttagatctaccataattaagactgtttaaagattaaagatatacatgtctttatatacgagttacagtagacttcacatagttgtggagatattaatcgattgtttaattctttttaaaattaaaatatcgattgttttaaaatatttttcacatactctacagtctttatcgagttaatttatttttttcttatagtaaaatgaacattttgcctaaatcgttatatatattgacgcatgcaaaacagataattaacaatacaaatttcagtaactatttggaagttatttaatttgaagctagacaaattgtgaagcatatatatatatgatgaattcccaacgtatatatgtttgactagtataacaggattggatctttgttgagttaacaaaaaaagtgtatagttgatcaacattggagaaggcactaattgagttctatgaaagaaagtcaaaaaccttaaacagatttaaaaatgaaataaagagttgtgatgttgagttgttgtagacaaaagttaaggcaaaatataggcaaaaggagggagacatgaaacagtgattgtgcaatgaaataccaaacaagtcatgaccaaaacacatgtttaacgaccaaaaacaccatcatgctacttcactaaaagtccatctcacattcactaattttaaattttaaattttataacttagactctcaattatgttataattcaaactaacgtcaaaatttataactgtcataaaataatcataatatctgagcacatactgatcaaaaatagaaaaatggggtatttgcatctgatcttataatcctaatattacatgtgatatattagttgttcactccgatcctagtcatttatccgtttggagcaagtcatttgatttcattattattataatatagcacacttataaaatatacataatgagtgtgtcgaagtagcatggacaaaaagtggtctttaatacaactcggattatccctttttgctaatcaaaaccataatacaaattaaagaaaaaacaaatcaaaacttcaaggtaaggtaaccttatgatgcatgaaacaataagcaggatttatataataaagtcgataacatatagttaacaacaacaatcaaacgaccatcgaataacgtaaatactaataatattattgcatatataaaaaacatatataatatagaatgttctaaaagactgagtagaagcctgtagtgtctgcaacgacatctccaaaagcagcgatagaagaagaagataaatcttgcggctccatcatcccgtaatcttccattgacattgaagcggcagcagcaccatagttcgtgatcatggcagagagatcacacgaaccaaactcatgatgattcatcatcatcatctcaccatcttcgaagtagctattactaaaccctccatatggttcagaggctttgcttgctaccggagttgtgaaactagctccggcttgattttgggtggtggtggcctccggaggtggtttaaggcagtggtttgggacaatgcaatccaagtaacccgagttgttattggacttattatgttcttcgcttgttaaagagaagaagaagttgttttcttcgtctagtgaagaagataacgagccgttagaagatgagttttgaggactattaccaaacgcttgaatatccacgctttgatgacgaactggcgttttgaaagaagccgcgggtaagacagtttgggggagagtgtgtttaggttgttgtggttgatgatagttttgataatgaggatgatgatcgatgacaaactgtggagaagagtttggtaagaaagattggttgttattgtaaggagagacaatgagagagtggagattagggtttgtgaggatggtgtggacatcagttggagtgtagacgaagttggttcgagcttgagtacctctcattgaaagagcagctctatcgtaggcaagagcagcttcgtgagctgtgtcgaaagtgcctagccagtgacgttctttggtggttggatctcttatctcggctgcgtaacgaccccatggacgtctccggactcctaggaacctccctggctccgcttgctttgatctccggcctcgtctctcgccggttgtggtggtggtggttgtgttggcggatgtgttttggtggatcagagcaaaacccatttgcgtttgggatgtttcaaatggtttattatggtctagggttttggaggttgacatgatgatgaagaaatggtttttttgaaaggaggtttcttttagggttttggttaaagatatcttatgatgagtaagtttttttttggctttgcttctgtctaaagatgatggtgctgtttgagaatggaagtgaagtgttgttataaatagagagacaatgagcttgatagagagagaagatagagagacttcacttttgattcaactgcttttagtagaccatcttttgttttgtttcttttattatatttccaaagatattatattttgcatcaacgacaaaaaaaacaaaaaaaaaaacgctgacacattagttggatttttatatggcttaaccagctgaaataaattcatacaaattttaaacagcttaattgactgattattattaagggtttctttttttaaaacagtcttaattttaactgtgtgtacagtatatatatgtatgtatatacacggatggctacttatgaaagcctaaaacagaggccaagaatcattggaactacagcaaaatctggaatgtcacagtaaccaatctcgagttagaagaaagaacaagtaataaatacatactaagtaccgagtaacttaagaaaagtaattgtgatgtatatattgcatcatcctatttgaatcttctatttcaatgggatcaagctaattgattaactcaaataatctacttagtggtcacgtgcaacatgcataataaccctacataccttagcctaaaggtcaagggtctacgtaaaaataatcgatatatttctttaggttaaatcccctacttaattgatatatccttgagatgatatgcatgcattgctaattacgataaggatgtccaattaatttgagtgcactgaggtaggttcgataatgttattttctaacacaatatatcaacaattcaaaaataaatatatttcaaaatcagtgttagtttctacaacccctgatcaaatcacatggttacccgcattttaagcggaaatagaaatgagaacaattttgtcaccttgttctgatttttcaatgggagtggtttagagaaagacacgatgaactaaacaaaaattaaaatgcttaggaagtacgtataaatttggttttaattaaatagctcagtggacaattttgtattgatgtccttgtatgcaaagttgcaaacaagcacaagtcaacaacaatcttagtctctttgtgtttgtagttttgtaggattatatatatatacataggagcttcgtctattttcatatatgattgcattaggaagttaatgccttacccgacaacagttctattgatgaatcaagaaaattgctcatagtcaacgataacacgactgttaagtaagagttcaaagaaaaacagaacaattagaagatgactatgagctctaatcaaactctggattatttagtttagagactttaatcaaacttttcaaaagagtaagaacacttacgtttcagtcattgtggaatttagattgatatttttatgtattccatgttcgaaaaaatgtataattaatagaacgttctagttaataagagagtacatattttcattaactaattagtcttgggaagaatacatatacaaaaattcttatagtagaactcaataaaggcaaacatatagatttggtgtgataagctttgatctgtattgaaatctttttggttaagtgttagtctgttagataatctttagtatatctaatttgatgatgttataaaaggctaatgctcatatatatggataagttagtacttttggtgtgaagtacgtaatatgcaagtatatattagcctttttagcaaaaacttacgtaaatatatacgagcattaatagaaatcctgcaaatgactacacaagtttttgtagcaaaaacaaatactacgtcatataagccacgtaaaccaacaatcaaattaattagatttgaatgaataccttgcctttttaaccgaatgggctacggtacaaaagtgtgatggactccttgtattaagggttggaaatgtgacgattcttggtaaagctttttgcacattgcttaatggcattgggaatgaaaattataattcttttttcatagtataaatgagtcaaactattaatactataatatatgatgatattaattttggctcttttagaattatatctttgactaatacaacagtaatacaattgtggtcggaccacgatatagtcatcatcttctggtgcaaccgttccgatcctagcgatacaatttaccaaacacaccaaaaatgttgtgcgccagatataactctactgaagttttatcaaaacaaagattaattttacctaaatttatatcggattattaggccgaaatatagagtggtactatacaactaatcaattgtataggtaggaatgtttgcatcaaaactgtaggcaaattttacagaactttaattcgtgtccggatgttacatagagttctaaaacgtaatgattagaataaagtaataaatgcttaattgggtgaatttattaatatatgtcatcccttttaagaattggggttaaagacaagcttaagctatataagaatcagacgacccttgactactccactaagattttgaagttgatgtgggactaaccttacatttgattatttttcccgtatacataaattgtttttacgcattattaccactgaaattataattagtgataatgtaattcaatcaactatacattggtttttcttaaatatgataatttatctacacctatattcattatatttatctaaaagacgaagatattctcgtataaaattgatattattttgtcgaaatgttttggagtatttataatgagtcaaaaataatacatgaaagtataattcacagcaagtcagcaactaattaatacctaaacttttggtatttatgcctcattattttagttcatcaaatttgaaaaggaattttatatatatacatattgagattcataaaaattataacttatgaatatacaaaaaatactatcccattggttaaatggttatagttcaatatttttgttatgttgcacgggataattgtttacttataaatgtcgacgtttgctattgttaatatagaacttacgtaatggttgaaagatttgaagttaatctgaattttccctacaaaaactcagagaggcaaaaataaactatctctttgtacgtgttttcaaaatatgggtaaataatttaagataacatgtgataatcccaactggctttgtgcacgatattgggattgcactattgaagtattgaacacttttgggtggaaatctttttagtcaagttccatgtgatcgaggctttcttgggtttatgaatggagaatttcttcacatttctccaaaaaaaggcaaaggaaatattcagaaaattttgaacagctaatgaaaagccaaaactttttcttatgaaatttaataaatttgttgtgatttaaattttcttttgtgtcaaaaggacatccccgggatttaggggtaaaggttgtcttagaacaaacttggactttgacgagagtctagacagtgtgaccaaaaagccaagtggggcttcactattagtttgctattgaattacatatgtttccgacaaaacaaggtcatgaagattcaaattaattagtatcaatagttattcttactaaattcgtttatatttatcaatcctgtaatgttttaaatgaattttttttcatctaaagaaagtgtaaattaagaatgatgatatcctatttaacaatttcgatttttatgtttaaaagtttgatgtctttcggtattattcaatgttttgctcagaaaccagaggatcctacttcttcttttctctgtgtgattgcactcgtgtatattaaattaataattaagttgttctagaatttgggtaaattattggaaagttataagctccgatccttttatttactatccatttgtaattaaagtcaggtgatcaaaacacactcgtggcacctagtaatatatcataattctatcctaaattatgtttatgctctccatgtgcttctctctatctctctctaatagctttaaataatagttagattgcttacatcgttaaataatttgtatattaatgacaacatacggcatataaaatatagttttttttgtcgactatagagctttgattagaactaaacaaacaagaacaatattaattttaattacaatttcaatatggtttaataaattaaaaaacatacagtacatagtacgtaatacaatgttggaaagtcgaaacacacggaaccaaacaaggcactttagaaacgaaagacaattggataaatacttcgggaaggaacaaataaaccaatgagaagtaaacacgtaagctaagagtagcccccacagaatctcaaccaatgggaagtaaacacgtaagctaggaagaagcccccaccgaacctagttcgtgcacatactatgtgggacactgtcgatgacacgtaagatactgttgccgcacgcgacaacgaggaacacacaaaaagtaacctactttgcgtacgtgtcgtgatctgagcgatggatgttgtctgttgcattttacggctgcgatcttccaacttaaaacagagagagaagtgatagttgtgtctgtttgatgatgatgtggtgtagtcaaaaagaaaatcttctctcgtacggaccgtctgatttggattggacggctgatatttgagattgagaactgactctgtgattttctttctagaccataaccctccttcccgtttcttctcttcctgtttttttttttataaaccggccggtttgttttcaccgaatttgaataccggtcttcatatgttcacttcaaacacaactcgagcagggtacacatatttccggtaagttgtaaccaattctgatatcaaatattatcaacttattgtgtctcatttgttaccaagagctaagaaagtatagataattcgcaaactgttgtaaataatttttgttaaattacattttaaccagcaagatatcacgagagtatttgttttctacaaataatgatttttaaaatttaatgattatgtatttttttaggtacatccgaccataacaaatctcaattaagaaatgataaatgataaattatttagtttattttgatttgaaaataatacatactaggatttagtccgtggtacaccacgggacaaatgttttattcatatatataataatattaaattttatggttttaaatttagtactaaagttatataattttatataatattgtaaataaaaattttggtaatgataaaataataaataaagatttaacccgtgttatatcaatccaaacccgtcccgctatataactcgtttcatgatattttaatgttttttataaggataaatattattaatgttttataaagttcatatatatcaataataatataccgttaatgctaattgatcctcttaaaaaggaatattagtgagtagtatattttactttagatttggaaagatttaaatgattgttgtgatatatttattttagttttctaaattttagtaacaaaattgatttatatttagatttgagaataaaattgttaaaatattaaatgccaatgacattggattgtaaataaatcctcaacttgaggatttatttcataaaagtgttgcaaaaatgtatatatagataattataaatacgtcatctctacattataatagtacatctaaaaaaattgattcaatgatctgcgaccggttcaatccaatgaccgaaaaagtaatctgattcacttccttcgtcggttaaagaaacagtctaacaccaagagagaccttaaatggttcatttccattgaggccatctgactgagtctgtcgaagtcttgtttgaatctgtgggacggctcgagccattggctgaatcatgccatatcaactccatctattcacacacacacacacacacacattgtgaatgttcatcaacagactaacaaaagcatcaagtacatgctgaacaaacaaaaggttcagagaaactcaaacaaacctctcctacgatgacggtatcgccttctttaacgcccatattcttcagtgatttattcacaccacaagcatcaagtacatgctgaaaccttttgtctgaatccatgtacctatccaaacacaaatcacatcgacattggttagtgacacttgattagttagattgcatgaattatggctgtagttcaactcatacctccagttagtcatctggacaaaacgttgaagcccggctccaactacatgccaagccctagtaccgctatcgcggaagacctcaaactcattaatggctgctcgtcgttccttatcaatcttcttagctacatggtccagattctcatttgcttgatcgaacaatgctatagcaaatttgaaaacaaaccccatcaatacactgcataagcgcgatatcattctattatgccaaagtaaaagtaaaccacacctttgggttctgcattggctgctctgtacttcttcaggagttcataaacggacgagattacttcatgtgtaccttctctttgtactgcgctcatacaaaaaggttcaatcccacgggcacggagagtttcttgaaacattggccacttctcgtaagcatctgggaggtccattttgttgtatgccactacgtaaggcttctcggcgatctcaggactgaatagttcgagttcgagacgaacagcttcaaactcaagttcaggttgtggagctgaaccatccacaacatgtacctttaaaccacaaaagaaagggtcttcttagaaaaaagcaaaaatgaagtataaagatttgaatctaaattctaaagacagttgttttaccagtgctgaacatctctcagtgtgccgaagaaactcatggcctaaaccgaagcctctgtgcgctccttcgagcaaaccaggaagatctgcgaccaccattgttgaatcgtaatcaaatgaaaccacacctagattgggaagtaatgtggtgaatgggtaatttgctatggttggctgtgcggcacttatcacgctcaacaatgtgctttttcctgcatttggagcacccacaatacctacgtctgcgaccagtttcagttctaagtccagccacctataggcatatgtaaagttataattgggaatcagagcttcccagaaaaaaaaaaatatatatatgaaccacatattacatttcctaaaggcaaacacagtctcataattctccaacagcatgatagtgttggactctaagagtacccaatccagtctatagataacccagaaactcatatccgttcataatactctaacatacctctatcaacatgagcttttctactagcagagtcagcaatggaagactttcaaaagtcctgtacctgtatctatatataaattcttgtatagtgagcattacttacaagatgagatttcctctggagattaaccgagatactaaacctaacccagatgatcgaatgaaggaagcagggctcacatgtaaacatcaagctttaccaaacaaaagaaatacaaatcaactgttcctaaaccaaaatgaaatttttacatctttgaacaatctagcttctgtgattagtttatcctatcaaagcttgtaaccatcatcaacacactaaactaaaaccagctcaaaaatgaagaaaaatacacacttacatttcaggaccttcttcgccattctcagcaatcctaggaactttattcatccccgacttaaacgaagcattccctcgtccacctctccctccaggcaacaacaacgccctctgtcccggatgcaacaactccaaaagcacctccttctcctccccttcctcaccctccacctcactcccaacctctctagcctgtctaaccaccgtcccaggagccactttcaccacgacattatcacctttagctccactctgcatcttccctctcccatgttccccacgtcccgccctgaaatgcacactcttgcgaaatggcaacaacgaattcatagacccatcaacctctacatacacattccctcctctccctccatctccacctgaaggtcctccaaaaggaacaaacttttctctcctaaacgccaccacaccattccctccatctccggctctaacatatatcttcgctctatcgaaacacctcatcacagccggaactcctttctccttcaccccaatttcatcctcttcctcttcaccggagaaacataacacttctccatccttcaattcagacccttcactatcatctttctccgcatcagtttcatcaccatactcaaacacttcgtcttcccaatcttcatcatcttcatcaattgatcttgaactcccttcaaacacatctaatcttctgtaatttccccaaatatcatcatcatcataactcttcacctccttttctttctcttcttcctcaatttccctcaaagtttcaatcttttcctcaaccctcgcgacattggactcagatagcttcacttcttcagaaacttttaaataagatgaagacaaaagagagacatcatagtaatcttccctaggaggaagacgtgtataagtagtggcttcgccgccggcatcagaaactggctggagtttatcaccgcctcgagatttaagctcgacttcgcgttgaagcttcgtttttctagggcttcgggttcttcccgagactttgtcaggtttagcgaaaatcttcctcgtcctactgggtcgggctagagcttgaggagtgaagaaacagttaatggatatggaagccatttgtttctctgataaatcttaacgggactttatgtgatataaacaacattttgtactaaatattgatttttcaaagtaaagggggttacaatcaaaagtagtataaaattgaggacttatatagcaaacaaggagaaacttttattacctttgaagtttgaagcttggatctcgcagattgagctccagagagggagagagagagaaagggggcgctttagggtttctgcagttcctggttcagtctcaccattctatttaagggttttaatctctctgcttcatttggtgactaacatttatcgtcgagggttgtgacgatctccgagaatgtatagcggatctagcgatggtgagagtcatgatacatcgacgcagaggaagatcccaccggcgtcttcgatgctttgggttagaaatctacgacgatatattggttccggtgccggattaggatccgaagctctaatgggtaatgttccttttgccggttgttgcgttttggttgttgggacagtctgtagtttttttatcttttagcttgtgatgatgtcataaattctgtaaagtttgaatctttgatcacattttagagctcgttgtgttttcaatatgagtaaagttcctgaatttacatgtctatgtattgaaagactatgtttaactgtgatagagtctttggttttgcttagtttgataagggtttgtgttcattgttttgtagagcttgagacgaagagaatcttgctcgagatttttaaagagaagcaacagaaaagccaagaagcaggcacaataccgagtttctacaagaaggcatgtcccttactctgtataaaatgattgcctttgcatttcaaggcactactcggttaaaatattgcattgtgttatacacttcatagaagttgtttttccttttaagtattcgtgttaggcaataaaattttgttcctttactcttggttcagaaaccagaagaaggatctattagtcaaagggtccagaagcttgcaaagtaccgtttcttgaaggtatttcgcctgctcttaattattcagaagaagtttaatgtttttgctcacttcgatatgttgattaattcccacagaaacaatcggatcttttgttaaacgctgatgatttggctgctatgtgggtttgtttgagagaaaattgtgtgattgatgatgccactggtgctgaaaaggtacgtgcatcttttataggatttttctctggagctgaaactatgttaacaatgatgctgatattgcgctgtctttttcatgtagatgaactatgaagacttctgtcacattgcctctgtatgcactgaacaaatcggtcccaaatgtcgccggttttttagcccatccaatttcatgaaatttgagaaggatgaggctgggaggattgccattttaccgttttatctttatgtgatgcgcacggtgagtatccttatgtttttataatgtcatgtctttgggtatcatttttgttcattggctgaatatcatctgtcgccataagctaaatattctttggtactgtgtttgagtgacaccagctttgctagttttggatgtttgtttttcaagtttttttaatttggcgtgtcttttacttaaacaactatagttaatacttgttttgattaatcatatgttcaacactattcaggtgtcgcttacacaagctaggattgatatgagtgagcttgacgaagactctgatggtttccttcattctgatgtaagtactcaagtggctctaaagctttaactttagaattggctcaagattctttaggtagtcgtcctacctgcaaatgtcaaatggtgttgacttttatgtcaagttccttacagttagtctacttgctgttgttattataggaaatggagtcctatattggtggtctaatccctaatctggcacaactgagagacatgcctccggcctttaatcaaatgtattgccgcatagcttcacaaaagtttttcttcttctgtgatccccataggcgaggtaagtgaaagaaaatattattattattaggcaattagaaatttctttgacccagtattcaatcgctcgtaaatgtgatattttttgcgtacaggaagagcctgcattaaaaagatactgctcagtaactgtctgcaggaactaatggaattgcatcaggtaagtttagttgaaggatgtatgacatacagcttcgtcaccgtataactttccactttcataagctacttgcttgtgttttctgattgttccttggttactcaacgttaggaaagcgaggaggaagtcacagacactgaacaggcagaaaattggttctctttgacttcagcccaacgcatatgtggtgggtgtgctattttgtcttaatagctgcagagaactggaaacaactctcgttatgtcatattaagaactaaaatggagattgatctagagtttctctttcttctgtagatatgttcctcgcacttgataaagatatgagtggatcgctgtgcaaacaagaacttaaagaatatgctgatgggaccctaactgagattttcattgaaagaggtaaatttaagcccttttggtgattgtaggctcgtggtactgatcgagacacgcttagtatactaattcccctttgtttttttagtgttcgatgagcatgtccgccgtggtaaaatcgtggcaggcaattcccgggaaatggactttgacagtttcctcgattttgttcttgctttggagaacaaagatactccagagggtttgacgtatttattccgttgccttgatctccaagggagaggctttctcactactgctgatattcactctcttttcaggtaatgaatctctatgaagcgactgaatctgtttggtttcttactttttagtaaattttgtttgaaacatggaagtaaagaaggggagcatcaaagagttgtgatgttatctgatacaatcttcctaaataaacactctgcatttcctgcttgcggaagctgagctttgttccgcgagtctcatatctgcaaagacactagtgcatatcaaacacaccattgatgtgtgataatgccattgtctctcttctgaattcatctgtttaacttgcagagatgttcaccagaaatggatagaaggtgggaactatgaactgtgcatagaagatgttcgagacgagatctgggacatggtgaaaccgtctgacccattaaagatcactctgggtgatctcttgggatgtaaacaaggtggaaccgttgcgagcatgcttatagatgtgcgtggcttctgggctcatgacaaccgtgagaaccttcttcaagaagaagaagaaccacctgaggaagagtctcagtgataatgttattttctatgtctacctaaaaaaaatgctaaatcattgagatcaaaagtctcgcactagtaaacagtctcatctcatgtgtgtgtatctttgtaagcttattagttggtgacgtttaatgaaatggctgtttatatcgtcacttgtcttattctacttgggatctgatttgatttttgacatttctgaattcacttctattatacattactccacaacacacatgaattcagtcatgtctcgagtactacaaaatggaagtcataaaagttatcgtgttgtctctggtctgtgtttagacatggaaaggctttctgggtgtagcagctctgttctctagagattgtaatctttgcttcagatgaaacacttcaacctgcgttcatctcaagtttttagaacaatactacattttgaaaatgcaaatttgaatagagtctattgatgattatgatgacacctgcaactggaacgctcttgctctttctcctgcaagaactcctcttgttgaatgcaactcctacaaaacccataacacaaaacggtattaaactttaatcctcagtcttttgaaaacgcttgtatatctactaggattattttaccttttgtgtatcgtctaggacagctttgaggaacgctacatcatgctcaagcctgacattgtcggagtgaaccatgtttgacaaactattagcttcctcttgagcgagctctaacccggtcagcttctccttaagcaattcaacatctctcatggcgtcagataactttttatcagtctcttgtttgctcctcaacgcaaccgacacattcctctcagccgcctctcttcccgccaatgctgcttctaactgcccttccagaatcccatttcttcttataagagccgtcattttcgcttcatggaattggtacacgctcgatgaggacgctgatcctgcaaagttgatattatccatttcttggaatatcaaggcgccatcaacgttttctaaaggatatgtttcagagcattgcttctggagacttaagatttcacggtcagaaaccatagaaagtgttttctctgctgtaatctttgctcctccagtattgtcatctgtggtctgaaaccaagacaagacgttttaaaagcaaattcaagaacgtcaataaatgcaggtgaatcatgaactaactatatataccggaggaggcacggaaatgtcttcttctgaacactttgcgggttcaatcaccgctctgtattcctcttcggtgctaaactgtttacgcaaagagacatttccagaaggtgggttacgatgatcaccgaaagcaatctctgataaagaccttctaccagagccaccatgctcttcaatggctgaagcaagtttctgtctggcaactgaatcaatcagcctctgtgaagaggctttaaccgattcatcagaggttaaaactgccgaggaagaagatctttttccaaacagtaaccggccggggtttttcttggaagttgtttgcggatgtgttggtgattcactcttgttcttgtcaatggtaaaagcatcgaccttttcatagttcagacatagcatcaaaacacatacataaattgagatcttgaacaatacagcggaatgataaggctcgaacctgatttgaaggatcttttttcgttcctccaaaagctacaaggaaatctttatccttgtgttgcagaagaactagactaaatccctatttcaaacataccacaagacaataactgagcttttaacagatggggttgaaagaatatacaagttagttacatataagaatgtgatttttctatttatccaccttgttggatgtgacagaagattgagaggagatgcttgctacagaccactcgaccttaaggatatcgaagaccaatgtttccgcatgtcctggaaaagcaaagcaaacttgtaagatccaggtaacatttagcgcagtttcgaagtagaacttactcttctttctgcttcctcctccggttatataccatttagtaccgcaaagaactccacaactacccgctcttggtgatgggtgaaatcctcttatctttattcttgaccataccatcttgatgacaccaagagataagagatgttcaatgtcaagaaaccaaataaataaaaaacattatagcaataagtattaccgtttcaaagtcgagtgagtataagtcatttagtgttttgttcttgcccgaacctccaaacacaaacagaattttgtcgtcgaataacgtggctacatgatgtgaccttgcacacggccgtgttcctctgtttttttaatgagaagaaccgtatcaagaaatcacaagtaggagttcaatgtaaacaatcatcagaaaaatgttaaaaagtaaaaactcacgtgcaattaagaggaagccatgtggatgatttgagatcaaacatatgaagatcgtttagtttcctcttcttagagtcttcaccaccgaatagtatcaataccgaactagccctcaccactgtgtgaccgctgcgactgacctgcattttcatatccaaatcagatttttttctcaagtcacttcacaatccaaaccataaagccacaaacttctaaatgtataatgaggactgagagttaccggtaagtctccttttgcatccattagtgaccagcattccgaatcagtatcaaatgcccacactgccaaaaatatataaactttagaattcaaacaacaatgtgaaaacttttgaatcaaaacaacaatgtttaacctgaaactctatcactgctaggatctgtttttccacccaccaacagcacttttttaccccaagagacctaacaacggataaaaacaatcaaaacaaaaaggtgtaaaacaacaaaacagaaacatctttgctcaaactagcaatcaattaccaagcaatggcctttccaagcagggatcatgagaggaagactactcggcgataagtaaacttttgaagatgcggtggaccatgtacatgaatcaaagttaagcacctgtagatgcaaaactgagaatatcaatctctttaaccaaatactattaggatttgattagtccatagtcattttacctgtacatcatccaacaagccactaccagactctccaccaactactatcattttgttcccaatagtcgccgctgcatgctgcataaaagtaattaaaacaattagtgtttcaacacagttcagacttgagaagctaatgactggaagagaaacccgttacattaaagcgtggagcgggtttttcgccattaaccgataacaccatccaattttcggaattccctgatgaaggctggaaatcaagttcatcagaataactagttgcagcaacagcagcttcattctgcatcatgtttgcttacaaatcaaataacagtcaatgttatcaaaaaaccagttaagtattgcagtcttcttatataacttacactagagctatcagcgcgtttggtcactcgtaaaggactcttatatccttgaacagaatccgagagctgtaccttcttaactctgatcaattacatccccattcagaaaagaagcataatcagttgaatctttagtaaccatgaaccaaatattgattaaaaaattgtttatcaatctaaaaatagaaaccccaaatcaagaatcaatggtacttcataggactaaagaaaggaccaatacttgatcctataacaatattataagagttgcttttgtagtaagcttaaacaggaggattctccaaaaggtgattcctaaatccgcttaaaatgtaaaaaaattgaaaaagttaaaagaaaccccaaaaagttggcaactttcagaaaatcaaaagagacccacaaaaaggtgatctgattttacataagggtaaaagaaagactaacctgccaagtctcatgcgcctctttgaaaagctgaacattttcttccaatctcagaaatccccagaaaaaataaatcctagcaaaaagctcacattgtcatcatcctaagatgcctaaaagcaagaaatttatctaactttttcttaactttgcgaatctaagatacagaagtttaccaaaatccaaagaaacagagatccacataacaggccaaaactaacctgttttggtttgctgagaaaatccccagtaacaaaatagtgaatagaatcaatttcagagaatagccattatccacagctggagacgaacccgaaacgacgtcgtagtgaatcctagcaagctgtttctggggccagcagagcagggaaatgattgaaggggggagtgatggatttagctaacggaagcatataaaaatgttgtctttaagcaaataactaatgaatgggaccaagttcagcacaaaagcgaatcttgtaatgatctgagcttagcccgttcgagagtagagactagagacagagagagaaagagaccgtctcttgatgtctttgatggttcgttgagttatggcaacatgttttgtctgtttctgcgcaagtatgtgattggagtttacgagttcgccgaagatatttaatgctcgcgatttgcgacgcctttgtgggtcccagcttcttttgaaaatgtcttttcgatccatctctttcaaatatagtaagactttgctagtttttacttttttacattgtttttataatatagtataaattatataaactattttaaaaatttagtgattttaggggaaacaagaaaaacagagtcacaagtcacagcaataaaaaaaattgttaataaattcattaatcatctacatgaagaaaaataaataaaacgtcaacttaatttataggcaaataatggatatttactttacctttgacaaatgacaaatggattattattaagatgtcgttggctactagtttcaagtttttgctgttgtgtaaagtcaaatattgatttttcggtaatttttgtccgagccctccaaaaaagtattattagtttgcaatcttatttttcttcatttagtatattagtttatgcaggtcaatatatttttatttcatagaagttcgtatcagtcgatacatatcttaaagtaagacaaccaaaaaaaaaaagacaacacactgattattgatccgacgtggactcatcatatcaccatgccaagatcatagatgtgttaaaattattctgcgtacttaacttagtgttaagtaaactagttaaaaacatgataagtcaaacccacaatgcaccagcccgcttaagcatgggaatcaaggatccgttaagatgtagactcatgacctcgttggctccaccgaccaactctccaccaatgaaaacgcccggaactgcggggctacacccgagccgcaacaacgcctgctcgatctccctccctctagatatctcatccagctcgtaaaccgctggatttgctccgaaatcgcagagcaaagtcttgatcgtgtgagacatacagcaagagctcttgctgtaaatcaccaccggtctctccatcaccatcttcgttatcatatccattgctattttatatggtatatgatccaacagcttcttaagtcgtttcttaaataggtctatgaatctatatttatgatctcttagtatatagatcgattttttttttgtagagatttaaggaaaagaagtactcttgattctacgtggagaataagggtattgtgtaaatgttgtgtggatatatgaaataggtgagtaagtgttagtttatatagaggcagagaagacgatgatattattggattagatggggaaatatgttgggattttgtttctaaggatatcgtgtccgaaagcgacaacaagttcaattttattttggatcacaaaatgtaagtgattgagaatctaatgattttcgaacttatctttacttttcatttttattgtccatttggcatttagaattagacctatgtatatagtcatctctaaaaggtgagaatgtcctttgtacggttccataaagcgatctatagtcgatcaatagacaatagtcaatctcaagtaatattaaataaatacctaaatgattgattaataaaggagaagggttggtttatattgtttttaataaggtttgtattgttaataaggtttatattgttctcggctataactcattgtgactcaacaaaaatttactagatttcgtagctacaatatattgaaaaatcagataaaatcacggatttttttgaaaaagtaactagatagacatcccgttgataagtcactggatcatgcatgcgcatttataagtaattttcgacagttgagtttttttaaaatagtaatcctgtaaatctagcattctactcaatctaatgtcgataattatttttatgtacaattaggatacctagctcccacctagtcctttgaggattagcatcaaaaagtgttcatgagatttgattctgcactttaaattcgaattaagttaatatctaattaggatcctctaatcgtttttaagtttcacgaccaacgaaaaacattataagtttccgaatgtttcctaccataattactaactataaggtttagagctaattaagttggatttcttgcatatgcattttgttagatttgagtctctctctttctttctctctaaaaacggaatatgtaaagcctatcagaaggcatcttatgagttggagaaatagttatccaaaacgagggctctttttttctttaggccacgtccccttctccaacgtgaggattctattctcgactcgccacttccacattttgtaactcatcaaaaaaaaagaagtaataattataagtgagaggaagagagaaagattctacgtatgagctaagcatttcatttgctttcatggtgactaacgaattttaaggacaacgaatcgagaatacgtatgaaagtaaaaacacatacagacttgtatgtatatatgcccttgaggtcccctttaaataactttttcaggcaaacacgagatctatttaaaattccatttcgctaatcatgttttattggttagcttaaacaatgtgtattttgtttttaaatgcacacaaacatcaaaagcatgcattgtgcccatgattttttgttcttttcggcaaccgaggagttatagtctctttggaccagaaattactaatgttaattatctgttggtagaactcgaacccaagaaatggtcattacccctccccttcaaaatcaccccaagatcaattggtagccgacgatgggttagacccggcccatgcatgatctttaagatgtgggaaaacaatgcatcagcaatcagaccaagatcattttagatatgcatatatattctcactagaccatgtcgtgatctggtcccatgatgtcggataagatgcgtgacctagacgtacggtccattgcaacatgccaaacattttgagattaatcacatgtacatataaatattaattaatggttcgactcaacagctttataacagaagaagacatatataactggtatgtgataattttccaaataactaaatctgtttataaatagggtatatgtgactgcaaagcttgtttcaagaagcaaacgtgatgctattatttcattgacattctgacgattatatatttataatatagaacaattgtcatccttgatttagtaggatttatttataacctcttcaaagtaattggccttttagttaataattccaccgaatccttggttgggatgtgttgatggctacaagcacgcgaaaagaacatttatccaatacataaaagaacctttctttttccaaactgcagatgctcctttatagacttgcttacatatatcataaaacgataactacagattcgatgatggttgcatgtacgactcttggacctcaaagtttggcctgctagaagaccaatggccaaaatttggttcatgcatgcatggtggaaatgcctacaatatgttattcttagtttgctaaatataatatagatcttttttattttcgtcaaactttacaaaatatatatcagtatatcacacatagatataacaaaaatgatgtgatttaatttatatatcgcgttgtagtactattacataaaattattttaagaaaactattgtccaatgaagtcctaaaattttggtttatactggccattgatgaattaagtttagagggaccaaaatcattagttgcacacaaatattgttaaaagggttcttgtatagtgggaagtatatagattatacggaaacaaagaaaatatgtacgttataggataagatatatggtgatcaatatatatgtcttcgtatgggatatgttatacaaaataaaaataggaaaagaatgtcaactttcaatacttaaatacaagataatgtattcttagaatttaaaggtgatattttcctgtcatgcaatttgaatatgtcgtgaacagcctatatatagaataaaatgcgctattatatttttataataatcatgtgatgtacatgtatgccacactttatggttttaaaaattgtatatataaacctactaaattaattaagttaataataacctatgtcgacgatgataagaaaataggaatagaaagcgaggacgggtcgcagcgtcacatattaccatgcatgtattgtcacccgtacgtcgtatggttgcaactcaaatcgcatacatacaccgattcatgacttaaaaactaaataaaatttcaaattataagagagatgcagaaaaaagttatttggaaaataaaattctctttatctttacatatattcgtgtgtttgtctacatatctctataattacgtggatgtatgagattggtaaagatgagtttggcgtcagctaagaaaatgttccaatccgctaccgagaacgcgtgttcccacaaaacgattcggaatcatattcctcatttttatttcttgccccaaataaaattttatttagaagtctgtgtttttgaaggaaaaaaattaattctccttttttggcgtcaaacaaattcaccttttgcgatattaaattgtagattcttttgcacctaaaatatagataaacattgtgttggctatatagcatcccaaagggcaatatcagttgttagaattttaacttattaaaatttaacacatatatgtatgtgtgtgtgtgtatgtattaaaaccgaacaattggaatatgaaaagataaacaacatcgaaaaattatcaacgaacaagattttttgttttatcaaaaatcaacgaaccagataaaaagcatatttatgatcaaaattagatcatggtatacaaaaaagcaatgcgccaatgctgcggcggatagaaaaatcagaactttgaaccaaactcatttcatttaacggtcatacaaacaacaattaccaatgtgttatttgtacttcatcatctcttttgatcgtattttaagcttccatatagtgcatttggaggcagcagaaggagtattaacttaataatcagacgttccctaatgcccaatatgccaaagaacgtggcgtactagcgtgttctcatcagcatttgtgctctcttcttagttaagttcttgttcttgcaactacttttatttttaactaactcatcattttatagggcctaacttctccgataagctgcttggtacaagataaagcccatacgacccacgaaatgcttgccaaatccaattaaataattatgtaaataaagttcactaaaaatcataatgtatagtagcatgtttttttttgggtgtagttacgacttacgacagacgagaagttgaaaacacaacaaaaaaaaggtcaaataattcatacaagattaacaaaatgactcaacggttacgtgtagatccgtgtttcactgttttggaacgctaactttaggcagcgctttgacaacgtttaccacacggttcctccaaagtcgaaataaaactagattggatcatttagcagaaagccacacacgtcacttcgttttccaactttcatcatcatatcatataaagcatatcattattttctttttccaaattcatcagaacgttatatttttgaaatgggaattgatttttttttttttttggattaccccggagtctacctaaactaataccagtagcacttaccaaaaaaaaaaaaacttaaaaccagtagcagaacttccataccaattgttcattttttttattatttttttgtgtgtatttattaaggtgtatattacttaacattaaatctgcgtaccgtaaaatgatccatcattttatataaactttatgctagtcataaactcataattcttgcaaaaaaaaactaaaaaaacaacaactcataattctaatttttatatatattgtatggttggatacgaattattaaattaagcgaaccccctctatactattagtcctggttacgtgtaacgtaactataggcttcaattaattcggtcccgtttccttatattacgtgatatttgggaaactactaattttttttatcttttgccggaccaagctctttcaagcaaaaaaaaaaaaagaagggataatggattctgatttaaagattaccaaacaaaacatggattctgatttaattatgaatcatgtactacttatttaagggaactaaatgtataatgtttaccaaaaacaaaactaaatgtatagtcaaattcactgatatacgtcagattatcatacgtcagtctgattataaatttggtcattagtcaatgttgatacacatattattctctaatgtgaaaaggagaattgtatggttataatttgccgaacgacaacttctatacataagaatatttttctacagtcagttgttaagttagtgcagggattaattactctataacaatgaattaattatcgcgtatgaaatttctttttaactataaaattgtctaaaaaggagatcaaaagagtgtgatttgcttttgtgcaaactaaaacaactcatataaatctaaatttaaattgaactaattaaaagattacaagttcagccaccgaatctgtgttacaattgaagttacaaagttgttaagtacatctttgtaaaaaatttaagcacacgttaagggggtttggtcaacaatcattgactacacttaattattccacgtgtcatacgatgaggggttcgacggtggtatcagtgtattaaaaaaaacgtcctcttgatcacgtaacaaagtccataatgttttttttttccgacaacggaggcaattatccacaacgctcatgtgcattgtcttgttaagaaactctccatagctgtttaactgccacgtgtcgctctatctttaacagtggaacatggagacaacgatgtacctagaacacacgataaatcccttcgctccgctatatttcctaaatcccggtccggaggtagtggtttaacttaatttttggttcaaatatattagttaagtattcggttgtatttaactaattaaatagattacgtaattgtgaagagcgtggcactcgcacatgtaaattttcttaacaacgcactctggcacatacagacttgttgatattgcatgtatatcagattataaaattatagattcgttacacaaatttgctgatgtttgactcaaacaaaaagttttgtggactaccatgagtaaagaaaaaaagaaggcaagtataaatttgcattgtctacgaagtacgaagccgttaacccgcgcgattaacttagattggtgtcgtttaagatttttttttgacattcggagtaatacattcggttcgataagagattatttacaatacaatataagttaatgatgatctagaaaatatatatcgtagtttaaaaatgcttcataaatcagtgatgtaatacaaaaaaaaatacgtctcttagaaatttacaaagttgttcgttaattgtttttcttggtcaatgactcggtgtttgtttgcttcaaagtttgattagtaggatttgtaccactaccatgtttgtatgaacaaatatgaactactttttagacgtgaatttatcttttgaagtatataaagactaaacggttaataataagctggaggagtaaatgtatagtctttttttttttttgtgactcgtgagtcaacttgtttgatgtttcttttgagccggcatttaaaattagaccttttccttttctagaaaactcgctttataatttgaaaaaaaaatagaggccataattatttttaaagttgatagacgttataatttgaccaaatgacttgtttcaaatacgacaagattcctgttatgagtttttttttgtgtcataagacatttggaggttattattctggttatttgttaacatttttttaattgtaggtaatttacactgaaattctactaaatccaaatatatatagaaaataaaactcaaatctaattctgtatatattaaaacagatcgaattcttaaaaaaaacaaaacataaacttatgaccaactatttacgtttgttttaattaacaaattcgaatgaattttaaaatacttggtcaaatacaaatgaatagaaatgaaaactacagttgcaataatcatttcaagttaattatcccagacataattatttttgaaacattattctctaattcatgtagcagtactgaaggaaggtaaggtattttaaaaacttaaatctgattctaacaactatcacaatttaattgtagtaaactaatttttgtatctgtatacaagaaaatttgcatagtacatggatataatacactactgatagttatacacttatacttaatgcataggccatatagtatttgtaagttcttaaaagaaactacagaagtttttaaataataacaatgggattcatgtaaatattattgtctctgaaaataattatcttaacaaaaaaaatctggaaataataacgtatatttttgaaggatgaaaaaagaaaaagaaagcgtgggcttgagaatgttgctcacaaagcgtgaaggcatatcctaatatgtgggtcctactttccgaccgcgatgattcttctttctctcccgacgccattaatttagcctctaagtgtaattagttaattattttgtttttaatatttattttcgagttaatttttaagaagattatcttttctttcgagttttatcattccataatgtttaagatatggaattatcaagagttctatacattaatgtcagtaatgaaatcgattaacattagttaaatttattaattaattatatgccatgtcttgtacttaaatttattaattaatttaatgtacctcggaaacattttaatatcagaaacttttttttcaaatcaacccacaaaagagaaacaaagagtgtataatgtactgtaacaactttaatcaatgttaaaatatatcagtatcaacattaatataaacgaacagaacaaaatgaaacaatcacaaccaaatgctttttatagtttaatcaacaaagacatgttgaattgaaacttgatgtgtcatcatagcaacattttattttttgaattgaatttattttaaaaccaaaacatgtagtaacgaaacaatagattttaaaaccagaagattagagccttgtacatgacatatactacataatgttaatcctctttttttacttaaaaccaataatgttttctactttttcccccccatagatttacatattaagattcactatacatcataaaattgtcatacattcattttaagagaattaaaaaatgtctaatacatttgaacaatattcactattttatggtgatagtgattacatgtcaggtgtgaaatattattttgtatggaatattttatgtagcattgtgtttatatattttactaattttgtaacacaattgacaccacatctggttcagctaaacttgtgaaaataggcaagagatctaacattaatctcacatgtaaacggataatgattcacttaatcttgtcttttaacttttccaaaaaaaaaaaaagacagagattttcctttgatgattttattattaaatgtcaaaaccgattaaataaaaatttcatatcttttctttaccttcccttctcttctcgcgtagcacccacatcaacccaacaaaaaaaaaaaaaaaaaaagagtttcctcgatttgttgatcagccgctggtctcgatctctctccaaagatctcaagtgagacacagagatgcattgaaataaaaagtctgagcctttttcgtctttagttctcaagtttcttgtttcgtgttacagtaacaaaaaaaacaactcgagatgtgttgttgagagcttatgttgggattctccggttgattggttttgtcggtagtttttttttttgtatttgaatttctccgagggacttagcttcggagatgagtgggtgtttgccttgttttggatcttcggctaaagacgctgcttctaaagattcggtgaagaaggaactttcagctaaagacggctcagttactcagtctcaccatatcagcttaggtgaaatttttcattcaaacttttttgggatctgttgagttttcgtgtcttagatcgattttttttagttactgggttctcgtaaagttcgtgtctttggtaatgatttgggaagaaatgttgatgtttctgatctaattcgtctgtgagagctgtgagctatggagtttgtggactataatttctgagatctgatgtgttttgggaggtttgattatagttagtatacaatttagctccaaattgttgtttgtgtccagattctgtttagttccctatgtacatggaatgcatagttctctatccaacaaacaatgaatcataaaaatgttagctttaaaatttcattattgaagagtcattgataaggatgttctgtaatagacatcactagtttagcaatagtagatatgaattttgtttcctgttgattgaagttaaatgtggaagctctttatctttgaacctgaaaagtattagggtttgagttgattatgattttttttcgaatttgaatatagcatgggtaatgttatgtgttccctttcttgtaagtactaacattttattttatttcggtagataaatcaaagtctcgacgaggtcctgaacagaagaaggagctaactgctccaaaagaagggcctactgcgcatattgctgcacaaacctttactttccgagagttagctgccgccactaaaaactttcgaccggaatgtcttcttggagaaggaggtttcggacgtgtttacaaaggtcgtctagagaccacaggacaggtgaagttcgtaaattgaatttaatgtttcataatcaagattcgtcttctaattggatttaatattttgcagatagtagctgttaaacagcttgatcgaaacggtctacaaggaaacagagagtttcttgtagaggttcttatgctgagccttctgcatcatcccaatcttgtgaatttgattggttattgtgctgatggggaccagcgtcttcttgtgtatgagtatatgccactaggatcattggaggatcatctacacggtatgcttagtgatatttccccactcttaacatggaattgcattattttccataagataagaaacctttgcatttttatttgaaactaccatggaccgaatctgtggcaccgtctactgtattgtagaaggatgctttgttgtatttgatatattgggaaagtcttttttacttttcttaatctgttcttccaaagctatttatggtgaataaatggaaatattagcttgtaatagttctatcaagtgcatgtaacgattaaaactttgattttcagatcttccacctgataaagagcctctagactggagtactagaatgacaatagcggcaggagcagcaaagggactggagtatctgcatgataaagcgaatccgcctgtgatctacagagacctgaaatcatccaacattcttctcggtgatggctatcacccaaagttatctgattttgggttagctaagttaggtcccgtgggcgataaaacacatgtgtcaactcgtgtgatgggcacatatggttattgtgcaccggaatatgccatgacagggcaactcacattgaaatccgatgtttatagctttggggttgtgtttctcgagctcatcacgggtcgaaaagctattgataatgctcgagcacccggagagcacaaccttgtcgcatgggtatgttactcaactttttcttatatcaccaaaagggaaaaatcacaattttttttgcgctctcatgtgatatagtcaatgtttgggatctgaaaacgtctttactgacttgaactgttttgggggttctctgtcacttgttggtctttgcttggctatacaggctaggccgttgttcaaagatcgtagaaagtttccgaagatggcggatccatcgctgcaagggcggtatccaatgcgtggtctatatcaagcacttgcagttgcagcaatgtgtttacaggaacaagcagcgacaagaccactgattggcgacgtggtgacagctctaacatacttagcttcgcaaacgtttgacccaaacgcaccaagcggtcaaaacagtagaagtgggagtgggccaccatttatcagaacaagggatgatcggaggagcttgggagatgggagtagcttggatagtcctgcagagactcggagtcggttagggtcaccagccactcacaagaactctcctgattacagaagaagggatatggtgagggaagtcaatgcaggatcagaaggtgggagcgagacaggaggcgggtcaggtagaaaatggggattaagcgatttggaagggcaagaatcacagagagggagcccggcgagtgttgggagatcatcgagaggcactccgaggaaccgagatttagatagagagagggcggtggcggaagcaaaggtgtggggagagaattggagggagaggaagagagctaccaatggaccgggcagctttgatagtacaaatgactgaaatgggaaagatgaaagcttgtttgaaaaatagagaacttttgtcactgtgccaaaaggcaaagggagagaggctttgggttcatgcgaacattttgtcgagtcgggtcggtcagttgtcgaatttgatgtctgagtcgagaaagaggactcttcaatattgtggttgaagctgaagaacatatgaggaagagagttcaagaagaatgatgagtagttggggacgattaggaggggaagaaaaagtttattttcaggtgatgtttttggggttttttttttttttttttttttttttttttttttcttcttgttcaatgggttgtatatgtaatatgggagggaggattcgagtcgatttttataatttttctgtactatttaatgtctcattgtgtatggattcaggtttcgagtctacagacagaaggaaaagaagaaaaaaaatctatctttgaaagacttctcttatcatctacaaatctacatttgtcacactcaattgggaagttgtgacaacatgagaagagacgagagagttatgttttgttcaaatccgaccacaaaagttgatttgagatttactaaaaacgcactactaggaatgtggtgaatatttctacaaacaaaatagagtaaaatacacgttgaagaaataagagaagtcggagacaatgcagtgatgcttgcgggtacaaaatattagatccttgtctctaaggagcttcttctaactaattctccgattcggaatcaaacctagaagtgatcataaatctttctgattacttagtgatggattcaacacaagccttcttatttcctacgctttccctgcagagacataaagtttttttttagttaggatcagaaatagatggtctgtctgctttgcatgaattaaccagtaaaatgaaaaactctttttatgttttggaaatgattttgagtaccgagctcacataatcatccattgacagctgctttcgtttcttcagaagagatgaagggctctcatttgcttgcctacccgaaggtcgttttgatggcgttgcactctgaaacaagttgtagaacagatcatgagaaacaattccacagcatctcatcagtaaatgaaaatgtaaacttaaaatgttcttcgcacaaaaaaaaaaaaatgttccttcaagtcctcacctttgaaagcttcttctcttttcgggcttgcctctctctctcatcaaattcttgattctctttctcaatcaacctgattagtgtgtcacatctccttgcaagttcctgagttgtgcgggattttacaaaccagtcaaacctaaacaagggggatgtccgaaacgctgcctttagctcatcccagtttccatacccaagtttatggaccatgcatatctgataatcacaagttcatcgggtcaatatcatattagaataaaacaataacaatgaaatctcaacaaagagtttgataaatagatgtcataccatgaaacggtcgcactcttcattgtacagcttccctttgttctgaccatattgaatcttcagttccagccacgggtttctgtagcgatccagtttcttcccaatagctttcatgatttcatctttcctagagattcttgcttcccctctctcaatattcttgatgattctgtcgtaatctacaatttttacaaaggaaaacaagaggcagagcttacttaggataaatatccaactttgtcgcactgcaaacactcattaactttacttaacaatctaaagttactaaccattcagctctttatatcgcacttggaaaacttgagcatatcgttcaacctcttcctcagttttcccttccatctcagaggcaatactctttatgtcgttccggccatacttctcacaagccctaatgaaggcattgaagtctcttctgctccatgttgagaaaccctaaaaaatatcaactccattaaattataaaaaaaccatcaaaaacaaatgtcaacccacagtaaggtcgaatggtttggcttgcctcttccagcaatagctccttttcttccacttcttcagcagttaagggatctccaacttctgcaaaattatttcttaagtaatagattcagtaaaataatgtaagaaaagagggcaaagactgagaaagaccttcaggttcatcaacctcaattgtgtctttcatttgagttttctgatgtgcttgctgaaaccagagtgaaacaaattgctattcagaactaatcagacacaaaagctgcataaattacataacatgttgataaacttgttattcccaccataaggtatcgcacttctttttcatacagctcagtcagcctctgaatgttaaagaactgaaaatcatgcctgcaggatggacaagaaattagatttttacgataaaagtactataaataagacagggaaaaggctaaatgcagagtggagacaattgaggtactcacaattggggcatgcgtggaattctaggctctttaggtttagctggagcaccttgtcgcaacgtttgcttgaagtattcaacttcagagtagctaaagggtgggtagagaaaagtaaattgttgaagttagatattgtttaggaagacaggatagaccacgtaatgaaaaagtagaagtaatatttacttgcgctttctctctctttttggtggatcattccaattttcactcacaatctttttaaaatccaccttgctctcatcctaccaaacaaaattaaaaaagaaatcaggaaacgatattcgaaaaactgcagagcataaccacagtatgcgttaaacctttccttcaatcattcaattaattatccaagaataccttgttgtcatcgtcaaaatcataaaagtcagcacctgcaacaaaccaaaaactatcttgtttggacatcccattacccatgcaagggagttaccattggaaaaagggataaatagcacacttactgtcatccattttaaactgtattgcatcttcagtaaatttcttcatcttggcatcaagttcagccgttgcctcttctcctttggcaatgattctgtcaatatcctcatccgtaattgtgctatctttagaactaaacaccatttcagcaccatatctcaccatttgaagcaactcatccttattaacagctggaaagcaaagaaaagaaatcagtatatatatgtaagagaaaatccaatacatctaacagcctcagtacacaagcacttacttttctgttctgccaatctcccttgctgaataaccagagcatcaagtgccaacttcttgtaagctctctcaatgactttagcctcaatagcattctgcataagaccaatgcagaattagttcaagttctccaggtcattcttacttcatacacatgggtacaagagtaacctcggtgcagaaccggaacacttgaacttcttttttttgaccaatcctatgtgcacgatcctgagcttgcaagtcaacttgagggttcctgccataatccacccacctcattaggcataaaagaaaacactcataaattacaatggacacaaaaagagccttaccagtcactatcatagaggatcacaacatctgcagtagcaagattgataccaagtcctccagctctagtggataacaagaaaacgaatttctcacttcctggcttgttataggcttctatggaagcatctcgttcgtcaccaccagtatttccatcaatacggcagtactggtaaccacgatacattaggtaatcctcgagaatatccaaaagccttgtcatctgatacagatgagcaaaatcgttggaataagcacaaagaaccaagaaagatatcactcagaaaaaaggaatcaaagataggaacaattatttgtttgcgttaatgaatacctgagaaaatatcagaacccttgaatctcgatccttcaacttaggtagcaatttatctaagagaaccatcttacctagaaacaagaacatgtaaagagaaaataactaagccaattgccacatttctgaatgatctacttgtaatgtaaatcttacctgcgtttgttacaaggtgatctcctgtagtatatgggggaccaggctccgcaccctggaagagataagggtgattgcagcatttccgcaattgcattgctatgttcaacagacgtttgcgttctccaccaccattaaccacttcaagatccttctgcagtaaagccttgtagtactgtttttgcatttgagacatgccaactttgagtattgtctccttttttggaggtaagcctttctctacatctgattttaacctccgaagaagaaatggtcgcagaacctacaaagatgaggtaaatgattagcataagaacttagagaataaccttgataaaatatgagtacataccttgtgaagttgttgaacaacttcttgctggtcgttttcaccagaaatttgaaaccactcgtcaaaagtttctgctgaactaaaaacctcagggagaagaaaattgagaagggcccacaattcatggagattattctgtagtagaaacatatgaaatgaatacaatattaactcaagcaaatcaagtacagaagatagtaagaagcatgtctaaggaacacgaaaagaaaaaaaaactaagttcaacagactcaagcaagaaagtagtttcaacataggcagaagcaatctgacagaaaaattgaaggatctaaacaattatagatcaaaagatttgacaagtacctgaaggggggttcccgtgataagaagccgatagttggtgctgaaaagtctcatggttttcgaaaggagtgaattctcatttttaattcgatgtgcttcatcaatgattatatatcgccagctaaaacggcgcaatgttgtcttctctttgatagccatctcaaagcttgttacacaaatgtcgaatttccctgcaactagcagttcttcacgaatatgtctctgcattatttaaaatatatctcagaatcctgccaggtgcatataaatgcaaccattcaaatgtaagagctattatgacttactctttcctcgggattaccgagaaatttcacagcacgcaggacaggacaaaatcggcgaatttcattcatccagttaccaagggttgattttggagcaactaccatatgagggccattaattcccctgtactcatgcaggtaagccaacaaagaaatggtttgaagcgtcttccccagaccctagaccatgaacaaaaacaataaagattagcatcagataacattagagagctgaaaaatcttattatatgctaagataattagtggtttaccatttcatctgcaagaatcccatttatgccgttctcatacagccgaatgagccagtttaaaccagctaattggtaatctcttaacttcccctgaatacctgcaatatgaagagtatgaagatcagatctctaaattctacagaatttatgcagtcctacctagaaattgtgagctcgcaactgaagaatatatcaaacaactctaccaatcaaagaagtgggcataaggtgtcaaatcctataataacttcgactcgcaataggacttgagcaaacatacgctatatcaagatattaggagcaaaacaaaggtacttacaagcgggctgagtgagcaaccgtgtgcctccagatccaactataccaccctcttcttcttttaaacactcttcatcttcctcttcctcggttagtttggaagaatggcgacccctgacgataaagtgaaacccaataaattatatttctggaaacttaatatgaataaccacaatttattttgagataagttgcactcaacacaccttccttttcccttcttctgggacggagacgggtcacttttagcaaaatgtgcaaataactcagtttgctgcagaagatactttatcctcccctttcctttattgttctaataaatggaatgattgagttatttcaatacctctggatactaaagacaagcagctcagttatttactaacttaccatatcagcatctatggaagcattttgggagtctaagatttgctgaattttctgcttcttcatcttctgcatttctttgagtctagccttctcacgtttgctgatctcagctttctcctcgtcttcttcgtcctacatataaccatcaaattatgaaaagagtgaccaaatatcctcacgagtcacatgaatgtaccatcataatgagcgaccacccatcattgtaagcacttctaagcataaaccttcaaacaaagagagtcgaaaccaaaagacacccaaatatcgaatatacgctcaaaggaaaccctaatcttacttagaatacattcagatttccaaatacagcaatccccgaattcacagccgacatgcgaatgtaaatcgaagagtggaaaacagaaacgaagacatacctcttcagcgtcatcttctacggggacaacctcgtcgtcagagacaggtgcttcgtcgggcgcaacatcttcctcgtcagagcccgcagagcgagcgacggcctcgagctcgtcatcatcttcttccacattggcctgatcgttaacttgctcctcttcctccgacgagtaagcctcgtctgaagaaacttcccgcttcgaagctctagccatcgacgcgcctctacgaatcctgatttcgtctgagagatcgaatcgagggttcctgagttttttttgctttggttagtaaataaacaaaagtgaaattaaaagcaacaaacccgacgtttgaaacgaccgtagcttctattttaccccgttgatttcgagaaatcaaatctacggctgagatgtgccacgttggcttgacttataaagattctcccgccacttgagaagtaagagtttcggaaattcccgccttggaattcgggctttaaaggcccatgggctcgaagttaaacttagaagaaagcgaaagtcaaaaaggtcaacttctcgttcttataacggaacggccttatccatttatccgcccgaatcacgtatctgacacctcagcacttgaagttgcgacacgctacacacctaaaattccaataataccctttgaaagagcctacacgcttgtctcatgcacctttgcgtatagaggatgaaagtggaagttaagaaaaaaaaaaccgaatattcgtattttaatcgccgtttcttttcttctattagcttctgtttcgcaagatcacgacttctatataataatatataagctcgccgtataattttcttgccgggaataatctccgatcatcgtcggaaatttccgaattgttgtaaaagaagtccaatttaggctttggatcctcagtttaatttatctgggacttttggttgctgaaatctctttcgggttttgtcctaatcctcattagtttgggtttcgtgagtctcgttttataaggtatatttttggctaatttgcttccgaattctgctttgttttagctcaattttgcccttaacattggttgatgaacagaggatgatgtggttgtgtttattgtcttcttgcagaacatgggacaaaagagattgttgttcttgctggcagtttttacttttcttgtttcatcttcatatggtagaggtggtaatgcaacttctataatgattctatgtctgtttcctttattgggacttccagtttttttattctcctgagtctctctgagcttaattaagattttaaactttctgtgtaatgtgaagtgcttgggaaattggaaatttaatctggctacagtgatttttcattaaggcctaattacatgttctatcatgtttggaacaaatcaattcataatccttgtagcatcatcatatacataaggaaccatgaaggtcaaaatattgatttcaaagctt

SEQ ID NO: 1446 - DNA, 85746 bp, Arabidopsis thaliana
aagctttaactttagaattggctcaagattctttaggtagtcgtcctacctgcaaatgtcaaatggtgttgacttttatgtcaagttccttacagttagtctacttgctgttgttattataggaaatggagtcctatattggtggtctaatccctaatctggcacaactgagagacatgcctccggcctttaatcaaatgtattgccgcatagcttcacaaaagtttttcttcttctgtgatccccataggcgaggtaagtgaaagaaaatattattattattaggcaattagaaatttctttgacccagtattcaatcgctcgtaaatgtgatattttttgcgtacaggaagagcctgcattaaaaagatactgctcagtaactgtctgcaggaactaatggaattgcatcaggtaagtttagttgaaggatgtatgacatacagcttcgtcaccgtataactttccactttcataagctacttgcttgtgttttctgattgttccttggttactcaacgttaggaaagcgaggaggaagtcacagacactgaacaggcagaaaattggttctctttgacttcagcccaacgcatatgtggtgggtgtgctattttgtcttaatagctgcagagaactggaaacaactctcgttatgtcatattaagaactaaaatggagattgatctagagtttctctttcttctgtagatatgttcctcgcacttgataaagatatgagtggatcgctgtgcaaacaagaacttaaagaatatgctgatgggaccctaactgagattttcattgaaagaggtaaatttaagcccttttggtgattgtaggctcgtggtactgatcgagacacgcttagtatactaattcccctttgtttttttagtgttcgatgagcatgtccgccgtggtaaaatcgtggcaggcaattcccgggaaatggactttgacagtttcctcgattttgttcttgctttggagaacaaagatactccagagggtttgacgtatttattccgttgccttgatctccaagggagaggctttctcactactgctgatattcactctcttttcaggtaatgaatctctatgaagcgactgaatctgtttggtttcttactttttagtaaattttgtttgaaacatggaagtaaagaaggggagcatcaaagagttgtgatgttatctgatacaatcttcctaaataaacactctgcatttcctgcttgcggaagctgagctttgttccgcgagtctcatatctgcaaagacactagtgcatatcaaacacaccattgatgtgtgataatgccattgtctctcttctgaattcatctgtttaacttgcagagatgttcaccagaaatggatagaaggtgggaactatgaactgtgcatagaagatgttcgagacgagatctgggacatggtgaaaccgtctgacccattaaagatcactctgggtgatctcttgggatgtaaacaaggtggaaccgttgcgagcatgcttatagatgtgcgtggcttctgggctcatgacaaccgtgagaaccttcttcaagaagaagaagaaccacctgaggaagagtctcagtgataatgttattttctatgtctacctaaaaaaaatgctaaatcattgagatcaaaagtctcgcactagtaaacagtctcatctcatgtgtgtgtatctttgtaagcttattagttggtgacgtttaatgaaatggctgtttatatcgtcacttgtcttattctacttgggatctgatttgatttttgacatttctgaattcacttctattatacattactccacaacacacatgaattcagtcatgtctcgagtactacaaaatggaagtcataaaagttatcgtgttgtctctggtctgtgtttagacatggaaaggctttctgggtgtagcagctctgttctctagagattgtaatctttgcttcagatgaaacacttcaacctgcgttcatctcaagtttttagaacaatactacattttgaaaatgcaaatttgaatagagtctattgatgattatgatgacacctgcaactggaacgctcttgctctttctcctgcaagaactcctcttgttgaatgcaactcctacaaaacccataacacaaaacggtattaaactttaatcctcagtcttttgaaaacgcttgtatatctactaggattattttaccttttgtgtatcgtctaggacagctttgaggaacgctacatcatgctcaagcctgacattgtcggagtgaaccatgtttgacaaactattagcttcctcttgagcgagctctaacccggtcagcttctccttaagcaattcaacatctctcatggcgtcagataactttttatcagtctcttgtttgctcctcaacgcaaccgacacattcctctcagccgcctctcttcccgccaatgctgcttctaactgcccttccagaatcccatttcttcttataagagccgtcattttcgcttcatggaattggtacacgctcgatgaggacgctgatcctgcaaagttgatattatccatttcttggaatatcaaggcgccatcaacgttttctaaaggatatgtttcagagcattgcttctggagacttaagatttcacggtcagaaaccatagaaagtgttttctctgctgtaatctttgctcctccagtattgtcatctgtggtctgaaaccaagacaagacgttttaaaagcaaattcaagaacgtcaataaatgcaggtgaatcatgaactaactatatataccggaggaggcacggaaatgtcttcttctgaacactttgcgggttcaatcaccgctctgtattcctcttcggtgctaaactgtttacgcaaagagacatttccagaaggtgggttacgatgatcaccgaaagcaatctctgataaagaccttctaccagagccaccatgctcttcaatggctgaagcaagtttctgtctggcaactgaatcaatcagcctctgtgaagaggctttaaccgattcatcagaggttaaaactgccgaggaagaagatctttttccaaacagtaaccggccggggtttttcttggaagttgtttgcggatgtgttggtgattcactcttgttcttgtcaatggtaaaagcatcgaccttttcatagttcagacatagcatcaaaacacatacataaattgagatcttgaacaatacagcggaatgataaggctcgaacctgatttgaaggatcttttttcgttcctccaaaagctacaaggaaatctttatccttgtgttgcagaagaactagactaaatccctatttcaaacataccacaagacaataactgagcttttaacagatggggttgaaagaatatacaagttagttacatataagaatgtgatttttctatttatccaccttgttggatgtgacagaagattgagaggagatgcttgctacagaccactcgaccttaaggatatcgaagaccaatgtttccgcatgtcctggaaaagcaaagcaaacttgtaagatccaggtaacatttagcgcagtttcgaagtagaacttactcttctttctgcttcctcctccggttatataccatttagtaccgcaaagaactccacaactacccgctcttggtgatgggtgaaatcctcttatctttattcttgaccataccatcttgatgacaccaagagataagagatgttcaatgtcaagaaaccaaataaataaaaaacattatagcaataagtattaccgtttcaaagtcgagtgagtataagtcatttagtgttttgttcttgcccgaacctccaaacacaaacagaattttgtcgtcgaataacgtggctacatgatgtgaccttgcacacggccgtgttcctctgtttttttaatgagaagaaccgtatcaagaaatcacaagtaggagttcaatgtaaacaatcatcagaaaaatgttaaaaagtaaaaactcacgtgcaattaagaggaagccatgtggatgatttgagatcaaacatatgaagatcgtttagtttcctcttcttagagtcttcaccaccgaatagtatcaataccgaactagccctcaccactgtgtgaccgctgcgactgacctgcattttcatatccaaatcagatttttttctcaagtcacttcacaatccaaaccataaagccacaaacttctaaatgtataatgaggactgagagttaccggtaagtctccttttgcatccattagtgaccagcattccgaatcagtatcaaatgcccacactgccaaaaatatataaactttagaattcaaacaacaatgtgaaaacttttgaatcaaaacaacaatgtttaacctgaaactctatcactgctaggatctgtttttccacccaccaacagcacttttttaccccaagagacctaacaacggataaaaacaatcaaaacaaaaaggtgtaaaacaacaaaacagaaacatctttgctcaaactagcaatcaattaccaagcaatggcctttccaagcagggatcatgagaggaagactactcggcgataagtaaacttttgaagatgcggtggaccatgtacatgaatcaaagttaagcacctgtagatgcaaaactgagaatatcaatctctttaaccaaatactattaggatttgattagtccatagtcattttacctgtacatcatccaacaagccactaccagactctccaccaactactatcattttgttcccaatagtcgccgctgcatgctgcataaaagtaattaaaacaattagtgtttcaacacagttcagacttgagaagctaatgactggaagagaaacccgttacattaaagcgtggagcgggtttttcgccattaaccgataacaccatccaattttcggaattccctgatgaaggctggaaatcaagttcatcagaataactagttgcagcaacagcagcttcattctgcatcatgtttgcttacaaatcaaataacagtcaatgttatcaaaaaaccagttaagtattgcagtcttcttatataacttacactagagctatcagcgcgtttggtcactcgtaaaggactcttatatccttgaacagaatccgagagctgtaccttcttaactctgatcaattacatccccattcagaaaagaagcataatcagttgaatctttagtaaccatgaaccaaatattgattaaaaaattgtttatcaatctaaaaatagaaaccccaaatcaagaatcaatggtacttcataggactaaagaaaggaccaatacttgatcctataacaatattataagagttgcttttgtagtaagcttaaacaggaggattctccaaaaggtgattcctaaatccgcttaaaatgtaaaaaaattgaaaaagttaaaagaaaccccaaaaagttggcaactttcagaaaatcaaaagagacccacaaaaaggtgatctgattttacataagggtaaaagaaagactaacctgccaagtctcatgcgcctctttgaaaagctgaacattttcttccaatctcagaaatccccagaaaaaataaatcctagcaaaaagctcacattgtcatcatcctaagatgcctaaaagcaagaaatttatctaactttttcttaactttgcgaatctaagatacagaagtttaccaaaatccaaagaaacagagatccacataacaggccaaaactaacctgttttggtttgctgagaaaatccccagtaacaaaatagtgaatagaatcaatttcagagaatagccattatccacagctggagacgaacccgaaacgacgtcgtagtgaatcctagcaagctgtttctggggccagcagagcagggaaatgattgaaggggggagtgatggatttagctaacggaagcatataaaaatgttgtctttaagcaaataactaatgaatgggaccaagttcagcacaaaagcgaatcttgtaatgatctgagcttagcccgttcgagagtagagactagagacagagagagaaagagaccgtctcttgatgtctttgatggttcgttgagttatggcaacatgttttgtctgtttctgcgcaagtatgtgattggagtttacgagttcgccgaagatatttaatgctcgcgatttgcgacgcctttgtgggtcccagcttcttttgaaaatgtcttttcgatccatctctttcaaatatagtaagactttgctagtttttacttttttacattgtttttataatatagtataaattatataaactattttaaaaatttagtgattttaggggaaacaagaaaaacagagtcacaagtcacagcaataaaaaaaattgttaataaattcattaatcatctacatgaagaaaaataaataaaacgtcaacttaatttataggcaaataatggatatttactttacctttgacaaatgacaaatggattattattaagatgtcgttggctactagtttcaagtttttgctgttgtgtaaagtcaaatattgatttttcggtaatttttgtccgagccctccaaaaaagtattattagtttgcaatcttatttttcttcatttagtatattagtttatgcaggtcaatatatttttatttcatagaagttcgtatcagtcgatacatatcttaaagtaagacaaccaaaaaaaaaaagacaacacactgattattgatccgacgtggactcatcatatcaccatgccaagatcatagatgtgttaaaattattctgcgtacttaacttagtgttaagtaaactagttaaaaacatgataagtcaaacccacaatgcaccagcccgcttaagcatgggaatcaaggatccgttaagatgtagactcatgacctcgttggctccaccgaccaactctccaccaatgaaaacgcccggaactgcggggctacacccgagccgcaacaacgcctgctcgatctccctccctctagatatctcatccagctcgtaaaccgctggatttgctccgaaatcgcagagcaaagtcttgatcgtgtgagacatacagcaagagctcttgctgtaaatcaccaccggtctctccatcaccatcttcgttatcatatccattgctattttatatggtatatgatccaacagcttcttaagtcgtttcttaaataggtctatgaatctatatttatgatctcttagtatatagatcgattttttttttgtagagatttaaggaaaagaagtactcttgattctacgtggagaataagggtattgtgtaaatgttgtgtggatatatgaaataggtgagtaagtgttagtttatatagaggcagagaagacgatgatattattggattagatggggaaatatgttgggattttgtttctaaggatatcgtgtccgaaagcgacaacaagttcaattttattttggatcacaaaatgtaagtgattgagaatctaatgattttcgaacttatctttacttttcatttttattgtccatttggcatttagaattagacctatgtatatagtcatctctaaaaggtgagaatgtcctttgtacggttccataaagcgatctatagtcgatcaatagacaatagtcaatctcaagtaatattaaataaatacctaaatgattgattaataaaggagaagggttggtttatattgtttttaataaggtttgtattgttaataaggtttatattgttctcggctataactcattgtgactcaacaaaaatttactagatttcgtagctacaatatattgaaaaatcagataaaatcacggatttttttgaaaaagtaactagatagacatcccgttgataagtcactggatcatgcatgcgcatttataagtaattttcgacagttgagtttttttaaaatagtaatcctgtaaatctagcattctactcaatctaatgtcgataattatttttatgtacaattaggatacctagctcccacctagtcctttgaggattagcatcaaaaagtgttcatgagatttgattctgcactttaaattcgaattaagttaatatctaattaggatcctctaatcgtttttaagtttcacgaccaacgaaaaacattataagtttccgaatgtttcctaccataattactaactataaggtttagagctaattaagttggatttcttgcatatgcattttgttagatttgagtctctctctttctttctctctaaaaacggaatatgtaaagcctatcagaaggcatcttatgagttggagaaatagttatccaaaacgagggctctttttttctttaggccacgtccccttctccaacgtgaggattctattctcgactcgccacttccacattttgtaactcatcaaaaaaaaagaagtaataattataagtgagaggaagagagaaagattctacgtatgagctaagcatttcatttgctttcatggtgactaacgaattttaaggacaacgaatcgagaatacgtatgaaagtaaaaacacatacagacttgtatgtatatatgcccttgaggtcccctttaaataactttttcaggcaaacacgagatctatttaaaattccatttcgctaatcatgttttattggttagcttaaacaatgtgtattttgtttttaaatgcacacaaacatcaaaagcatgcattgtgcccatgattttttgttcttttcggcaaccgaggagttatagtctctttggaccagaaattactaatgttaattatctgttggtagaactcgaacccaagaaatggtcattacccctccccttcaaaatcaccccaagatcaattggtagccgacgatgggttagacccggcccatgcatgatctttaagatgtgggaaaacaatgcatcagcaatcagaccaagatcattttagatatgcatatatattctcactagaccatgtcgtgatctggtcccatgatgtcggataagatgcgtgacctagacgtacggtccattgcaacatgccaaacattttgagattaatcacatgtacatataaatattaattaatggttcgactcaacagctttataacagaagaagacatatataactggtatgtgataattttccaaataactaaatctgtttataaatagggtatatgtgactgcaaagcttgtttcaagaagcaaacgtgatgctattatttcattgacattctgacgattatatatttataatatagaacaattgtcatccttgatttagtaggatttatttataacctcttcaaagtaattggccttttagttaataattccaccgaatccttggttgggatgtgttgatggctacaagcacgcgaaaagaacatttatccaatacataaaagaacctttctttttccaaactgcagatgctcctttatagacttgcttacatatatcataaaacgataactacagattcgatgatggttgcatgtacgactcttggacctcaaagtttggcctgctagaagaccaatggccaaaatttggttcatgcatgcatggtggaaatgcctacaatatgttattcttagtttgctaaatataatatagatcttttttattttcgtcaaactttacaaaatatatatcagtatatcacacatagatataacaaaaatgatgtgatttaatttatatatcgcgttgtagtactattacataaaattattttaagaaaactattgtccaatgaagtcctaaaattttggtttatactggccattgatgaattaagtttagagggaccaaaatcattagttgcacacaaatattgttaaaagggttcttgtatagtgggaagtatatagattatacggaaacaaagaaaatatgtacgttataggataagatatatggtgatcaatatatatgtcttcgtatgggatatgttatacaaaataaaaataggaaaagaatgtcaactttcaatacttaaatacaagataatgtattcttagaatttaaaggtgatattttcctgtcatgcaatttgaatatgtcgtgaacagcctatatatagaataaaatgcgctattatatttttataataatcatgtgatgtacatgtatgccacactttatggttttaaaaattgtatatataaacctactaaattaattaagttaataataacctatgtcgacgatgataagaaaataggaatagaaagcgaggacgggtcgcagcgtcacatattaccatgcatgtattgtcacccgtacgtcgtatggttgcaactcaaatcgcatacatacaccgattcatgacttaaaaactaaataaaatttcaaattataagagagatgcagaaaaaagttatttggaaaataaaattctctttatctttacatatattcgtgtgtttgtctacatatctctataattacgtggatgtatgagattggtaaagatgagtttggcgtcagctaagaaaatgttccaatccgctaccgagaacgcgtgttcccacaaaacgattcggaatcatattcctcatttttatttcttgccccaaataaaattttatttagaagtctgtgtttttgaaggaaaaaaattaattctccttttttggcgtcaaacaaattcaccttttgcgatattaaattgtagattcttttgcacctaaaatatagataaacattgtgttggctatatagcatcccaaagggcaatatcagttgttagaattttaacttattaaaatttaacacatatatgtatgtgtgtgtgtgtatgtattaaaaccgaacaattggaatatgaaaagataaacaacatcgaaaaattatcaacgaacaagattttttgttttatcaaaaatcaacgaaccagataaaaagcatatttatgatcaaaattagatcatggtatacaaaaaagcaatgcgccaatgctgcggcggatagaaaaatcagaactttgaaccaaactcatttcatttaacggtcatacaaacaacaattaccaatgtgttatttgtacttcatcatctcttttgatcgtattttaagcttccatatagtgcatttggaggcagcagaaggagtattaacttaataatcagacgttccctaatgcccaatatgccaaagaacgtggcgtactagcgtgttctcatcagcatttgtgctctcttcttagttaagttcttgttcttgcaactacttttatttttaactaactcatcattttatagggcctaacttctccgataagctgcttggtacaagataaagcccatacgacccacgaaatgcttgccaaatccaattaaataattatgtaaataaagttcactaaaaatcataatgtatagtagcatgtttttttttgggtgtagttacgacttacgacagacgagaagttgaaaacacaacaaaaaaaaggtcaaataattcatacaagattaacaaaatgactcaacggttacgtgtagatccgtgtttcactgttttggaacgctaactttaggcagcgctttgacaacgtttaccacacggttcctccaaagtcgaaataaaactagattggatcatttagcagaaagccacacacgtcacttcgttttccaactttcatcatcatatcatataaagcatatcattattttctttttccaaattcatcagaacgttatatttttgaaatgggaattgatttttttttttttttggattaccccggagtctacctaaactaataccagtagcacttaccaaaaaaaaaaaaacttaaaaccagtagcagaacttccataccaattgttcattttttttattatttttttgtgtgtatttattaaggtgtatattacttaacattaaatctgcgtaccgtaaaatgatccatcattttatataaactttatgctagtcataaactcataattcttgcaaaaaaaaactaaaaaaacaacaactcataattctaatttttatatatattgtatggttggatacgaattattaaattaagcgaaccccctctatactattagtcctggttacgtgtaacgtaactataggcttcaattaattcggtcccgtttccttatattacgtgatatttgggaaactactaattttttttatcttttgccggaccaagctctttcaagcaaaaaaaaaaaaagaagggataatggattctgatttaaagattaccaaacaaaacatggattctgatttaattatgaatcatgtactacttatttaagggaactaaatgtataatgtttaccaaaaacaaaactaaatgtatagtcaaattcactgatatacgtcagattatcatacgtcagtctgattataaatttggtcattagtcaatgttgatacacatattattctctaatgtgaaaaggagaattgtatggttataatttgccgaacgacaacttctatacataagaatatttttctacagtcagttgttaagttagtgcagggattaattactctataacaatgaattaattatcgcgtatgaaatttctttttaactataaaattgtctaaaaaggagatcaaaagagtgtgatttgcttttgtgcaaactaaaacaactcatataaatctaaatttaaattgaactaattaaaagattacaagttcagccaccgaatctgtgttacaattgaagttacaaagttgttaagtacatctttgtaaaaaatttaagcacacgttaagggggtttggtcaacaatcattgactacacttaattattccacgtgtcatacgatgaggggttcgacggtggtatcagtgtattaaaaaaaacgtcctcttgatcacgtaacaaagtccataatgttttttttttccgacaacggaggcaattatccacaacgctcatgtgcattgtcttgttaagaaactctccatagctgtttaactgccacgtgtcgctctatctttaacagtggaacatggagacaacgatgtacctagaacacacgataaatcccttcgctccgctatatttcctaaatcccggtccggaggtagtggtttaacttaatttttggttcaaatatattagttaagtattcggttgtatttaactaattaaatagattacgtaattgtgaagagcgtggcactcgcacatgtaaattttcttaacaacgcactctggcacatacagacttgttgatattgcatgtatatcagattataaaattatagattcgttacacaaatttgctgatgtttgactcaaacaaaaagttttgtggactaccatgagtaaagaaaaaaagaaggcaagtataaatttgcattgtctacgaagtacgaagccgttaacccgcgcgattaacttagattggtgtcgtttaagatttttttttgacattcggagtaatacattcggttcgataagagattatttacaatacaatataagttaatgatgatctagaaaatatatatcgtagtttaaaaatgcttcataaatcagtgatgtaatacaaaaaaaaatacgtctcttagaaatttacaaagttgttcgttaattgtttttcttggtcaatgactcggtgtttgtttgcttcaaagtttgattagtaggatttgtaccactaccatgtttgtatgaacaaatatgaactactttttagacgtgaatttatcttttgaagtatataaagactaaacggttaataataagctggaggagtaaatgtatagtctttttttttttttgtgactcgtgagtcaacttgtttgatgtttcttttgagccggcatttaaaattagaccttttccttttctagaaaactcgctttataatttgaaaaaaaaatagaggccataattatttttaaagttgatagacgttataatttgaccaaatgacttgtttcaaatacgacaagattcctgttatgagtttttttttgtgtcataagacatttggaggttattattctggttatttgttaacatttttttaattgtaggtaatttacactgaaattctactaaatccaaatatatatagaaaataaaactcaaatctaattctgtatatattaaaacagatcgaattcttaaaaaaaacaaaacataaacttatgaccaactatttacgtttgttttaattaacaaattcgaatgaattttaaaatacttggtcaaatacaaatgaatagaaatgaaaactacagttgcaataatcatttcaagttaattatcccagacataattatttttgaaacattattctctaattcatgtagcagtactgaaggaaggtaaggtattttaaaaacttaaatctgattctaacaactatcacaatttaattgtagtaaactaatttttgtatctgtatacaagaaaatttgcatagtacatggatataatacactactgatagttatacacttatacttaatgcataggccatatagtatttgtaagttcttaaaagaaactacagaagtttttaaataataacaatgggattcatgtaaatattattgtctctgaaaataattatcttaacaaaaaaaatctggaaataataacgtatatttttgaaggatgaaaaaagaaaaagaaagcgtgggcttgagaatgttgctcacaaagcgtgaaggcatatcctaatatgtgggtcctactttccgaccgcgatgattcttctttctctcccgacgccattaatttagcctctaagtgtaattagttaattattttgtttttaatatttattttcgagttaatttttaagaagattatcttttctttcgagttttatcattccataatgtttaagatatggaattatcaagagttctatacattaatgtcagtaatgaaatcgattaacattagttaaatttattaattaattatatgccatgtcttgtacttaaatttattaattaatttaatgtacctcggaaacattttaatatcagaaacttttttttcaaatcaacccacaaaagagaaacaaagagtgtataatgtactgtaacaactttaatcaatgttaaaatatatcagtatcaacattaatataaacgaacagaacaaaatgaaacaatcacaaccaaatgctttttatagtttaatcaacaaagacatgttgaattgaaacttgatgtgtcatcatagcaacattttattttttgaattgaatttattttaaaaccaaaacatgtagtaacgaaacaatagattttaaaaccagaagattagagccttgtacatgacatatactacataatgttaatcctctttttttacttaaaaccaataatgttttctactttttcccccccatagatttacatattaagattcactatacatcataaaattgtcatacattcattttaagagaattaaaaaatgtctaatacatttgaacaatattcactattttatggtgatagtgattacatgtcaggtgtgaaatattattttgtatggaatattttatgtagcattgtgtttatatattttactaattttgtaacacaattgacaccacatctggttcagctaaacttgtgaaaataggcaagagatctaacattaatctcacatgtaaacggataatgattcacttaatcttgtcttttaacttttccaaaaaaaaaaaaagacagagattttcctttgatgattttattattaaatgtcaaaaccgattaaataaaaatttcatatcttttctttaccttcccttctcttctcgcgtagcacccacatcaacccaacaaaaaaaaaaaaaaaaaaagagtttcctcgatttgttgatcagccgctggtctcgatctctctccaaagatctcaagtgagacacagagatgcattgaaataaaaagtctgagcctttttcgtctttagttctcaagtttcttgtttcgtgttacagtaacaaaaaaaacaactcgagatgtgttgttgagagcttatgttgggattctccggttgattggttttgtcggtagtttttttttttgtatttgaatttctccgagggacttagcttcggagatgagtgggtgtttgccttgttttggatcttcggctaaagacgctgcttctaaagattcggtgaagaaggaactttcagctaaagacggctcagttactcagtctcaccatatcagcttaggtgaaatttttcattcaaacttttttgggatctgttgagttttcgtgtcttagatcgattttttttagttactgggttctcgtaaagttcgtgtctttggtaatgatttgggaagaaatgttgatgtttctgatctaattcgtctgtgagagctgtgagctatggagtttgtggactataatttctgagatctgatgtgttttgggaggtttgattatagttagtatacaatttagctccaaattgttgtttgtgtccagattctgtttagttccctatgtacatggaatgcatagttctctatccaacaaacaatgaatcataaaaatgttagctttaaaatttcattattgaagagtcattgataaggatgttctgtaatagacatcactagtttagcaatagtagatatgaattttgtttcctgttgattgaagttaaatgtggaagctctttatctttgaacctgaaaagtattagggtttgagttgattatgattttttttcgaatttgaatatagcatgggtaatgttatgtgttccctttcttgtaagtactaacattttattttatttcggtagataaatcaaagtctcgacgaggtcctgaacagaagaaggagctaactgctccaaaagaagggcctactgcgcatattgctgcacaaacctttactttccgagagttagctgccgccactaaaaactttcgaccggaatgtcttcttggagaaggaggtttcggacgtgtttacaaaggtcgtctagagaccacaggacaggtgaagttcgtaaattgaatttaatgtttcataatcaagattcgtcttctaattggatttaatattttgcagatagtagctgttaaacagcttgatcgaaacggtctacaaggaaacagagagtttcttgtagaggttcttatgctgagccttctgcatcatcccaatcttgtgaatttgattggttattgtgctgatggggaccagcgtcttcttgtgtatgagtatatgccactaggatcattggaggatcatctacacggtatgcttagtgatatttccccactcttaacatggaattgcattattttccataagataagaaacctttgcatttttatttgaaactaccatggaccgaatctgtggcaccgtctactgtattgtagaaggatgctttgttgtatttgatatattgggaaagtcttttttacttttcttaatctgttcttccaaagctatttatggtgaataaatggaaatattagcttgtaatagttctatcaagtgcatgtaacgattaaaactttgattttcagatcttccacctgataaagagcctctagactggagtactagaatgacaatagcggcaggagcagcaaagggactggagtatctgcatgataaagcgaatccgcctgtgatctacagagacctgaaatcatccaacattcttctcggtgatggctatcacccaaagttatctgattttgggttagctaagttaggtcccgtgggcgataaaacacatgtgtcaactcgtgtgatgggcacatatggttattgtgcaccggaatatgccatgacagggcaactcacattgaaatccgatgtttatagctttggggttgtgtttctcgagctcatcacgggtcgaaaagctattgataatgctcgagcacccggagagcacaaccttgtcgcatgggtatgttactcaactttttcttatatcaccaaaagggaaaaatcacaattttttttgcgctctcatgtgatatagtcaatgtttgggatctgaaaacgtctttactgacttgaactgttttgggggttctctgtcacttgttggtctttgcttggctatacaggctaggccgttgttcaaagatcgtagaaagtttccgaagatggcggatccatcgctgcaagggcggtatccaatgcgtggtctatatcaagcacttgcagttgcagcaatgtgtttacaggaacaagcagcgacaagaccactgattggcgacgtggtgacagctctaacatacttagcttcgcaaacgtttgacccaaacgcaccaagcggtcaaaacagtagaagtgggagtgggccaccatttatcagaacaagggatgatcggaggagcttgggagatgggagtagcttggatagtcctgcagagactcggagtcggttagggtcaccagccactcacaagaactctcctgattacagaagaagggatatggtgagggaagtcaatgcaggatcagaaggtgggagcgagacaggaggcgggtcaggtagaaaatggggattaagcgatttggaagggcaagaatcacagagagggagcccggcgagtgttgggagatcatcgagaggcactccgaggaaccgagatttagatagagagagggcggtggcggaagcaaaggtgtggggagagaattggagggagaggaagagagctaccaatggaccgggcagctttgatagtacaaatgactgaaatgggaaagatgaaagcttgtttgaaaaatagagaacttttgtcactgtgccaaaaggcaaagggagagaggctttgggttcatgcgaacattttgtcgagtcgggtcggtcagttgtcgaatttgatgtctgagtcgagaaagaggactcttcaatattgtggttgaagctgaagaacatatgaggaagagagttcaagaagaatgatgagtagttggggacgattaggaggggaagaaaaagtttattttcaggtgatgtttttggggtttttttttttttttttttttttttttttttttttttcttcttgttcaatgggttgtatatgtaatatgggagggaggattcgagtcgatttttataatttttctgtactatttaatgtctcattgtgtatggattcaggtttcgagtctacagacagaaggaaaagaagaaaaaaaatctatctttgaaagacttctcttatcatctacaaatctacatttgtcacactcaattgggaagttgtgacaacatgagaagagacgagagagttatgttttgttcaaatccgaccacaaaagttgatttgagatttactaaaaacgcactactaggaatgtggtgaatatttctacaaacaaaatagagtaaaatacacgttgaagaaataagagaagtcggagacaatgcagtgatgcttgcgggtacaaaatattagatccttgtctctaaggagcttcttctaactaattctccgattcggaatcaaacctagaagtgatcataaatctttctgattacttagtgatggattcaacacaagccttcttatttcctacgctttccctgcagagacataaagtttttttttagttaggatcagaaatagatggtctgtctgctttgcatgaattaaccagtaaaatgaaaaactctttttatgttttggaaatgattttgagtaccgagctcacataatcatccattgacagctgctttcgtttcttcagaagagatgaagggctctcatttgcttgcctacccgaaggtcgttttgatggcgttgcactctgaaacaagttgtagaacagatcatgagaaacaattccacagcatctcatcagtaaatgaaaatgtaaacttaaaatgttcttcgcacaaaaaaaaaaaaatgttccttcaagtcctcacctttgaaagcttcttctcttttcgggcttgcctctctctctcatcaaattcttgattctctttctcaatcaacctgattagtgtgtcacatctccttgcaagttcctgagttgtgcgggattttacaaaccagtcaaacctaaacaagggggatgtccgaaacgctgcctttagctcatcccagtttccatacccaagtttatggaccatgcatatctgataatcacaagttcatcgggtcaatatcatattagaataaaacaataacaatgaaatctcaacaaagagtttgataaatagatgtcataccatgaaacggtcgcactcttcattgtacagcttccctttgttctgaccatattgaatcttcagttccagccacgggtttctgtagcgatccagtttcttcccaatagctttcatgatttcatctttcctagagattcttgcttcccctctctcaatattcttgatgattctgtcgtaatctacaatttttacaaaggaaaacaagaggcagagcttacttaggataaatatccaactttgtcgcactgcaaacactcattaactttacttaacaatctaaagttactaaccattcagctctttatatcgcacttggaaaacttgagcatatcgttcaacctcttcctcagttttcccttccatctcagaggcaatactctttatgtcgttccggccatacttctcacaagccctaatgaaggcattgaagtctcttctgctccatgttgagaaaccctaaaaaatatcaactccattaaattataaaaaaaccatcaaaaacaaatgtcaacccacagtaaggtcgaatggtttggcttgcctcttccagcaatagctccttttcttccacttcttcagcagttaagggatctccaacttctgcaaaattatttcttaagtaatagattcagtaaaataatgtaagaaaagagggcaaagactgagaaagaccttcaggttcatcaacctcaattgtgtctttcatttgagttttctgatgtgcttgctgaaaccagagtgaaacaaattgctattcagaactaatcagacacaaaagctgcataaattacataacatgttgataaacttgttattcccaccataaggtatcgcacttctttttcatacagctcagtcagcctctgaatgttaaagaactgaaaatcatgcctgcaggatggacaagaaattagatttttacgataaaagtactataaataagacagggaaaaggctaaatgcagagtggagacaattgaggtactcacaattggggcatgcgtggaattctaggctctttaggtttagctggagcaccttgtcgcaacgtttgcttgaagtattcaacttcagagtagctaaagggtgggtagagaaaagtaaattgttgaagttagatattgtttaggaagacaggatagaccacgtaatgaaaaagtagaagtaatatttacttgcgctttctctctctttttggtggatcattccaattttcactcacaatctttttaaaatccaccttgctctcatcctaccaaacaaaattaaaaaagaaatcaggaaacgatattcgaaaaactgcagagcataaccacagtatgcgttaaacctttccttcaatcattcaattaattatccaagaataccttgttgtcatcgtcaaaatcataaaagtcagcacctgcaacaaaccaaaaactatcttgtttggacatcccattacccatgcaagggagttaccattggaaaaagggataaatagcacacttactgtcatccattttaaactgtattgcatcttcagtaaatttcttcatcttggcatcaagttcagccgttgcctcttctcctttggcaatgattctgtcaatatcctcatccgtaattgtgctatctttagaactaaacaccatttcagcaccatatctcaccatttgaagcaactcatccttattaacagctggaaagcaaagaaaagaaatcagtatatatatgtaagagaaaatccaatacatctaacagcctcagtacacaagcacttacttttctgttctgccaatctcccttgctgaataaccagagcatcaagtgccaacttcttgtaagctctctcaatgactttagcctcaatagcattctgcataagaccaatgcagaattagttcaagttctccaggtcattcttacttcatacacatgggtacaagagtaacctcggtgcagaaccggaacacttgaacttcttttttttgaccaatcctatgtgcacgatcctgagcttgcaagtcaacttgagggttcctgccataatccacccacctcattaggcataaaagaaaacactcataaattacaatggacacaaaaagagccttaccagtcactatcatagaggatcacaacatctgcagtagcaagattgataccaagtcctccagctctagtggataacaagaaaacgaatttctcacttcctggcttgttataggcttctatggaagcatctcgttcgtcaccaccagtatttccatcaatacggcagtactggtaaccacgatacattaggtaatcctcgagaatatccaaaagccttgtcatctgatacagatgagcaaaatcgttggaataagcacaaagaaccaagaaagatatcactcagaaaaaaggaatcaaagataggaacaattatttgtttgcgttaatgaatacctgagaaaatatcagaacccttgaatctcgatccttcaacttaggtagcaatttatctaagagaaccatcttacctagaaacaagaacatgtaaagagaaaataactaagccaattgccacatttctgaatgatctacttgtaatgtaaatcttacctgcgtttgttacaaggtgatctcctgtagtatatgggggaccaggctccgcaccctggaagagataagggtgattgcagcatttccgcaattgcattgctatgttcaacagacgtttgcgttctccaccaccattaaccacttcaagatccttctgcagtaaagccttgtagtactgtttttgcatttgagacatgccaactttgagtattgtctccttttttggaggtaagcctttctctacatctgattttaacctccgaagaagaaatggtcgcagaacctacaaagatgaggtaaatgattagcataagaacttagagaataaccttgataaaatatgagtacataccttgtgaagttgttgaacaacttcttgctggtcgttttcaccagaaatttgaaaccactcgtcaaaagtttctgctgaactaaaaacctcagggagaagaaaattgagaagggcccacaattcatggagattattctgtagtagaaacatatgaaatgaatacaatattaactcaagcaaatcaagtacagaagatagtaagaagcatgtctaaggaacacgaaaagaaaaaaaaactaagttcaacagactcaagcaagaaagtagtttcaacataggcagaagcaatctgacagaaaaattgaaggatctaaacaattatagatcaaaagatttgacaagtacctgaaggggggttcccgtgataagaagccgatagttggtgctgaaaagtctcatggttttcgaaaggagtgaattctcatttttaattcgatgtgcttcatcaatgattatatatcgccagctaaaacggcgcaatgttgtcttctctttgatagccatctcaaagcttgttacacaaatgtcgaatttccctgcaactagcagttcttcacgaatatgtctctgcattatttaaaatatatctcagaatcctgccaggtgcatataaatgcaaccattcaaatgtaagagctattatgacttactctttcctcgggattaccgagaaatttcacagcacgcaggacaggacaaaatcggcgaatttcattcatccagttaccaagggttgattttggagcaactaccatatgagggccattaattcccctgtactcatgcaggtaagccaacaaagaaatggtttgaagcgtcttccccagaccctagaccatgaacaaaaacaataaagattagcatcagataacattagagagctgaaaaatcttattatatgctaagataattagtggtttaccatttcatctgcaagaatcccatttatgccgttctcatacagccgaatgagccagtttaaaccagctaattggtaatctcttaacttcccctgaatacctgcaatatgaagagtatgaagatcagatctctaaattctacagaatttatgcagtcctacctagaaattgtgagctcgcaactgaagaatatatcaaacaactctaccaatcaaagaagtgggcataaggtgtcaaatcctataataacttcgactcgcaataggacttgagcaaacatacgctatatcaagatattaggagcaaaacaaaggtacttacaagcgggctgagtgagcaaccgtgtgcctccagatccaactataccaccctcttcttcttttaaacactcttcatcttcctcttcctcggttagtttggaagaatggcgacccctgacgataaagtgaaacccaataaattatatttctggaaacttaatatgaataaccacaatttattttgagataagttgcactcaacacaccttccttttcccttcttctgggacggagacgggtcacttttagcaaaatgtgcaaataactcagtttgctgcagaagatactttatcctcccctttcctttattgttctaataaatggaatgattgagttatttcaatacctctggatactaaagacaagcagctcagttatttactaacttaccatatcagcatctatggaagcattttgggagtctaagatttgctgaattttctgcttcttcatcttctgcatttctttgagtctagccttctcacgtttgctgatctcagctttctcctcgtcttcttcgtcctacatataaccatcaaattatgaaaagagtgaccaaatatcctcacgagtcacatgaatgtaccatcataatgagcgaccacccatcattgtaagcacttctaagcataaaccttcaaacaaagagagtcgaaaccaaaagacacccaaatatcgaatatacgctcaaaggaaaccctaatcttacttagaatacattcagatttccaaatacagcaatccccgaattcacagccgacatgcgaatgtaaatcgaagagtggaaaacagaaacgaagacatacctcttcagcgtcatcttctacggggacaacctcgtcgtcagagacaggtgcttcgtcgggcgcaacatcttcctcgtcagagcccgcagagcgagcgacggcctcgagctcgtcatcatcttcttccacattggcctgatcgttaacttgctcctcttcctccgacgagtaagcctcgtctgaagaaacttcccgcttcgaagctctagccatcgacgcgcctctacgaatcctgatttcgtctgagagatcgaatcgagggttcctgagttttttttgctttggttagtaaataaacaaaagtgaaattaaaagcaacaaacccgacgtttgaaacgaccgtagcttctattttaccccgttgatttcgagaaatcaaatctacggctgagatgtgccacgttggcttgacttataaagattctcccgccacttgagaagtaagagtttcggaaattcccgccttggaattcgggctttaaaggcccatgggctcgaagttaaacttagaagaaagcgaaagtcaaaaaggtcaacttctcgttcttataacggaacggccttatccatttatccgcccgaatcacgtatctgacacctcagcacttgaagttgcgacacgctacacacctaaaattccaataataccctttgaaagagcctacacgcttgtctcatgcacctttgcgtatagaggatgaaagtggaagttaagaaaaaaaaaaccgaatattcgtattttaatcgccgtttcttttcttctattagcttctgtttcgcaagatcacgacttctatataataatatataagctcgccgtataattttcttgccgggaataatctccgatcatcgtcggaaatttccgaattgttgtaaaagaagtccaatttaggctttggatcctcagtttaatttatctgggacttttggttgctgaaatctctttcgggttttgtcctaatcctcattagtttgggtttcgtgagtctcgttttataaggtatatttttggctaatttgcttccgaattctgctttgttttagctcaattttgcccttaacattggttgatgaacagaggatgatgtggttgtgtttattgtcttcttgcagaacatgggacaaaagagattgttgttcttgctggcagtttttacttttcttgtttcatcttcatatggtagaggtggtaatgcaacttctataatgattctatgtctgtttcctttattgggacttccagtttttttattctcctgagtctctctgagcttaattaagattttaaactttctgtgtaatgtgaagtgcttgggaaattggaaatttaatctggctacagtgatttttcattaaggcctaattacatgttctatcatgtttggaacaaatcaattcataatccttgtagcatcatcatatacataaggaaccatgaaggtcaaaatattgatttcaaagctttatgttttcgacaatttcatgttcttggtatgagttgtgaggctacgaaggagttaagactgaagcaagtggatttatgttagcttctttcttctaactgcagttctcaagttgaagagcgatgatgatcgacctgtttacaaccatacgcttgccgtcacgcttgtggagtatgcctctgcggtaagttaatggcagattagtgaagtagtaaaagacctttgataatgatttagcttcaaaacgtaataccctgtagaacgaatgtcatttatatctagtgttctgcaagtgagaagaaattacacttgtcctcttcatattttcatttatcattatttgcactactagagaaaagagatgatgctgataacgtacataagatgagtgaatcaagtttgtaagatgtatgcaggtctatgagtctgatttgacaaaactcttcacttggacgtgcgaaagatgcaatggtttgacaaaggtaaaaaacacatgttgaagcagatcactgtttgaactttgaagccgcaattattgagttgagctctaacgtttgttaggatggtgcaggatttcgaagtaatagaggtcatatttgacgttgaacactgcttacaggtctgctctgatatcataagctacagctggtcatgaactcatgatgtttcttcattgaacaattattaatatcagtacatgtaacttgtaacaacaggcgtatgttggggtggctaaggatttgaatgctatcattattgcatttcggggaactcaagaacacaggttttattctagtcattgtaatctaaaagctactccttcgcataaacttggttaatgcttaatcaatccaaaacttgtgcagcatacaaaattgggtctcagacttgttctggaaacagctcgatctgaattaccctgacatgccagatgcaatggtacactttaacaacaagtatttgtcattgagttggtcttgtagtacggtggaatttgtaatagttatccacattggcaggtgcaccatggcttttacagtgcttatcacaatacaactttacggcctgcggttttggatgcaataacacgagtgaaaaaagtctacggggcgaacatcaacatcatagtgaccggtcattcaatgggaggagccatggcttccttttgtggtctagacctagttgtaatcatccttgcattgaattttttttttatcttattgttttgtcctttgagttgttaatggcttatattggatacaaatcgcaggtaaatgaaggtgaagaaaacgtacaggttatgacatttgggcaacctcgtgttgggaatgccgcttttgcatcttattacagtttgcttgtgcccaataccttccggatcacgcatgaccgtgatatggttcctcatctgcctccttactattaccatttccctcaaaaaacataccaccacttcccaacagaggtaacatcactttctcagtgcactggatgtttatcagaatagcagttttaattttgcaaaaatctggaatactcagtagtgatcagacaaatttctccgcttggtttattaactttctgaaaaaacgaagaaagcagtaatggtgtgttccgggatgcaggtgtgggtgaaagatttcagtttttcgaattttgttctttttggtttggagaaagtttgtgacaacactggtgaagatcctacttgcagcaggtaactatcaatccctctgaaacaacttactgatataatttctctccactacattagcaagaacaaacttccaagtcgaaaattgtgatcgtaatttactaccagatttcaccagagcgatggctattggtcttaaatcgttacaacatgcatataggttttacatgaatccagtataactctctaggcaattgttgtttcagatcggtaaggggaaatagcatttctgaccatttaaggtactttggggtagagttgaagtgtgagagttggagacagtgcagcatagtgatgaatcaagatatggagcgttacagcaggaaagattcaaggggtaacttattcctctcgcggacagttcctcctaaggacgtagtcaaaacaagttctctatcgaaaaccggaatctctagtctgtaggtatatgttgatctcaagtcttgaacaagagaaagctcgctggaagaggaggtttgggggattcaatgtgtggaggaagaacaagggttctttgattctttgtgatggcaagagaaggtgaaaaaatgattctgtaaataaatcctacgttggtagcatgtaaaatctttttcaatttaaatgtgaatgaataatcacattgtacagtagcagattccgaattctttaaatttgtatccatcaatttcttctgtcaattattaatcaaagtacaaacatcattttacttaatagtcaacagctttattaccaaattatttttgcaacatatttgaaatgtctttttaataactaaacatatttgaaatcgcaggttgtgttgggaaagtgatgactgtggaactagaaaaaatctcaagcacaagactatattagggttcaggtgctccttgatgttcgaaatcctttgcgtaactttaaggaagttctgctcctaccgggtgaaatgatatcagtatcttttgattttgaaaggattcggaaaagatgtttcctttgtcaacgtctcactcatgagaaaagtgtttgcccctttgctactgtaggaaacactagagattcagaggaagatcataggagtgtagactcaggttttctatttggaaagaaatgcttactgaaaccaggagagatgattgttcctacaaagttatcgtctatctccactcaccaagaatattcaatattgccggaggtaaatgatattccaaaccatgagactggtgattcaaaaagatctagtcatccttctggtaatctggactatcctacatctaaaggattcctctttgggtttaatgagtctggttcatctggattaagtattaagcagaagaatccaagaaaaagaaaagctcttttagttcacaagaggcaagattctttcgctggtataaaagagaaagaggttagtcttaatattgagtttgcttctgctatcaaaaggaataagaaaattacagactcggaaagatctgatagtacagtaaagtctctcattacggtggttcctcaagaaccaccgcagtatcaataagacatccttagttggaattgccaaggactgaggaacccttggacaattcggcacttgagggaaatgaaaaaggaatatttccctgacatcttgttcctcatggagaccatgaattctgacctgtttattttgaaagtttttaggtggttgggttatggttactttcatactattgaaccggaaggaaagagtggtggattagcaatattttggaaccaacatcttcatatagagtttctttatgaagacaaaaatttgctggatttggaaatatctcaaggatgtaagagatggtttatctcttgtgtttatggtaatccaaggcagaatctcagacacttgcttctggataaaatcagtaacattggtgtgaatcgaatggcagcttggagtctgataggggattttaatgatatcttgtctaataaggagaagataggtggcccatctagagtagaatcctcctttcaggacttcaagaatatgttatcaacctgtgatatgcatgaactgagcagtactgggaatagtttcacttggggagggaaaagaaatgaagagaatggattcaatgtaaattagatcgctgttttggaaattcacagtggttttctttgtttcctaattcacatcaatggtttttggagaagcttggatcagatcacagaccggttttggtgaaatttgtcaatgatcaggagcttttccgaggaacttttagatttgataaaagatttgctgaagaccctcaataccaagacgttattcacaaagcatggataggtaatatttcttctcataattcttcttctatgcatcgactggttgactgtaggaaatctattagtcattggaaaaaagggaaggattataatgctgagaatcgaattaagaggttaaggtttgaattggatgaagaaaagagttaccaatttccgtgttggaacaagatttctgttattcaaaatcagttgggtattgcctttagagaggaggaatctttctggagattgaaaagtagggataaatggatggctggtggggataagaattctaagttttttcaggcctctgtaaaagctaatagaattaaaaactgcttgagttttctggtggatgaaaatggtattgagcacactctcaataaggaaaaaggaaaaatagcagaacagttgtggatctgttcacctcttcttatcctgcaaatatggattcagtcttggaaggttttcagacgaaagttacacaagatatgaatcatgatctcactcagaaaattacagaacaagagatctataatgctgtcttttccattaatgctgaaagttcaccaggtcctgatggcttcacggcgacttttttccagactcattggaatttagttaagaatcaaattattgcagacattatgggtttctttgaaacaggcatcctccctgaagattggaatcacactcatttatgtttaattccaaaaatctcaaatccagaaagaatgagtgacataagacctatcagcttatgctcggttctttacaagatagtctccaaaatcttatcagctagactgaagaaacatctgccagccatagtttcaccaactcaatctgcttttgtagctgagaggttagcctctgataatattctcctggctcatgagataattcataatttaagaaccaatgataagatttccagagattttatggtgttcaaaacagacatgtctaaggcttatgatagagtagaatggccttttttaaaaggtattttaagggccttggggttctgcaaccaatggataggttggataatgggatgtgtctcttctgtttcttattcagtactgattaatggtcaaccttacagtcatttcttaccacaaagaggtataagacagggagatccgttatcaccttttttgtttgtcatctgtactgaagctcttactcatatcttaaaccaagctgaacgatgtggaaaaattactggaattcgatttaatgatgcaggtccttcagtgaatcatctattatttgcggatgatactttgatcatctgtaaagcaagtcaagaggaatgttctcagattatgcattgtttatcacaatatgggcatatttcaggacaaatgatcaatgtggaaaaatcttcggtcacctttggaaacaagattgaagcagaaacaaaagattggattatgcatagatctggaattcatgtggaaggaggaactggcaaatatctaggactaccagaatgtttcagtggctcaaaacaggttttgtttggctttcttaaagaaaaacttttatctagactcaatggttggtatgctaaaaccttatctcaaggtggaaaggaagtgttgttgaaatcaattgctatggcatttccagtttatgccatgtcttgttttaaacttccaaagagtctatgttcaaagttgacttctgtcatgatagatttctggtggaatatgttgcctggaaaaaaaaaaaatacactggattggagctgaaactttaatgctaccaaaagttctgggaggctttggatttaaagatcttcagtgttttaatcaagctctgttagctaaacaagcgtggagactgcttagtgataaagacagccttctttctcagatcttgaaaagcagatattatctgaattcagagttcctatctgcaacaaaaggcacacgtccttcatatgcttggcagagtatcctttatggtcgagaattattgagaaaaggtctgaaaaaggtcataggaaattgagaaaaaacattggtttggatagacaattggctttttgagggtaaaacgagaagacctgagagtgttcaggtgatggtggatattactttaaaggtcagtcaactaattgatccagtttcaaagaactggaacttgaacatgctcagagacttatttccatggaaagatgctcaattaattcttaatcaacgaccaatgctttcaaaagaggatgcttattgctggtcaggtacaaatcatggtttatacacagttaaatcaagatatgatttgagcagtagccagaatcataaggagatgtttcacaaagcacatgaacaaccttctgtcaatcctattttccaaggtatttggagtctatacatagcaccaaaaatcaaaattttcttatggaaagcagttaaaggtgctgtcgcggtggaagagagattaaggacacgaggaattctaatcaatgatggatgttctatttgtcctgaggagaatgagacaataaaccatgtcttgtttcaatgctctttggcccgtcaggtatgggctctatctttgatgcagtcaccaccttctggatttggaaattcgatttttactaatatgaaccatgtgcttcataactgtaagaatcaaagtatattaagactcatgcgatatgctagtccttggatcatatggactctatggaaaaatagaaataaaagtctttttgaaagtgatgtgtctatctctaatagcatagtacagaaagcatttgaggattggaatcattggttatctgctcaagatccaaagactcagtctgaagacacaaagaaagaaatgaaatggattcctccgccttggaatgaattgaaatgcaacattggtgtggcgtggtcaagtaaaactcaattagctggtgtttcatgggtagttagaaatgatacaggagaggtgcttatacacagtaggcgatcttattctcaggtacattctaactttgaagctaaactgaaaagctgggaatgggctttagagagtatggataaactacatgttgatagagttacttttggagcttcttctcatgatattatcaaagcaatgaataaaccaggagagtggccagctttgagaggacatttggatgcattgctagatctcactttggataaaccgcattggtatatggcaatggaattaagacagtgtaacacgggagctaatgagatagcaaaaagcgtgataacaggattgagatggcagagttatgttgctaaaggacctccccaatggctacattatctttttgactctgaattaattcatcagaggagtcgatgtttgtctcctttataggagaattttgtgctgagggtctaaagagtaagtctagttcatacgaaggacttcttgtcagatagtcaacatcagagtgttgatttgttgattagtttgagttgaaaagtgtcttattctacatctccacacgtttacttcagagtaaggaagggtaagatatttgaaatatttagcatgatccattagcttctaagttccctattggaaaggaagtctggctgtctcagaaatgactcagcaaaaaagctaatgacttagctattcagagttcataattagtgacacatgtttgactcaggatcatggctaaataaacgtggccgttggttagaatagctaataaggaggttagtggttcaattatgggggtgatagggatcgggaatttcctttttcttgtcttatatatataagtcggttatgttaagtcctatcatctcttagtatccaaattaggcgagagttctttttaatattttgttagtttaatattattttagtcggttctgttatttctctaagtctttatatatctttcctgctctccttagttagtctatttcccatccctttagttcctagttttcttctctcttatcactatggcagatgagttgtgggatgagatacaaaatctagaattaggacaagaggatccagcccttttcattccccatgaggcttatgtgatggttgaagcttcaaataacttaagtctgatagcgagacctctgaacccaagagttcaaaatcttaactctgtcgtggtagcacttccaagatcatggggactaacgactcaggtgcatggaagagttcttgatgcaacgtatgtccagttcgtttttgcaaatgaaattgatctgatgatggtgcaaagaagggaaccgtggcttttcaacaattggtttgtggcagcaactcgatggcaggtggctccagctcacaaccttgtcactaccattgatctctgggtgcagattagaggtattcccttaccttatgtttctgaagagacggttttggagatagctcaagatctaggagagatcatttcactggactttcatgaggctacctctcctcagattgcttttattagagttagagttcgttttggaataacagacagactgaggttttttcaaagaatcatcttcgattctggtgaaactgcaaccatcaggttccaatacgaacgtctccgaagactctgcagtagctgtttcaggttcactcacaatcgagcttactgtccttatcgtcaacgttcactcagcatcgcaagagaaagagccctattctgtgatagtgttcaaagatcatcaatgaattcccagtctcaaatgactgaaagttcatttccagtacccatgactccacctccaagagttgatcctcctccaatgaatcactctgaatttgtagctgcttatccacatcttgcaacagctacaaatgtgaattacaggtttacaggagactcaagcacctccagacaagacttatcatctggttcaaacaatattctgccaagaagaactactcatttcacagaccatcgaaggtgctttgaagctggtcaatcctcaagacaaaatgaaaacagagaaccaagaagacctacagaaagaatgttgcctccatctcactttgatcatgttcaacgctctggagggattctgaaacctccaaaaaaacgctaaccaatcgatcagtttctgtcattttttgggaaagtttgcaggcctagtagcaacacagcttcaagtttgaagaagtctgcttagttgagtatggtttttggttatgacatactctctctaaattccttttgatgtaatgttttagtttggttctactttacttttagtaatgttttttcaatttcagtttgctaaagctttgtaagtggaaagtccactgaaatgaaaggcaaattgtcagtgaaaaaaaaaaataacaactaaacacatgagacaatcattaaaaatcaaattaaaataaaatacagatatttgtcgagttttgattattgtaagggttttaacgtaatttagacaaacaaattgggaccctctaaacaataaagagtctttataaggatatcgaatctccgtccgctaagtcaatcagaaaccgcatctgtctgcgactcggtcgttcctggtgtggtttcgtgtcgtagtcattaaaatctcatctctctcactctcagttccaataataccccttcctatcagagccaacacgcatccagcatccttcatcagcctttgcgtatgaaaatgatgaaacttgaatagagatcattcgtatttcatcgacgtttctaattcgcaatcacaattgttttcttcaaggaattggtttgcttgctttgatcctcagttttgtcaaaggtcttttttttttttcctggacttgctaaaatctcttgtggcttttgctctgatacttgttagtttgggtttcgtgagtctcgctttataaaggtaagactatatttttgactaaactgcttccggattctgctttgttttagctcaattttactcttctttaggttgatgaacagaagatgatgtggttgtgtgttattgtcattttgcaggatatgggacaaaagagatggttcttcttgttggcaatttttgtttgtcttgtttcatcttcatgtggtagaggtgataatgaaacttatcctctgagtctctttgagcctaatcaagatttgaaatttctgtagaattatagtgaatgggaagatgacaaatgaattaagactgaacttagtgaatttatggtgacttttttcttttaattgcagttctcaagtttaagagcgatgatggtcgacctgtgtacaatcatacgcttgccatcacacttgtggagtatacttctgcggtaagttaatagcagatttctacagtatgcatttcatattatctctgctagataggaaggaaattcaagatgtgtaacactcgtcctcatattttcatttatttgttactagcattactagagaacagagcttatgctgataaagtgataagtgcaccagatggatgaatcgagtttatatatgtatgcaggtctatatgtctgatttgtcagaactcttcacttggacatgcgaaagatgcaatggtttgacaaaggtataacatttgttgaagcagatcactatttgaagccacagtatcagtatgtataaagctaatagctttaattggatattctgatgtctttaaggatgttgcagggttttgaggtaatagagataatagttgacgttgagcactgcttacaggtctgccctgaatcctgatatcttaagctacatctggacatgatatttttttgttaaacaattttattaatatcagtacgtgtaacttttaacaccaggcatatgttggggtggctaaggatttgaatgctatcattattgcatttcggggaactcaagaacacaggtattactctcctcatgtaatctaaaagctacacatttgcctaaacttggcttatgcttgttcatccaaaaacttgtgcagcatacaaaattgggtctcagacttgttctggaaacagctcgatctaaattaccctgatatgccagatgcaatggtatgctttaacgacaagtatttgtcattgagttgctcaagtagtacggtagaattttaatagttatctacattggcaggtgcaccatggcttttatagtgcttatcacaatacaactgtacggcctgcagttttggatgcagtaaaacgagcaaaggaatcctatggggccaacctcaacatcatggtgactggtcattcaatgggaggagccatggcttccttttgtgcgctagacctagttgtaaacatccttgaattgaactagtttctttttacatttcttatgttttgtcctttaaagttgttagtggtgtcaatgggatgtaaattgcaggttaatgaaggagaagaaaacgtacaagttatgacatttgggcaacctcgtgttgggaatgctgcttttgcatcttatttcaatttgcttgtgcctaataccttccggatcatacatgaccgtgacatagttcctcatctgcctccttactatcatcttttccctcaaaaaacatatcaccacttccccacagaggtaacttctttgtctatcttcattttagtactccctgtcctctgatacacttgattttcatcacagtaactgttttaagattttttgatccaacatttggtaatgtatcttttggattgcaggtgtggttgacagaactaagtattttgaatattgttatccgtggtgtggaaaaagtttgtgacaacaccggtgaagatcctacatgcagcaggtaactaactctcttttgggtttctacttgaccctccctactctagcaagaaaaaacccggtattgctaatagaaatataggatcgttatttactacctcgttacacccgagccatctgactattggtctgggattgtcacaactcgtcttatgtcgcgtaccgtcactaggacattggacattttttggaagtatccagtataatggttagctcttgttgtttcagatcggtaatgggaaatagcatatctgaccatttaacgtactttggagtggagttgatgggtgagacttggaggcaatgtaacatagtgatgggccatgagatggagagttacagtaggaaagattcaaagggtaacatattcctttcgcggacagttccttccacggaggtaatcaaaacaaaaagtatatccaaaaccggaatctcaagtctataggagttggttgattcgagactcgaacaagaatgcttgcttgaaagggaggttgggagattcaaatgtgcaggaagaagaagggttctttcattctttgtggtcgtcaaagaaagtgaaacaaatgacaatcaagacattgtaaataagtcgtaggttgataccataataccatgtagcaaaaacaatacactgttcatttgttattcccttaatttaaatccatgatcacatatgtattggattcaaccttgtaaatatgtgaatgaatatccaattgctgtggatggtgaatatctgtattatagaatattctgtctctatctctttagtttttaccacttaagatggtattccataataattctttcgtccagtacaccaccataagttacaagctcataaaatatgagctttttgttcttgccacattataacattttcacactaaaacattttttagttacaaagttcattattcattaactttattggttgtaattaagagtaaaagcttatagtagtaaaaacattttccaagaaaatcttgaaagtattaaaagggatgggggatccgaatgtcaagtggcctacaagaataagatgtacacgaaacgaatatttttgtagcctttgactaacattctcaacatccctacgttattattattattattcttttaaaatgcatgtgagttttatctttactctgttatcataataaagatctcaatatatttgcatgatataaactttagcattttttaagatttcaattaactatttttttttgtgtgcaaattttcaattaactatcaaacatagacaatagtgatgaaaaatgtgtacaaacgatgcatgtagaatgctactgcctgatgattaagagtgacaagtaatttgctcttttctcatgtcttatgtttatagtttagaccataaagttggggtttttgggtaatgtgtcttttgtgtgttgtttatgtctagtttgctgaaagtcagatgagatgattgtgaaggtggttgcgaagatatgatatgaatgaaaatgttgttcaaaaattggcctaaaattgtttaatcctctcatagaaaaagagttcaaaattttttagaagaaccctttaggcattattgccactaaaaatagaaatgggtaaatgatatgtcttcttcctctatgggtaaagcataatcttttttcctttttcggaaattcatgtgagtgtttttttaatatatttaattttcatttttaataatcttaaaatgttataatggataggttcgtggtaccgtcacgtggtccatgggcttggtggggtcaatgtaactgactcaagcaacgaacactttaggttgtgattgtgtttttatcatcataaagttgttaatacatttgcataatacacgatttagcatgttttaaaattttcagttaactactaaaatctactaccatttaccaattttaattcaaatttgacatcatcaccaacaaaaaagacatcatccatataaatttgatgtcttttttgttggtaaatggattaacaaaaggattaacaaaacaaaaggaacaaataaacaaatcatataagcttatattgataataataataataactaataactaaaatccaatatagctacaaattaagtaaatttatttgtttgtttataaacttgagcacttcgtggtactaatttaaaaatatttagctagttaaaaaaatcaccaatggtagaagacaaacatctgctatcaaacaactcatacaacttatatttcaatgtctactgtttcttttatgaatgttaattgaaacaacataatcctttccttttcataaaacaatgattttgtttacacatatattaatttcacaaacccgattttatatttactcttataaatttagtatgattaaaattaatatatctattaaaaattggatataagatgttaaatattatggctttaaaaaaagttcttattagttacttgtgtattcgcacatctttttataataggagtagtatagtatactctctttcgagaaatttgtttaaaaaatgttttgaggaaaaaatagaataaaattggggagtgagaaagtaccaactttagtcatcaaaaacctccaattgggtaaacaaaaaggtcatttattatcgttttactaattttacaacttacaacaaaaataaatgtattaaagaaagtgttgggaaataaatagaaatgtctctaaaagataacgatctagaattgtgattggtcaataaatcggcgctctctgttttacggtttgtatccatgtcatcatcatcccatcttcatcacacaactctcttatctctctctctctctttaattattccccatttctttaaagcttcaaatctatctctcacgaactcccaagctaacaacattcacaaggagagagaaacaataaagggcaaggaaaaagatcaaacctttttctttctttctttctcctgctctctgcaatttagaagaagatcgaagaatttgtttgttgtttatcttcttctataaaaacaaaccgtggggtctgttttcatttctggccttgcgattccgataaaactctcagcttcccattcaatccaatccaattccacttctcaaacatatatataattctatatttttgagagacagtttactttttctccttctctctctctctctctttctctttctctgtctctttggcttttctcctcctgttctcatggaagcttcacccaatgatcgacttcattttggcaaaatgggtttcgggtaaaaaaaacattcctctgttttttactctgtttcttcaaatctctgcttttaacagatctcttgggtttgtacttttgtgggtcgtctcttgttttcacgtatggtccacgacgatttgtctcttgttcttagtgatccgtagattccatatgatttgattcacaaagtttgttcctttttccgtttctgattcaagagtcttcatttgtttccggcttttgattcattatagaataatcgattcgtttctttacttcaaatcatagatctgtcctcgatccacataatttgtcatccattctgatccatgtagatccgtttctcttttcatgtgtattattaggtgtaagcattacaagaggagatgccaaatcagagctccatgttgcaacgaagtcttcgattgtcgccattgtcacaacgagagcactgtatgtttattctctatttatcatcttaattacagtctttaaaacttgatgaaagttaaagattcattttttttaccctatctgtgtttcagagcacattgcgcaatatctacgaccgtcacgatcttgttcgtcaagacgttaaacaagtatggtccctcctatagaattatgtgatcttaccaagtttggatctttactaatttgttgcatcttttgacttttttggttttgcaggtgatttgttctgtttgcgatacagagcagccggtaattcccatcactatagtttggattgctttaacttgtcttatgaattttgatgatcattgatcactcgcttatcaccactttcgatgtttcaatgtgttttttacaggcagctcaagtttgttcgaattgtggtgtcaacatgggagaatatttttgcagcatctgcatattctatgatgatgatgtaaagaactttgggttttcacctgtttgaatgaaatcttttccttctcggtatctgattatgtttattgctcctatttgtcttgtttcagactgaaaaacaacagtttcattgcgatgactgtggaatttgcaggtgataatctttcttcatacagtcttatactggtgattcgtttgtagttgtgtgctgattgtttagttgacatttcattgctgcgtgttgcagagttggtgggcgtgagaatttcttccattgcaagaagtgtggtaaatggaaaaaacaataaagttttcttatgctcagtttcagactaacacaatcatgtgtcgttgacttgtgaaattatccattacttgcttttaggatcttgttatgcggttggtctgcgcaacaaccatcgctgcgttgagaattcaatgcgtcatcactgtcccatttgttacgaggtatgtgtgttaaggcaaaacttatcaagaaaaagattcagcaaaaggtatcgcggttttagctaattgtgtgtacgtgaaatgcagtacctttttgactctctaaaggacacaaatgtgatgaaatgcgggcacacaatgcacgtagaatgctacaacgagatgatcaaacgtgacaagtaatttaccattttcctgtggttatgtctctgtttcaaccagaaagtttggtttcttctttggttgattgtgatggttttgaaaatgtgtgaatcttgagtaggttttgttgtccaatttgctcgaggtcagtgattgatatgtctaaaacatggcagagactcgatgaagaggttagttcaaaattcattgttgaatcttttaagtctgatagatctttcaaattagttgctgaagaatattaaattaacttccttagatcgaagccactgctatgccttcagattaccgtgacaagaaggtaaataagtttctttctctgtcacttaagctcgatagtgtttcagcgctaactaaagaagagtaaagatatacatcaaagttgtatcctttctaacaagatgatgcggaaatcacaggtttggatactttgcaacgattgtaacgacacaacagaagtgcacttccacataatcggacagaaatgtggacattgcagatcatacaacacacgagcgattgcgcctcctgttcttcctcaatgacaaaaccaagatcttcccatgtattgcctccagaaagcaagcaagaactttttgttgctaaaaaaactgaggcatagattgatgatcataacaaagaaagaaaaagaaaaagattgatgatcaatttgatcattggtcacaaaagcaaaacacacatttgtcttcttcatttgatttgttgttgttcttatactgttacatttttccatttgtgtttgggtgttggaaatgcgaggattatgtataatatactctatattcttgatccaggaaaagttacctggataatatgttttcagggattttttagtagttcaattcttacatcatctccttcttctctctgcaaaagatccataggttataccatatctctgcaatgtgtgtttttgttgttgtttgaatcaacgaatctctcaaattcacaggttttatatttataatctcatcagttacaaactacacagcaaactcatttcgcacaaaaacaattcatactagaagaactgttcaccgagttcttgacccgccatgccttctctgatcactttcgcaaagaaatcctcaagcgtgtctttcccgtaactcggtgtcttctcctcgctatactctccagtctctggatcaagaatcaacatactctctgcggcgtaataccttccaatcttcccaaattcggcagcctctccaaccgaaggaaagatctttgcaatagaatcgagaacaccaatcacaaaatccataatctcgataggtactttcaagaacttaggctctctcccaagaatcttaaacagaatctctccttgctctaatggcgttaatgccttgcctggtccaccaattggcaaaacttgattgatcttgttctcttccaacacgcaatccgctataaacgctgctaaatcttgttcgctgatcggtttacaagcgcatagcttaccatctccaaacatcacgtaaggtttcccatctttcacaatctcaacttgaccacctaagctcttgaaaaaagccgttggtctcacaatgctgtatgtaaagctagagtcttgttgctcagccaaatccatcaactctgcttcgaacttcagtttcgctctctgaaactccagtaaaggcttctgcacacaaatcgcagagagcaaaacaaaatgcttagcaccaaacttcttcccagctacaagactgtttttggtagcttcataatcaatcttccacgaatctttaatccctccattacgactagcgagacaggaaacaacaacatcaacaccaaatcctagattctcaatagatttctcaagaacatctaactcagtaacatcagagaaacacacattggcgccttgtaattgcttcaaagtctcttccttgtcgtttttgcctctaatcccactcttctctctcgcaacagcaatcacattgaaccctcttttgatcatctctttcactacaaatctacctatgtacccagttgaaccaaccactaaaacgtttatatctttagggcttttgttcctgaatgaaggtgatgtagcgatttctgaaattcccgagtctagagatgaaattggtttgagtctcgctctcttatacttaagactcgttgaggattcatttgtgtggaatgttgaagctaaaggagacgactttacctgaaattgtgaaatgaatttggaatctttgaagatggttttgggttttggtgagtaggaagcgaatacgttgaaggaagagcaaagtgacattctttgaaatctctgtacaatgctgtttctatgatcgggaaaatgagagggaaagtgcgagaaagtgaagatcctagtgtgaggccattgtagcaactcgtttgatcttcttcttcatcctcagaacacagataatataatttccaaaacagacaaagtattttacgttatttcgtttttaccccaatactttatcaatggtgaaattcggtgggagttatgtgattttatcattctgatccatatatttggtaaaaaaaaagaagacaaaaacctgtaccgtaattcatcatatcactaatcaataatcaacacatacatagtataaagagaatccgaagaaatcttatgtagagatgtgatctgatatatagagatgacttgtagtcgtaggtcaacggcaccggacgtaacgaacagatgtacggcgttcgttggaggtacaaacggccatgatggagagacaaatgacaacaattatgacaagatgtgttagtaaactcgaaccttcatcgtcaccaccaccacaagcagacatacacatcccacccattcttcttcttgtgatccttaagacccgatgataagttttaagggagatgtgagatgattatgaagagaaaattaaatgttagctgagacggatctgtctttaatgagtttttgattggtacttttgctttttaaaatggtttttgttggacttgaatcagcaaaacttcgtgtttttaataattgaaattgatgattttaattgttgttattttggagtgttgttcgaaaatgttaacttgagagacatattctctcgtcaatatataattaatagacgtcgacgtgcatgttgttatataagtaataagttgttgcctaccaaaattacttgatgatggttgaagtgttgtctaactttacaaaaatacaaagaaatcgcttagtatctatgtctatgaatctatgatgacccttaggcacggtcatgagtgtcttttaactattttggacgtgaatgtgcagacgtgtggagcacacaatacacatacgattttaatatatttgggcttctgtttaaatattttaaaacccatttcatcaaatcggtaattcatcactaatcaagaaccaaaacatacatgtgtaaagagaatccgaagaaatcttttatagaaatatgatctgatttatagagatgacttataccagtaggtcaacggcaccggacgacacgaacggctgtacggcgttcgttggaggtgcaaacggccatgatggagagacagattacaataattatgacaagatgtgttagtaaactcgaaccatcatcgccaccaccaccacaacatgacatactcatcccacccattcttcttgtatccttaagatctgattatgtgtttataagggagatgagatgagaattaaagaggaaatgaatgttagctgagaaggatttgtctttcgagtttttgaattggtactttgtttttttaaatggtatttgttggacttgaattattcaacttactatgatgtatagatattttcaaattgttcttaattattttggtgtgttcttcgaaaatgttaatttgatagacatatgctctattcaatgtgtaattaatagtcgtcgacatgcatgttgttatttaactaatgtgttttcacctaccaaaattacttgatgttatgttttcataaaagatgagttaaagtcttgtggatttgggattgtatcccttctaaatttaaatattttattcgcagcatactattattaatagacttcaaattggtattttcggttattgagaaaaaaaaaatttggaccctatatttattatgtaggacctttaagtttcaaaagactaccatataaccaattatttctctcgaatcatgggttgaagtctcttccctttagaccatttctaagtttatagagaaattgcttaggaccactatgtccaattgactaattctatgatgccccttaggcacacagtgtcacaagtgtcgtttaactaatttggacatgaatgtggcagacgtgtggaagcacacgataatacacatacaatcgtcatatatttgggtttgtgtttaagtattaaaaagcccatttcaccagcatactttcaagtattgtttacaaaacccactccgaacattcgtttgtcaccgcccaccgacaataccataaaagaaatttaaatagattaagaatttggaaaatgtgtgaatcgtatacatcgtcaagtcaagtggcaagaaattgttacttggttccaaatgtttcaaactcaaacccacctaacacggacctaaaggccttttgttggttcccaaacgccgatttcttgtcttaattttagtgacacataaagtgccacgacgcctcttattgcatttttcctataatgcgacaagtttataaaataaaataaaattggtacacataaagttgtttctgaatggtttgagaatttgctatgtgggtggttaactatcatcaatcaaagttcaatatatttggctaataacagctatttataccgcaacttgtaaactagataaatgatagtgaaaatatataaattaccgactgtatagtactttatctctcctttggcatctcatatcaagcccatataaattgaaatttctgtgagaaatcatagctattttttgccaacgatatacaatgcagaagatctacaacttgtccactcaatttattatatttttagaactataatgaaaaccacaaagagagaagcagagagaggatgtggtcgatatgcaaatcaattagtcgcagcttcacagtactatagagaatctaaagggaatatacttgcatggacctgagtcagcatgaattttcttaacctctcatgttacgacacgtgttaacctgtctgaacagtacgttaatttaaaagatccacaccttcgtcgatgacaacttgacatgacgtggctttttctcattaccacgttggtttctcgggacaaaacaatattatccacttactgtttccgtttttgacgtaacatcagttttcgaacaacctatgaatatgattgtgtttttccatttgatgcatggagataattaatttgttgttccttacctctagccaactggccaagcccatcatattattggcaatcaatcattcagtattttagtgcatcattcaccaaatcagaacgtttctggatattgttcgttgaatcttgcaagcataggtttattcagttaacttggataagattccaatcgtctcgatattccaactatttgaacagattggcaagaattatgatggtaatgaaaaatgagtagatcaccgtacgctactcttcttaaacgatgtgatgatgagaaaccataagttgtcattgacgaaggttattaaaactaacataattacatgtatctttacattttccgatttcacgtaattaaaaacgagcattataattgttccatgatcgatattgtattgtcgtttttctcgatttgaactataccactagaaaatactttttaaagtttttttgacaacgatatttttttggatcctccgttgacgaaaataaactaagttttaaatttccttaatagtttcatttttcgtggtcacacttgaagattaaaattgtcattaaatgcaaaagcataaaaatgaaaaagtgaaatattaagcggctacaagtatgagagcattgtggtaacgacacgtgtaatgtccaaataggcaacgtttatccactacctttcatcttatataaacagattaacgtttcttttcttttcttatataaaccaaatccataatcctcaccatatccacaatcctcaagctatctcctttgtgtccataatcgaaacgctttttgcgatttatcctaatcttttttctatcttctgctacaaatttggttcttttttggttgaatttggataaaatcataatctcctcttcaattttcttgtgaaatggaagtttcagtgattggaaatcctcaagcgaggatctgcagagcagaattagcttacagagagcttggatttagatttggctctgatgtaatctccggtgaatcgagaaatagggttagtttctgcaaccaaagctctaaatggaaagagatcgcgatacgttgctcttcgagatctgtcaaatgtgaagccatcgtctccgatgacgcttctccgtttctcaaatccactccaaaatctaaatcggtaattaaccctattctcttctctacggatctattgttcttatactttatatattgagatccattgatatatgatgaaatttaggcaagatttaatttttttcctctttatgattcaattctgaaacaaagtttttatttttgttttttgttgcagctcgagagtgtaaaattatttgttgggcttccgttagacacagtttcagactgcaacaatgtgaatcacttgaaagctattacagctgggcttaaagctttgaagctacttggtgtagaaggtattgagttacctatcttttggggagttgttgagaaagaagctgctgggaaatatgaatggtctgggtacttggcagtagctgagattgttaagaaagtgggacttaagcttcatgcttcactttctttccatggatcgaaacaaacagagataggtcttcctgattgggtggcaaagattggtgatgctgaaccagggatctattttacagatagatatggacaacagtacaaagattgtttgtcgtttgctgttgatgatgttcctgttcttgatgggaagactcctatggaggtttacagaggtttctgtgagagcttcaagtctgctttcgcagattacatgggcaacacaatcacggtatgatttcacaaatcatctttgtttttgcacttacattctgagtttaactactctggttttaagtttctgattttctgttcattgctttgcagggaatcacattaggtttgggaccagacggtgagctgaaatatccttctcatcaacataatgccaagctctctggcgcgggagagttccagtgttacgacaaacacatgctttctgctcttaaaggctacgctgaatccactggaaaccctctttggggtctcggtggtcctcacgatgctcctgcttacgatcaacagcctaattcctcttcattcttctcagacggcgggtcatgggaatctcagtacggcgatttcttcttgtcttggtattcgtctcttctcacctcccacgcagaccgagtcctctccgttgcttcatctgcatttagcgggattggagtgcctctatgtgggaagctacctctcttacaccaatggcacaagctaagatctcatccttctgagttaacagctggattctacagctctaatggtcaggacaggtacgaggctatcgcagagatctttgcaaagaactcttgtagaatgataataccaggaatggacctatccgacgagcaccaatcacctgaatctctctcgagccccgagtcattacttggccacatcaaaacttcctgcaagaaacaaggagtcgttgtctcagggcaaaactcatccaccccggttcctggtgggtttgagaggatcgttgagaatctgaaggatgagaatgtaggaattgatctgttcacttaccagagaatgggagcacttttcttctctccagagcatttccatgctttcacagtctttgtccggaacctgagccaattcgagttgtcctcagacgatcaagcctcagaggctgaggttgaggccgagacagctagcataggttcaggcactggtgcacctagtttgcaaaccgcttaatgaaatgcaaaatcataattttttatgtaaataagaaaagtctcctgttgttttagcatttatatagaatgtcatattactgtaaaattatttgcaaccatttcttcacaaaacataaatcctgaagcttaagacaaagaactcccttgttttggttcgagtgatggcacaatatagcaatagagttgattttcttgcaagatcacaatgtacaaaaaagctacaaaacaaaaggaactgtaacattatcaaacacaagacaacgactcgttgtttttaaaaagaacacaatttacaaaaggctacaaattgctctttacaagatagatatagcgatatcttaacaaagtcttgtaaatcattcacaagcgattctagtctcaaagctgctcaagcaaatggcaaaagcctggaaagctgagatcgggtatccataatccatcgtgaacatatctttcccgactttcccaaactgcaatataatccgctcgctctgcctctccggtgacattcccgtgccactgccacagctagctcctgctgccacgagctgaaagttcttcactgacgctactgtgacacggccatggaaattcaagcaccagcagcgtagctgctcgtgccaccgtggtgtcttgttgctcagcactaatggtgtttctttcaggtggcttgagctactgcgtaatggttttgactgagacctggataaggttgaccgagtaccgagtaagggaaactctgatggttctgaagctactccttgaggctccattgtgcttgtaggtattgtgtccataagacattgcatctttcttggtcccctaattgtgccatcaagacattacatattaggtcccctattagcttctatattacataattttgaaaagtaaaaaagggacctttccacacacattttcagtaactcttctcaagaatctctaattttgattttaaaactacgactagtctaccagagaccaaaaagatgttgaagaaaagtaataaagttgagacaaataacttttcaaataggaaagctaaatctggaaaagatcattaccgggatcctaagacattcagctcatatgtgatatgagcgacaggataacttccaagaggaacttttgctgaaacttttgcgggattataagatcggctctttctcaactttgcggctcccgttgaaggcagcagatttccatcaaagacagtgaatttcgttcctaggaagttcgatcttcgacaagtttagaaagagcaatatatcaacaagagtttcaatagaaagaacaacttataaataagcaaaggacctttactggaactgcatgaagtttactagatcatgttaagtccttctaatccatcaatgccaagctcaaaatgctaataataagactcttaatcaatactagagatcggtaacctttttgtgtagcttgtttgatcatatatacgcacctcactttgccaacataagcttggcttcttctcgacatatcatcagaacgtaaagagataatgtaatccgtacaagttgtgtgcttcaacttacacgcagcaagcaaaaacttcccatcatccgttaaagctacaagaacatacacacaaagaagatgtcaatgtaaataattgcagaaccaagaaacacgtgaaaagaaaatagactccactagatactgtttgtttctctaagaacatgttaaacagagagattgatgctcacagttggttaatccgagatagagatgatatgattgcgtaattcgattacgtttgataaagcattgaaccagtgaatcccttggaccaggctgcagaagatacacaccaacaaaaatcaacatttaagtaagactacacaataattaaactgaaactgatacaatcagtaaaaatgatcatatatctcttgtttcatgatcaatatcatagtttacgagccagccactctgagtttgaggacaaatacaaacgcaaacgcagcgtcttcaaaactcatagtcttcaagattttgaaagtgatcaacaaaaaaaatcgtaactttatgtcttaatccgatcgaaatggacaaggaaagatataaagagagagtgattgagaattcgaacctgcttgagagagatggggaaagtcaacttagaagagatctcagggacaacgacggtttcgttcataagtagccgccagccacgacaaacgccggcacaagccaccacgctgcgtcgtgacggccatccgccaccgtccgccgcttcaacacgaatcagaatctccctaagaagctcttcaggaatctctgaccagcgataatcttgcgatgacacagaagtggaatcggcagctgcggcggcggcaaggtcgtggaccacacgatgcggtctcgaacgcatctcaaggattaagctacgtaaggtcatacgacttctggggatacttaaaggctgagtctttagatgattataatcgagttttaggtggaagaaggagaagtggtggtggtggtgttgttgagaagaacgaagtagattgatttcaacaattattgatatcaacgttttattacttctaagcaaattttgtatttttttggttcttaaataggtaaaaaaattaacgacaaaaaaaaaaataggtaaaaaaattatgtaaaaccagtcggcaaaaaaggtacattataaaaaccaaaataagaaaaaaaataaaaaattttaactttacttgaaattgtattagaatttttttctttatgttgacacatttattttggagttatccttgagacattctcttaattgatttttgatgttgatcagcttcataattccatagaatgacagaaataatgtttattcttttgtttcaaccgacgctaattatataatttaattaatttgatttgtttcaaacaatagcaaactattttattttgatagtaaaatgtaggaaagcatgactatgttatatcagttaaatattatgctaccaataccaattaggaaaaatacaattatagtagttaagaagttaataaaaccaatggtggctgagaaaattggtgggttggataagataaagtttataataggaaaataataataaattagttagaatcataaatatttgtgtcgacaatatgttttgtaagttcaattttaaacctttttaaaaaaatcctatcatattaaatatatgtatcagaattatttatattttaccaaaaattcgtatttttgtattcgattaaaatatgtacatattttataaagacaactcatgtgggctatataataaattatgcaaaaggtattagtatatatatgataaggtttttggtccacttaaaaatatctaaccaagtaaccatcacccccttgctattacatagtaggccatgctctcgatttcatttggtccattcctatttattaccttcaatacaacaagagctatacaaatcgagggagggttgtttaagtttttacccctattcttgacttcttggttaaagtttcaaatgtataaaagggtaataacaatcaggaaccaaaagttattaagtactatattctttgaacaagatatattcatagttcatacattatatacatagctattagacaccaacaaattacatacaccattgtagacacatatatatgattcatcagttcataaccatatttagatcattaaatttatgtaaaaaaataacattgggtgggttagtagcgtgggttagcatctttgctttgttcaagcgaatgattggataaacaaaagcggcttctttaatattaatccttcgtggttttgtccctttcttcttttaaagccaaacctaactaatttgttgacaattgaaaaaggcatgcatatatgatatcaataaaaataataataatgaaatcaatcttgataagaatggatgtttaattcagttaattaatcctctcatcttccaagtacttccacacattgtatattaacagtagagtacaatgtgtaccacactaattgattatcaatgtgcattccaaatatactgtttcagttttgtaatctacattttttttgtttcgtacgttactagctaaaatacatactttttaaccggccgtgatctcattcacgtctctctgtatggattcaccctcatcgttcctttagtttattatatcatatgcaaaccaaaccatagtactaaattactaattactacacacactgaggatgataatatgggagcgtttctgagttcttaaacccgttgtagtttatgggttttgaatacaagtttgggcttgggcttctaattatgttgtcagtattaaacatatgatatttgttgtacaaaatagatgtgttggtttgaagcttagtttgttatcggttcagcgtttattatgagataaaacacttgtggtgtgcatgtaagtcgtgctcatcattctgtgtgttgacacaaaatcaatatatgtgtatatatattgaaattggttaccaaaactgaaattgaaatataataattgttttctttctccttaatctgttctttacaaagtcgacatcgaccttcatcaaggctctgtacatatttaaacatgatatcatgtgtttgagttgttacgaagaaaaaataacatgtagagatgataaagtttgatgagtatgggttctttcgttatataagttggagcttcattagtctcccaataaggacaagataagtgggcaccaacacaacattatagtgattatacaatctgtcacgcacataaccttaaattgtatagtcatctatttctatatactaaattattatgtttgatttgacataaagtattaagaaaatgagaaagtaattaaaagtactgtgagacaggagaagaacacttttatgctttggcatcttcaagctcaggagcaactcacatgcatgctctctaacccctttggaattttggaataatgcaattagttgattatatttatatggttaaatactatatatgatatttttataataacaatcttatctttattcaatctgcatatcatgttctaattatttgagtaattcatcttattttgctaaatacacaactcttttcaattaaatttacaagaagtaaccatatgaacataggttcttcatcttttgcttcttaccatatgaagaaaataacttttgtatatagtttatagtttatacactcattagtcatagttaggcctttaagttcgtaaagcattttatattattgcataatttaaactttttcaaaaggccctttatcagaagaaaaaaaagcaacagcagaaacagacaaatgaacttcacctaaacattgattcccctaattaaccaaaatattatttaattgctcattcaaacacatagtaagtaatccttatttgattttatatgatatgaagaattggtcctaatataaaacatgcatgatgattgatgaacgttatatcaaatgatattatcgttgttattaaagtacatactgacattacatatatgcatatgaatatatgataacttaatcgaagattcgaaatgattaacatatcgactcacattgtcaagaggggcaaacacgaccaaaaaaggaaaataattaaaattgtaaaatgtagcttactacgaaactaaatgttaaatattctcattcgagataatgatatacattttggacaaaacacgtgaaaaccaaaacgttcgttgatggataagcgaagtgaactatagtagtgttataacgctaggaacgaggcggaggagatgataagagagatgagtaagactccggcggaaggaagagacggcggaggagaaggagaagaaaccggcggagaagcaaaaggagagaatgccaacgggtcagggtaggagccgtcgttagtgtcgggatcaggagggcttggtgaagatgggattgtgccgctgccatcgtctgaaggtaaagcgtctccgggggaagggaggagaggggcgatctccggtgaaagctgttggacgagagaaattgtcggagaagatgaagagagagagatgaagatgaagatgaagatgatgagaagtttattgagaaaagaaaaagccattttgtttttggtttaaatgatgaaaatcaaagttgattttttttgttggatctgtctttctctatctactgatcggagtgcattttgagttgtaatgatgatgtctctatataaaagaacctttcctcttatctatcctataaaaaatataaaaattataataaggttttggaggaaaagactaaagaaaagaccttgtttgcaaaactgaatatttattttcagtttccaatcaaatacatatatacctttctatttttcatgatatagaatgaatttagttctgttttggttgctattgtgatagccagtgatagacatatatatatatatatatatatatatatatatatatatatatatatatcatccccataatttgtcctaatatctcaatttttgtataatttttttttaaagaatttagtatagctatattacttacgtacatcgcacataaatatatatgtatataaagttgtaaaaaaaaaaaagattataaagttccataataatacaatttaatttaaattgtctaagaatatagtgcaagtctataaattggagttggttcagtgggagggaaagtggtatcttttcgttaaccacgtggcgacattttaatggttggtgtgtttggaagatataattgaagactgagaatttagtgaaaaagctttccacaagggatgattccttcagttttttttactaaaaataatacaaacatcatgatattataattgaactctatttacctatcaacacacaaataattcagcaaaatctaagaaaaagatcctatatttttactcacctttttccttagatcagcttatgttaatcttactcaaccatgcattatttagtttctagagtttttatttgcttaaagaaaactggatacccatcaacttaatactaaaatctaaactaatcagactaatctcaaatatttaacaaatgtttgtctaaaagaagataatattaaggaagtagattgtattagtggtacaaaaattgcaatagaaagaaatatacattaagaagagacaaatcttgattctgggtttcactttgtcacatgtttttgcgtttgttttacctcgcatgtactcaaaatctacagctcagcgtcattgtcgtcgttaatcctggtttaacaacaagagataaagaaattgtagaaagacttaacaatgataaaaagaacttaattatcaattaactgttgttaccattgttcagatgacttcaaattcaacgaggtaatctctgcaactccatggcaacgagtgaagcgatgctgttaagaccagcggcgtctgagttcttcatctcagagacaattgcgttgatctttgagacatcgtgtcccgatatcgacaaaatcatcgcctgcgatagatactgcttgcaagcataacccaaacaatgcaagactctcttcagaaccaacaagtgtagctctgtgctcttcctcctgcgccacgagtccagaatcggtgtgatcttaggaagattggttaagaatcccgtcgtggcttctctcgaagccgctttgagtagcaacacaacacattcagaggcaatatctgcgactgcgatgcttgtgtcatcgtctaagcctgcaaagtgcaagaataggccaatgttgctaccgaaatctgcaatgtctcttatgcattcctgtggatcaacctcgaacgtaaaagatgcctctgataaaagcgttggctcttttgtgtagttggaactgagacctttcttgttcccaagtgaccgtagcagaaaagctctgcagagacttaaagtgggttctaggaaatcttccatatctttggcattcacgaattccagcagatttccgattctcctcactactttgagctgagagagtagtttactttccatctctggagctgaagccaaggcgagacagagcttgacattgttcacatttgcgcttgataagtctccgagaagaaactcgaagcattgtgaaaccgtattgtgacgcaataagttggagattttgatgtaatcaaactcaacgagcatgacaaggagcttttgagcgtaagctgggattggatcttcgtcttggatcagtgcagggtagagtgggaggaaatgagagttggatattgatttcaaatcctccgatatttgttgctcgatttcggtgcactcagttaagagaatggtcaatgaatcgaaccagattttcaaacagagaaaccgagcatcaccgtctttgtttccattgtaaattgcagccagagatgggagaatctcacggataataatctcaccattttgtgtaaccagaggcgcatctcctgttatgcactctagaacttgaagaagggttacacggaagtcatctcttccctgcaaaattgtttacataaaccatggtttaaacaagagagcaaacggaacagattcttaaaacatcttacacacatatctatagtgaacagaggaaagaggtaatttagttgaaaattctgatatagttgtatgaaaatcttaatccaatcctataagaagcaatattaacaataaaataaacgagtaattatcatttgtcatagtgaaggtaaggaattcaaatgttgatgagcaattgaccaagcccattagtgcaaaataaaataacagatagcatttcattaatgtaaaaggggatgtcaatgttgtaactactgacctgaaacgatgcttccacaagttttgtaagatttgccaactgccttaggacttgtggagttaccatcttgttcttaaacgaagagcttcccagaaggtgaagaaccacagggaacaggtgtgcattagtctttacaggagctcgactattaaggggagagacaggtccatggcgtcttcctgtcatcagttgttggatatcattggttattgtatccagcatgcccggtattatggaggcgattacattcacaaatgcctcaagacattgttgcaggtaactgtctttttctttagctaatctgtccaccacaggaagaaatcttgcattgcagaagaaatttgtcagccaacgcctactgtttttgcagagaaatgcaacaaagagaagagctttgcccctcagaacttctgttccttgctctatgatggagagtaaactagggaaaaggttcttctcctctgtcaatgtcacgagatgccttccaaagcttgtgaatgtatgacttccaatcatagccatgttcagaagatttaagcagacttgctgctctcttgcgctgcctttgacaaaagatgaagctatttccttcaatgaaagcttttccacgaccgtctgaatgcaaggagggttaaagcgagcaagacggactaaacaggatccagcagtttgcctcatgctctcctgtttccccgttgccttgtagatatagcagaggttgctaatcaaatcctggctggagaaacgggtggcccagtaagctccttgactgcagatgttttctattgtccttaacgcataaacctgagtcaggtcatcttctcccttccgtaagacagatgatacaagagagatcaaggcatttgaaacctagtttaaagaaagcaagaatctgtttagataggaaacaatggaaaaatggaacattcagaataagcaatggactttggtccgctagaaatacaccataaacattaaaagccaaatgatccacatttaaaagtaataatttagagatgctgacctgccaacccgatgcagaccgggtttcttttgatggggattctggtggtttgaaatccttatgctcattttgagttgagatgtagaatagcaattcacctagagctgccatagagaatcttctcactttctcatgcttgtctctgaggccattagtaagagagtctaaaataccagaatttgccaagtcatcttcgattgaagtagaatgccgaattaacaaaccaattagtgaagcaatttgtacacgaaatgctggggtcttggataatctcagaactttaacaagcacaagcattattggtccgttagtcaggatgttggctgcatcagcattggtactcaatgtctcgaggtatctgatcaaattctgtttctctgacagtccagaactgctcccacttagaactgttatgatcctattgttcagcggttctaattcttgctttcccttcttactaaaatcagagggctgtggtgtttcgaatgagagagaatgcacagcttctttgtcagattttctgctgggcatgacaggcctaacagaaagatcagatatatgccaaaagacgtcagtgaggctagtaggtgctttagatgagtcatgattaacagcaaccccagaagtttctcttcctcggtgagttttaagttgaggactagcactaggtggggcagctgacatgtccattggctctgactgatcttcatggcaatctcttgcttcacccaaggttggtgtttcatttgcagacgagttctcatcaggcacattactgcttacaactctttgtcttctgtgattctcattatggctcattactctttcttcttgtgcacaagaggtgttttcggttccttctgattcatcaggtccctcatcatcattgttttcatcaaaatcaagttccatatcagtgttgtcgatcttcacttctgcacaattctcgttgctattaggtaagggtctcctatagttttccttctcattttccttttgaagatttgcctttgctatccttgacaatcttagaatattcacctgtctgttagcagcaggacgacctccatgcttttcctcagttgctctactaggaagctttgcttgagctttagacccaccaggggtgccctttatcggcgtctcatggccttttgaaccttgaatggagttctcattttgctttgaacccccttttcgatctttctcccggtactttggaggggtcttatttggtctatctccattacgctcggaaaggcatggctttgtgtttatgccaatcatatcatcaaaagcaggctgagtaggcaactgaactaaatttatcttactcttccaaaatgcatgaccacagagatctgcccattgtattctttgagctgggtctttgataagaagagactcaatgagattgacaaatgaacgactagcatttccagggagtggaggagttggatctgaatgaatagatttcacaagctgggtaaactctcttgccacaaaaggaggtcttcctgtgtaacattcatatagtacacaaccaagtgcccacagatcagaagcaaaagaatggatccctccatcttcatatagctctggagccatataatacggggtaccacgttttccctgatgcaagtcatcacaagatatatagagcattaacgacgcacaatttccaatgaaatttgagatcatagattcactaacactgaaaaaaaagacgcacaaaagtgtttaccgtggaaggagatttagaaatatcatccagcttccttgacaaaccaaaatcacacagctgcgacacagtgttttgagaacatttaaacaatgtaaactatcatcataaactacacaccagcataaaaaagacagaaacacgcataccttaatatgcccattttcatcaagtaagatgtttgatggtttcagatcacaatatataattcctttcgaatgtaaatacctaagaaattcaggaaaaaaattgtccataagagaagagtcagaagacatgttctagatgcacctagaggtattctggtcatgtcaaaatggtttagataggatcttactgcagggctatgacaagatcataagcaagaccatagatagattcttctggcagtttacagtcctgcagaacaagtgaatttcagaaaacctgtgaccatatattatcaaaaaacatagccaaactacaagcaatacctgctgcaataatgtcctgagatcaccaccaacgcaatattccagaactaaccacatgtgagcagaagtttcatacctgggaccacaacaagaagacgacaattagaaacaaatatatggagccaaataattgttgttagataatagctagtaagttttaccaagcatagaacttgagtacgtttggatgatttagcgagtgaaggatcctgacctgaaaaggaagtgcataattaccaaattttcagtatccatgtcacttcaaaaaccacagatggtgaaaaatcaattcgcaaacatcacccagaaatagaaacttaagagcatcgatttgacaaatctaaagtgaatccgtcataatcaagaggtcaattcctttaaataaagcaattcaagcaaaacccaagcattaatcgacactcttgcctgattaaattacctcttgaagaaccttgttcttccgcgacttatcgacactcttgcaggcaaaatactcgatcgtcttcttcttccttcctttatacacagtctacgaaccgatttgaacaataaattactaaacaaaacacttgagaaaggaaaaaagttatcagattcaaaattaccgagcatttgccatgtccaatagcttcgtagatgtggtactgattcatcgtgggagcgagcttcaagtctcctgagatccgattctggatttgtcagctctagagagaatcaatggccgttgttgaatgagtttgggatttggaaagagagagggggaatggtagagagaaggaaatgaacaatttcaaaattcaaaactggactaatttagaataattattatattttgaatccattttgttttgaaggagataagatatgcagtcatatacttatgaaattaaaaatagttagatgggcttcttgggctcataatgatcgttggcccatttatcctcttctcgggtgaaacgtttttcccgccataactatactgccaacagggtttttttaccgccgtgaaatgagaagaggggtaaacttggcagagaaaaagtgaaagagcttagattttccttctccttcagcgacgacgtaacattcgccggaccacatttatctccgacgtcggccgcttagacagagtaaacttcttaatctgctttattcttcgtctttttttttttttttttcgttatccggcgaaactcgctgccgatatttttaaatttattttccggtgttgcataaatccttgattgaatcgttttgtcggtctactttgcatttctggattctcctgctgtgtttgattctcttactgttcgggtagtgttctctctatcacaattcatagctagggttttgatgttgtagggttttctcaaatgtgggttcttttagtaggacactttggaattttagaattttcggttgtttacttcatcttgtcttgcctttttcaaagttttactgaggaataaatgcttagattacttaatctcgtgcatactgttttgacgttagcttgggttttgattactttatttgttcattgttgttaatgaataggactaaccctgatcaagttgagatcatattggaggagccgctcaaggctaaagctgtgatggaaaagactaaccctgatggtgctcaagagcttccttcatctggtctcgaacaggctccacttcatctcaatcagaaatctggtgagaagagaaagagagaaggattggtgagaagagaaagagaagctggaaacagcagcgagaatgaagaagttattattgttggtgacactaaagctatagaagatttatgttttgatggaggagagcagtctcagaagtctgtgtatagcaagcggcaagctttcgttgcacagagcaacagaaatggtgaagggtctttgggcaaggaagaagcaggagaagaaccagaaagagcaaagtaggttttagctttcaatgactttgataagctgagggaagaagtacactttgaagttggccagacctgggctctttatgatacagtggatgggatgcctagattgtatgctcagatcaaagaagtttttgtttctggttttaatgttactgtcacgtggcttgagcctgatccatatgacgaggaaccaatacagaggtatgaaaaagacttgcctgtttctgttggtaggtttaaacttggaaaagatgagactattaaagatcacacaaggttttctcacttggttcattgcaataaaggaagtagcgcgggtaaattctgtatatacccaagaataggagagacatgggctatcttcaagggtcgctacaaatctctcatgacgagctttgacatcaactggttagctgatcccggttctccctggaaatatcagtacgcatttgtcgaaatcgtgtcagaagatgctggatcaagtgaccctttatctgctggtttcttgcataaagcaaaaggcttcttaagcttgttttgtcgctttaatgaggaaattgttacatcttatgttcgtaattccgatgtttatcaattctctcattgtgttccatcatttaagacgactggaaagaagcagaaggtgtgcctcgaggtgcttatgagctggatcctactgcattaccaacaaatatcaaagagatagacgtccctttgcatctactagcagagcctaaagagtcaaactccgagaataatacgtattcgcaatgcgtgcactttgcttgcaagggaaggacttatgaaacaggccaagtctggtcattttgcagtggtgacgattacttgccccggtactatggcaagattcagaaaatcacatttgttcaggcatttgagcaggatccagtagttaaattgcatgtaggtcggctaaaggctacagtaatcaaaggcgtcatccagtggattgacaagagaatgcccactggctgtgggagtttccgggcaactaaagctcttgaaatattcactgatcttgatgtattttcacgtcagattagctcagaggatggaaataattacagtatcatgccaaagactggtaatatttgggctatttacagaaactggagtaatgacattgatgtggttgatcttcaatcccaaacttatgatcttgtggaaattctggatgataaacaggactacaaggttctgttgttggcacctgatggtggctttaaattagcagatcgtgcaggttttggttcggtgtatttagctgctactgagcactggattgatggcaaggatgtaagattcacaatcccgaaatccgaactactcagattctcgcatcaagttccaacttcgaaagtaacaaaagagatacatggagctttgcaagaagtctatgaacctaatattgaggcattaccagtgaacttgattctatgactctgaagctgaaacaaagacagtggatcaacggtaagggagaggaagattagttcccttttttttgtttttttttctggttaagagaggtacttatggtggtttagattaagatgagaaacgtcaggtattaagaccattgagcaaagggaggaaagtgagggaagggtagagatggattccttattgttagcttttggtgcattttgtcaaaaagtttgttctttggtttaagatgtaagacctgtaactttctccatgattttaaaaagcatgtgcttctcttgtttgttcaaatctatggaaaaatcatgtgtacagtttcatggtttcagccgttcacagcttcacatcagttcaaaactaaaagctgagtagtagtaaactttgaaaagttcaaaatttctcataaatgatacaaaactaaatgatcattttcccgccaaatggactaatatccgaaaaacagggatatattttcttcagagcgagatatttaagtcacatcacgaccacgattcacatatcacaacttctctcttttccggtaaaaacttccgccaacggagaccgatgtgtgttctggttgcctaaattgaccgaatcggttcgttaattgcgtacctatatgttttgtttttgttaatttctgtatctctaagtcgcatccgaatctagggttattgctcaatctagggtttatgtgttctcgtgaggtttgggttacataaatacaaaagacgcttaatttaggtttcttatttctttcttctagcttgaggtgcttttcactttctacactttgtctttagggcacttgcaaattttagctctttttcaattttgatctgtgtgcttttagatttacgttttgtccctatgtgtattatcttaccaatgttaaagtatcttgatgtccatttatatatttttctatcttctgcaggaaagttgttttcttgagtgcttattgtccttttgtttgatgatagataccacttcaaacaagcttttaagaaggagagctgtttcagagactttgatgaaagggacttgtgctgagagtgttggtaagaagagaaagaggaacgagtatgatgatagttgcattgctagatatatcggtgctgtaagtaacaatagaagagggtctagtgacaatggagatgcatgcataggagaagagtcggcacaagcaaacatttctgaatgtgttgttggtccaaagtttaacgactttagtaagctgagggaagaagcaaactttaaagttggtcagacctgggcgctttatgatacaatggatgggatgcctagattgtatgctcagatcaggaaagtttcagctccttgttttggtcttatgattacatatctagagccagattcaaatgatgagaaagagctccaatggtttgaaaaagacttgcctgtttctgttggtaacttcaggcttggggaaaataagagcacaaaagatcgttcaatattttcacatgttattcattgcaatgaacggagcaacgctagttgtttcagcatcacttgtcgtttcatcagtacttatcattttagtgtatcccctagaaatggagagacttgggcgcttttcaagaactgggatattaagtggtctttaaaaccagattctcaccgcaaatatgagtatgaatttgtcaagattctgtcagattacgctgatgaaactggtgtatatgttgcatacttgcataaagcaaaaggatttgctagtgtgttctttcgaatgggaagaggttatgaaggtatatttcgtattttacctcagagtttgtatcggttctcccataggattccttcctttgactggaattgaaggaaaaggtgtgccaaaagatgcttacgagctggacaaagctgcgttaccagaaacaatcgaagagttcatcgtgcctttagactctgagagtaatataaagtctaaacgccaagatatatactttgctagcaagggtaatgtttttctgactggccagatttggtcattttactgtggtgatgattctttgcctctgtactacggtaggattcagaagatcacttttacccaggcatttatgcaggatcctgtatgtaaattacatataggtcggctaaaggctactcgtttccctgcggatgttatcgactgggaaaacaagggaacgcctgttggttgtggaactttctacgcaagaaaagctctagaaataatcaccccaagtgaggtttcacttcagataactcctcaaacctctattgatggcattgaatataccattctccccaagattggcgaagtttgggtgatatacaaatactggagtcgtgacatggatgcagaggactttagttttgcttcttataacattgttgaaattcttgatgacaccttggagtataaggtccaattgctgaagcacgaccccttttataaagatcataaaaaggagaatacgttgttaagggcagttaagaagaatgagagctgggaaatggaagggtcgggatcgtatataccaacatatacgatcccgaaaagggaaaggatcagattctcgaataaggttcctgcttcacgtgtaaccatagagatgtacggagagctagtggatcttataagtgttgattctagagcattaccttcacacctaattgcttcagaccattgagcgaagatggtgagggaagccagtgattcctttttgttagattattggggcatttggtgaaaaagggttttgttttttcggttaagaatcttaagactttctccatgatgtaagaatgttcttatctatgatatgagagagcaagtatttgcaggttggtctaaaattatctctaactaaatacgttttttgagttgaaagtagttaaaagtatttcttgcatctgttggatgaggtttttgctgatctgctctttcagacttaacttaagtcacttaagtgacctctctgcagatcacagatttttaaccttgtctaattctcattcacgttttaaaatgcttggctctatggttggtttataaattcatgacaaatgactcaagaacaaagaagcaagggaggtgataaaatttgtccaggttagttataaagttaaactgtttttttttttttttttgtgttatgttgatctatcaaagtttaaggaaatacaataagtcaatactttgatcctttactctgtggatcaaaatttataattatacatctctctactgatcacatataattttacattaagagatctctctactgaatactgatcatccgttttccgccaaatatattgacaatgaactttatttaccgcgaaaagatttaagaattcttttttttttccagtcactctcacttcttatagcccgtcaaaagtctccgccgacgacgactgcgatttgcttttgtcgcaaccattttgttggtaaaattatcgtagattgtattctttgcttgatgtcgtatctgtgtttgtagctgaatctagagtttatgttttcttctcgcattttttcccattgtggtttcttattacattctctagaattgagatgcttgtaacgtattttcgtctgcgtgattattctgtattctgttcggcgttttgtgtctctttttaagaccgattttaaccagaaactgtattttctcattttcttcaggaacccattgaggtggaatttcacttcgttttgatgatggatgtcactgcaaatgagcttcttagaaggaataatgatgtccagattaggactgatttggttgcatcgacgacacccaagaaccagcaagaaaaggctcaagctttctccttgcaacaacagaagaaagtcccaagtaagaatccagacatacatttctttggaaatagatgctcatttggtttgagctgtgctggtaaggttggtgagaagagaaagaggaatgagtatggtgaaattgtttatactgaaaatcgcagcaagcctgaagatgttacgtaaatctaggcaataaaagagtgtcaggtgatattggaggtgcaggagaagaagagtctggaagcggaaagcaactccatgaaattgatctttgcaaagaaacattgccagatgtctttaacatgaatgctcaagtgggagttgcaatggggatctctcagaatcttgaggcagataataactcttttttgtgtgattcaggttcagcaggtgcagtaccacaaaagatttctggatgtgctggtttgaaatttaatgactttgataggctgagggaaggagtaaagtttgaagctggtcaaacctgggctatttataataatacggtggatcagatgcctagattgtatgctcagatcagaaaagtttcagctccttgttttagtcttaggattacatatctagagccagatccagatggtgagaaagagacccaatggtttgaggaagacttgcctgtttctgttggtaaattcaggcttggggaaaataagagcacacaagatcgttccatattttcacatgttattcattgcaatgaacggagcaacactagttgtttcagcatcacttgtcgtttcatcgacacttgccattttagtgtatcacctagaaaaggcgagacatgggcgcttttcaagaactgggatattaagtggtcttcagagctagattctcaccgcaaatatgagtatgaatttgtcgagattctgtcagattacgcggatgaagctggtgtatatgttgcatacttgcataaagcaaaagggtttgctagtgtgttcttccgaatgggaactggttatgaaggtatatttcgtattttacctcgcagtttgtatcggttctctcatagggttccttccttcaaattgactggagacgaaggaaacggtgtggcaaaggatgcttatgagctggatgaagctgcgttacctgaaacaatcgaagagttcatcatgccttcaaactctgagagtgaaacaaagtctgaacaccaagccatctactttgctagtgagggaaaggtctttcaaactggccagatctggtcatttcacagtggttatgatgatttgcctctatactatggtaggattcagaagatcacttttactcaggcatttaagcaggatccggtaattaaactacacataagccggctaaaggctactcgtttccctgaagatgttatcaactggaagtacgggggaatgcctgttggttgtggaacattctacgcgagaaaagttcaagaaataatcaccccgagtgaggtttcacatcagataatgcctcaaacctccatggatggcattgaatataccattctccccaagattggtgaagtttgggcgatatacagatactggagtcgttacattgatgtcgatcgcttggaattcggtctttatgacattgttgaaattcttgatgacactctggactataaggtccaactgctgacgcaacaacctgtttctgatgatcgtaatgatatggaacataggttgtttagggcatgtacggagtatacttctaacgaggatgatgggtcggaaccaatatttacgatcccaaagacggaaaggatcagattctcgaataaggttcctgcaacgcgtgtaacgaaagagatgtacggagagttggaagacaattcaaaagttgagtttagggcaacacctataaacgttatacactgttgaacagatgaactgaaagaagagaagacgagaagtgccaagtattattttctggttagcttttggtacatcttttgattatgaatcttatgactttctcttatgatgatgatgttcttatatgtgatatgaaacaacaaatattttgtagcttggtatgttgtaatttttctcactttttgtgtagtttaagtgaaaattaatcattgacaaaaaaaaaaaaaaagttaaaattaatctactaattcttgcatatgttcttgtaatgtgatgtggtttttgctgttttgcttttttagactcaagcaatcaatctctctgcagactatagattcaaccttatatctttttccaaattcggttataaaattacatttgtcactttgtttgattaataattatacatttgtttcccgccaaaatatattgccaatttaacatttaccgcgaaaatggttacaaggttaaatcaatatttactaatttacattagagacagtagaaaataaaaataatttctattctcttcttctccggcagaagtctccaccaccgccgccgaagattgcgttttgctttttgttgctctttgttgatcgaactggttagtcgactgttattagttgtatatctgaaactctgaatctaaggtttatccgtttacgttagggaggttgatttaggaatggagttctcattacttattttgatttgaaatgcttcaaaaattagacctttcttaactttttctgcgtgatttttctgtgtaacacacctaatgtctatttgcgttttctttctgtgtgtccttgtttaaacagattctagagaagaaagttgtcttcttgagtgtctattttgtttgatgatggatgacactgtgaatgagcttctaagaaggaagaaagctgtcctaaatcatcagatcaagagtgatttggttgcatccacacttgcgaatcatcaggaaaaacctcaagctttctccttgctacaacagaaagatgtccaaactaagagtcccggcacgcatttcagtaactgtgcagttaaggttggtgagaagagaaagcggaacgagtgtggcggcatttgcaatactgagaatcgtagcatgactgaagatgttgtaaatctaagtaaagacagaaatgtagacagcaaaagaagtgcgtttagtgataatggagatgcaacacaagagtttggaagcggaaagcaactccctgaggttgattgttctaaagacccaatgtcaaatgctcaagtgggagctgtagtgggaaactctcgaaatcttgaggtggatcaaaattctggtttatgtgattcagaatcaggaggtgtagtaccacaaaagatttctggatttgctggtttgaaatttaacgactttgataagctgagggaagaagtaaacttcgaagttgggcagacctgggctatttttgatccagtggatggaatgcctagattgtatgctaagatcataaaagtttcagctccttgttttggtcttaggattacatatctagagccagatccagatggtgagaaagagctccaatggtttgaagaagacttgcctgtttctgttggtaacttcaggcttggggaaaataagtgcacacaagatcgttcaatattttcacatgtgattcattgcaatgaattaagcaacactctttgtttcagcgtcacttgtcgtttcatcaacacttgtcattttagtgtatcccctagagaaggcgagacatgggcgcttttcaagaactgggatattaagtggtcttcagagccagattctcaccgcaaatatgagtacgaatttgtcgagattctgtcagattacgctgatgaagctggtgtatatgttgcatacttacataaagcaaaaggatttgctagtgtgttcctccgaatgggaactggttatgaaggtatatttcgtattttacctcgcagtttgtatcggttctcccatagggtcccttccttcaaactgacaggagtgaaaggaaaagatatgccaaaagatgcttatgagctagaccaagctgccttaccagaaacaattgaagagatcattgtgccttcaaactctgagagcaatataaagtctaaacgccaagccatctacattgctagcaagggataggtttttcagactggccagatctggtcattttacagtggttatgatgatttgcctctgtactatggtaggattcagaagatcacttttactcaggcatttaagcaggaccctgtaattaaactacacataggtcggctaaaggctacccattcccctaaggatgttatcgactgggaagacaggcaaatgcctgttggttgtggaacattctactcaagaaacgttctagaaataatcaccccaaatgaggtttcacatcaggtagttcctcaaacctcaatggatggcattgaatatactattctacccaagattggtgaactttaggtgatatacagatactggagtagtcttattgatgttgaggacttggagtttggtctttatgacatggttgaagttcttgatgacactttggactataaggtccaactgctggagtacgaatccgttcatgatgatgatgatgatgacgatgaaaatgggaataggttgttcagggcatgtacggagtatacttataacgaggctgaagggtccgaaccaatatttacgatcccaaagtcggaaagaatcagattctcgaataaggttcctgcttctcgtgtaaccaaagagatgcatggagagttaaaagagtttttaagtgttgattatagggcaacccctataaatgttatacactgttgaacagaggaactgagagaaggaaaggtatgggaagcgccaaggattcctttttgctagcgcttggtgcattttgtgaaaagggtttgtctttttggctaagaatattcaagactttctctatgatttaagaaatgtatttatctattgatatgaagcagcaagtatttgcaggttggtctgaaattttcttttcactaaatgtgtcttttgtgttaagagaagttaaactatttgttgctctaatgtgatgtggtttcatacttaagtgatctctctgcagatcgcaaaggtcaactgtccagttagatttgtttcagtaaaacgagcatagtcaaaggttagcttatgctcgtttttctaaaaaggagatagcttgtgcttcagttaatgccttaatggatagttcatggcaaaaaaatataaaacttttctttgtgttgttatgttgatccatcgaagtgtaaggagtaccacagtatgaaccttttcaaggatatacttactggtttatactttttattgtggatagttggtcgttggtctgtgtgagccatgaactgaagcagcttgagagagagaagttgttatttaaaatggagactctgaattagcttaaatcttttgttgatgagcaagagcaggatgtggagcgtattaggcacaaagttatttttaacaaaggttgattccatgaagaagaaaatgaagactgagtacatcaatgctatcaggctaagaaaaatatgaagaaaatattgaaaagcaaaagaaaggaacgcattcaaaatgcaaaaaggttaagcatacattgcaaaatataagtgaaaaataaccattacagaatatattctcatctcctcaagacctcaatcctaaggcctaataagaatctgttgttctgttctttaataaatatattttgattttttttagttttaagcatctttcatacaattttttcttaactcttttatatgaagtttgattttactgtagaaaaaaaattcctttacaaaaaatatgccaaaatatatatattttttgtatatgttcaacaaatattattttaaaatctaaaataaataatattttagacctcttttaccacagtccacatgcgttggaccatcgcacaacctataattgtggatatatgatttacaattttacaagccagatatgaatacaaaactcactacttttgtacgatgatcaaatagagtagtaagtatagttaaaataagagatgtgtgtcttgtgtccaacatagatcaacacctcagaaaaattgggttttataggctgtgctaattatttattattaatggaacatttattgaggaattttgatcctctcattttgctcttaaattttgtgttctaattaaacattttattattgattcaatatttgattattatatatgcggaataaacttatttatctctaatttgagaccaacttaataaaaaagaggttgacaaaaatattcttacaattttattcataaaaaaactaaaagagaatttaaaacaaactcgatagaggaaaaaaatatgactatgaaaagacacttataagcgctcctaacaaaaaaagaagatatatattatgaatttcatatactttattttgaagactagttgtgtgattttgactccacattcaacactacatattctcttttcgttgcatgcatatatcacattaagctaatcgtgagtaaaaaaactccctgtaaatcacttggactacaaattagtgatgatgtgcacagtttgcacatttactcgaaatatttgctaaaatacttgtaacattttttttaattacaatttaattatttattggagagacaagaatttttttttatatatatttgaatgttgaattctgaagttttagataatctatgaattctgaagtaaataattttgtctcacctctgtgttgatacgttataaacgcaccattgataagcttccaacacaaaccaacatcaaactacatcgatgtatcacttcttcacacacaatactctcgattagagaagatcaatattgaaaaaatcaaaagagaatatagagactagaatcttcagcaccatctttagattctacttttcccaagtagtttcgtaaaagatataatcaaatattgtatagtttagtgtatttaaatttctaattgattttatgttttaaataaatatatcgctttggtattcaatgtaagttttttaagaaacagatatagattttttggttcgatttttgatctgaatcgtttaaatcgatttttttctttgtaaaaccctaaaactaaaatatctattcttctcaaaaaagacttttatatccataaataaagtctaatttgagtataaaagtcttttccgaataatagaaaatgaccaaaacacccttgtcttcacaaattggtagcaatttagctaaacttggaagggtttttacgtaaataaacaagaataaaaagttcaaatgaccttaaagtttctaaaaattacagtaaaaccagagaaccatataaaccgtgaggtgtctccccagaaacgaagacgaagacagattccagtcaaagaggcagttgggcatcgacgtgagctttgacggtaccctatctcctccgtttcctctctctgtttctccgaactccggtgagtttccgacgctctctctgtctctctctcgcactctctgtgccattctcttactcttcagtacggttctgttttctgaaatcgattagtctttggttttgtcaaaagcccataattttaccttcatttctgagaaattcgacgctgtttctcatgtcttacttgaatgtatgtctttgttgaaaacatgtttggttctttcgttttcttttgcttttgacagtgctgaattcgaatttttacatgtagggttttagcaagagaatagcttgaaaatttgggattttttttttttggtatgagcaacaaagatgtctgaattgcatgtcatcgttggaaaacttgtttggttctttggtttttgcatttattttaacagtgttgaatttcgaatttctctgtgcagggtttagcaagagacgagattgaagaaatctgggatatttttaaagtatgagcaacaaagatgaggctctacgagccaaagatttagcagaagattggatgagcaagtcagatttcacaactgctcgtagaattgcgataaaggctcagaaaatggatgcaactctggagagtgttgttgctcgcatgattatggtgtgtgatgtgcattgtgcagcattggagaaatctggtgatgagactgattggtacaagattcttcaagtggagcaaactgcagatgaaaataccattaagaaacagtataagaagcttgctcttcatcttcatccggacaaaaacaaactccctggtgctgaatctgctttcaaaactattggtgaagctcagagggttcttttggacaaggataaaaggaggtttcatgacatgagacgaaaacctgtctttagaaggcctgcaccagcaccagcaccagcaccatcatttcaaccaccccaacaagccccgaccacaccttttttcactcagcgtggtttccagacaaatgttaatgtggcaaggaagagacctgaaaaccagaagaaacctcaagctcaaccaactgggtttgatggtctcgccagctttacgacctcatgcgcattttgtcacaggaagtatgaatatcaaaggaaattaatcaacacactgatgacttgtttgaattgcggtaagcaatacgttgcttttcaagaaactttccaaccaccagttcagccgactttctccttcttccaacagagcaaggttcctacacaagaggcaggcaaggcagtggagaagcagccagaaagttgtgctaaaagtttttttagtaaagagggttctagagcaaaaagctctggtgtttctgctgagaacatcaatggaaagagaaagaggaagaaggtcgttgaatccagtgacagctcttgcagcgagagcagtattgactgcaatgaagttccagctggtggacaagattcggggtccagcggtgcacagcattctcggaggtctgtccgtagcaagcagcaggtttcatataaagaggataaagaagaggatgcagaaagtgctgaggagtctgatttcagaaagaagtcacatgaggatcaaccgtttacagaaaccttgccaaatggtttaaacaggacaaagaagagtaaagcagcaaaaaattcaagttcagggagtgcgtcagatgcagaaattcagtgtactgatcctgatttcagtaactttgagaagtcgagggaagtgacctgtttcaaagctggtcagacatgggcaatctatgatgacatgggtggaatgcctcgatactatgccatcatcagaaaagtcataaggaaacctagtttcatgctcaaaatacaatggctagaggctgaaccagatgatgagaaagcaaacctgtgggttcgtaaaaacttgcccatctctattggcaagttcaaacttggtggaaatgagaacatagagaaaactccatgtttctctcatatgatctactttaaggtaggaagcatgaaggatactgtcagagtatacccaagaataggagaaacatgggctctcttcaagaactgggacatcaattggtcctctggtcgtcggcgttcttcccatgagcatgagtatgagtatgaatttgttgagatcctgtcagaatatgttgaaggggttgcaatacaggttgcgttcttgcgtaaaataaaaggctttacaagtgtattctgtcgaattgcaccaggtggtggatcagacacaattcagattccgcctcatgagttgcttagattctcccacagcatcccctcaaccaaattgacaggaaaagaaggaaatggcgttcccattggttcttatgagttcgatacagctgcattaccacagaaaattgaacaagaagaagctgtccctgtcttacgagaatctgccaagttaaaccaagtcaatcataactctccaccttcatcggagccagactgtatcgtcattcctaatttccagttcaacaacttcagcgctgaaagattggagggaaagtttgcacctggtcagatatggtcattgaacagcaaagaggatggcttgcccaagtgttacgcaaagattcagcagatagtatggaggccggtattcaagttgcagataaaccggctagagccaaaatcattgcttgagaacgttatacagtggcatgacaaaagaatgccagtcagttgcggaaatttcactttgaaggaaggccgggacgagacactcactaaagtgactgatttttcacatcagattaaggcagaaaagcatttcaggataaacgagtacattgttgtccccaagactggcgaaatttgggcaatgtacaagaactggagtgaaacaatcaaggccacaagcttgaagaggtgtgaatatgaggttgttgaggttcttgatgacaatgacagtcacatcgaggttatgctgttggaacaggttgatgggtttatttcagtattcaaggaaaaattggaaggaggcatcgatgtgaagaagaagatcccaaggtgtgaattgttgagattctcacattatgttcctgcattccgcttaactggagagagagatggagctcttagaggctatgttgagctcgatccaagtgcgtttccccttaacttgcgcaggtcttagactaattcttgtagggagggttgtttctttgtaagaactagtagtagtaatggcttttacattctgtcgaaatgtgtagttttcagttctagattcagacgttaacttccatcaaaaaatgtgttgatgaaaaaacctttacccttatatgtgcctcttgctctgtcttatcacgtgtgtaatacagacaactaatgtgtgtcaatttctgtcttcacttaccgtttttcgtttgagttgattagaagaaactaaagcaaaggtcagaaaataatcaactaacaagtcgttaaatgcagatagtaaacaacaagggcgtttggtctagtggtatgattctcgctttgggtgcgagaggtcccgagttcgattctcggaacgccccttcctttttactcattttaatgagttgacaagaaacacttctctcaggagccaaaaaatttaaaattttcaaaacattcttgaacctagaatctcattcacaacagctctttcacttgatgtacacaaatcacacattctcactgtaattccacaaaagttattttcatacaaaagtacaaactacaaagaacttgtatatctacaggtctcaatgttgtaagagaacccatctatctatgcagcaatttaccctttcaaatccgaactttaagaacagaagagactatctttatactaagtttgtattccgcggaaaccgcacaggccgagaggaataacaaatgcacaacaagtttaagcacattgccatcccgaaacccagtatccctgcaaaaagcattgcatagataaccggcacacgaagctgcaacaaaagatatttacatgagaactttttccaattgtaggtatgtgattatgtgttttaagtaattcaaagcctaaaacatacggtttagtattacttactgtagcatataatagatgaacaagcaatgccactagtgcaaactcaagagctgcgtatgtccatatgtattctctgatcgctgcaagtccggaaagtaacagttaacagttttacataattgtgttgggggaagaacaatatagattggaaatttttcttgagggagtggtattataccgaggatgacggcaaaagttgaggctaagagtgcaagggtgaatgaaaatggcgctgcaacaaatattgcctgtgaattcaagtcacgaatctacagaatagataagattccctgttatgttgtcttcgcaatgaaaggtaagatctttgtaatgaaagatgggatatttgttatgaaataccggaatgtatgtgtttttgaatactcggggtaagaaaaaggaagcattaccagtaaatgttcaaggaagaagaagtagcagacggtgctgatgagtacaagcactacaaactcttgcccaacactgcattaccagtcattcgattatcaattgtcagattctttaaggaactttggacaaggaaaaagggaaaaagtttttaaagcgttctgatttacctgatgctttgtggctctgaactctgctgagtgagttcccgtctattggtaagttgattaattgttgggacacggaggagtatcactggtaagttccggacttcttgtctgcatacatcgcagattcgtgttccttttgtactaaaccacttaatggcacaatgctcgtgaacaagtctgaggtcacctttgcaactgcattccattttcagtgtgttaccttcttcgcacacatcaagacaaatcctgcatactgcttcttcttcaggaatttcttcttctgtttcttctgcaggaactggagtgatttgatctgccaatgaaaacagaagaaataaggaacataggagtgtgaacttgccgtttcattgataaaaaaaaacaattttctttgaagtgataaagcttctcgtgaatcaatctattccatcattatccatgaattctaaaagcagccggcaaaaacaaatagagctcaaaacttcaatgaaagttagaaataataccgccatttgcttcatttgaaatgtgatttttgttgtcgtcaaaagagacagctcgtacaatcactctgttcatggacaaggatcttgaaacagatgcatgaagaccatctttctgcatcaaacaaattccaatcttatactttcgaaaagaagctatttgaagaaaattaaaatacttttgcacactacaattaaaatgagactcacattagacttaggctgttcactatgcaccacagcggaaacaggcgttgtagatacaaccagagacagtttagcagaattactagaaggaagtgacaaacaccttttccagtaaggcgatgtgatcggacttgcaacaagaggcttttcactggtttctgaaacactaggacttagtagcaatcttctctcatagtttggtagagaagctttccttttcagactcagatttctcaaaattcctaaactaggcgtcggttttggtggtatttggatagaaacatccaattggcttccacttggctgagatctggatacatcttcaacagattgttctttaacctgataacaatcattgattaaaacctcatactgataaataaaaaaatgaatctttctacagtgaagcaaccaagttaacaatcatagcaatcagggactgaagaacactaagtatgcaattctccatttcctttttttctgattggttaatttcagataccagtgataaaccctagattattcacaaaatgaaattcatgaaacgataccaaaccaattgagcaagaaatgtaaaaccctttagcgattctgaaaaatatacatttaaaatcacactaacggagactttgtattataaagatttcaactttaacctagaatctagcaaaagaattacaaaaatttaagatttcgaatacctgagaagaagaagaagaagaagaagaaccagtagaagaatctttagcgagaacaaaatttctgggcggttgaattgaagagccttccatcataatcgaaccaatagaaaccaaaacaattttgaagaaatcaagtttgatcgacaaaaaaatctgagccagggagagaagcaatcaatctaaagagatttgagaaatttgtcgtttattaatatgtagctaaaatccgacaagagagattttttttattaatgtgtgtgtgtatgcaactatgcatgcatcagaagaatccagcatttttactgctctttaattacccgcttaattcaattaccagtcaaactcactcttcctctgttcttcagttacccatttactttaattcgactaaaccgaactaaaccaaacaaaaatgcttagaccaaagcctgcttaatttatttcccatcaatatcacttaccaaatacaaaataagagtgtattcaacattcatatcaattgggcgccgacccagtctgtgtccggatagcccattatataacttttgggctaaaaatatttatttgcaaaacaaaaaaaaacaaaaaaaaccgcgagcttgtgagacataagagagaagacgaacagagtgttcacaaaccctaacatttcagaaagacgattactcgataacacagaagagagattaaatggtaaatctcatgcggaagttcgcaaaatcgtaagttcctgtttcatatcgttatgatatttgaccatttcgtagttaggtttcgggattgctttgataaggtagttggattctctccatttgtaataaccgtatcagttttttgaatttcaggattggtagaccgggaacagaattttggagaggggaagatatgataagcgcattacctgatcatttgctatgtcatatacttatttttctttctactgatgaatctgttttgacgagtgttttgtcttctagatggagaaatctctggaaatgggttcctaggttagacttaaacacctctgatttcccataccctaatgacgtaacttgtgcggctttcatcgacaagtttctgaatctttataacgaatcctacttgcgggaattcaagttaagaattgaccaagctaactttcgcagtaatgtatctctttatgagccgtgtcttggtgtagtgattaagaagcccaacgttcggcatttccaagttgagagtgatctgcttgagcattggtgcactagtgagatacgattaaccctttctgcttgccaggcattggtatgcttaaagctccatttagtatggctgaatgactttgagtctctatctttgccctgtctcaagatcatgtacttggaagacgttgtatttcctagcgatgcggctgcagagacgctaatctcgtgctctccggttcttgaagatttaaaactaagcctccatagagatgatgttgtagttgttctacgtgtctactcacagtcactaaagagcttcactctaaaacgggcggttcctgtttatgctataaacggtgcacatacagtgttggtcgatactccgaggcttgtgtatatgagtctcatagattaccaattcaaaagctt

SEQ ID NO: 1447 - DNA, 89453 bp, Arabidopsis thaliana
gaattcttttttttttccagtcactctcacttcttatagcccgtcaaaagtctccgccgacgacgactgcgatttgcttttgtcgcaaccattttgttggtaaaattatcgtagattgtattctttgcttgatgtcgtatctgtgtttgtagctgaatctagagtttatgttttcttctcgcattttttcccattgtggtttcttattacattctctagaattgagatgcttgtaacgtattttcgtctgcgtgattattctgtattctgttcggcgttttgtgtctctttttaagaccgattttaaccagaaactgtattttctcattttcttcaggaacccattgaggtggaatttcacttcgttttgatgatggatgtcactgcaaatgagcttcttagaaggaataatgatgtccagattaggactgatttggttgcatcgacgacacccaagaaccagcaagaaaaggctcaagctttctccttgcaacaacagaagaaagtcccaagtaagaatccagacatacatttctttggaaatagatgctcatttggtttgagctgtgctggtaaggttggtgagaagagaaagaggaatgagtatggtgaaattgtttatactgaaaatcgcagcaagcctgaagatgttacgtaaatctaggcaataaaagagtgtcaggtgatattggaggtgcaggagaagaagagtctggaagcggaaagcaactccatgaaattgatctttgcaaagaaacattgccagatgtctttaacatgaatgctcaagtgggagttgcaatggggatctctcagaatcttgaggcagataataactcttttttgtgtgattcaggttcagcaggtgcagtaccacaaaagatttctggatgtgctggtttgaaatttaatgactttgataggctgagggaaggagtaaagtttgaagctggtcaaacctgggctatttataataatacggtggatcagatgcctagattgtatgctcagatcagaaaagtttcagctccttgttttagtcttaggattacatatctagagccagatccagatggtgagaaagagacccaatggtttgaggaagacttgcctgtttctgttggtaaattcaggcttggggaaaataagagcacacaagatcgttccatattttcacatgttattcattgcaatgaacggagcaacactagttgtttcagcatcacttgtcgtttcatcgacacttgccattttagtgtatcacctagaaaaggcgagacatgggcgcttttcaagaactgggatattaagtggtcttcagagctagattctcaccgcaaatatgagtatgaatttgtcgagattctgtcagattacgcggatgaagctggtgtatatgttgcatacttgcataaagcaaaagggtttgctagtgtgttcttccgaatgggaactggttatgaaggtatatttcgtattttacctcgcagtttgtatcggttctctcatagggttccttccttcaaattgactggagacgaaggaaacggtgtggcaaaggatgcttatgagctggatgaagctgcgttacctgaaacaatcgaagagttcatcatgccttcaaactctgagagtgaaacaaagtctgaacaccaagccatctactttgctagtgagggaaaggtctttcaaactggccagatctggtcatttcacagtggttatgatgatttgcctctatactatggtaggattcagaagatcacttttactcaggcatttaagcaggatccggtaattaaactacacataagccggctaaaggctactcgtttccctgaagatgttatcaactggaagtacgggggaatgcctgttggttgtggaacattctacgcgagaaaagttcaagaaataatcaccccgagtgaggtttcacatcagataatgcctcaaacctccatggatggcattgaatataccattctccccaagattggtgaagtttgggcgatatacagatactggagtcgttacattgatgtcgatcgcttggaattcggtctttatgacattgttgaaattcttgatgacactctggactataaggtccaactgctgacgcaacaacctgtttctgatgatcgtaatgatatggaacataggttgtttagggcatgtacggagtatacttctaacgaggatgatgggtcggaaccaatatttacgatcccaaagacggaaaggatcagattctcgaataaggttcctgcaacgcgtgtaacgaaagagatgtacggagagttggaagacaattcaaaagttgagtttagggcaacacctataaacgttatacactgttgaacagatgaactgaaagaagagaagacgagaagtgccaagtattattttctggttagcttttggtacatcttttgattatgaatcttatgactttctcttatgatgatgatgttcttatatgtgatatgaaacaacaaatattttgtagcttggtatgttgtaatttttctcactttttgtgtagtttaagtgaaaattaatcattgacaaaaaaaaaaaaaaagttaaaattaatctactaattcttgcatatgttcttgtaatgtgatgtggtttttgctgttttgcttttttagactcaagcaatcaatctctctgcagactatagattcaaccttatatctttttccaaattcggttataaaattacatttgtcactttgtttgattaataattatacatttgtttcccgccaaaatatattgccaatttaacatttaccgcgaaaatggttacaaggttaaatcaatatttactaatttacattagagacagtagaaaataaaaataatttctattctcttcttctccggcagaagtctccaccaccgccgccgaagattgcgttttgctttttgttgctctttgttgatcgaactggttagtcgactgttattagttgtatatctgaaactctgaatctaaggtttatccgtttacgttagggaggttgatttaggaatggagttctcattacttattttgatttgaaatgcttcaaaaattagacctttcttaactttttctgcgtgatttttctgtgtaacacacctaatgtctatttgcgttttctttctgtgtgtccttgtttaaacagattctagagaagaaagttgtcttcttgagtgtctattttgtttgatgatggatgacactgtgaatgagcttctaagaaggaagaaagctgtcctaaatcatcagatcaagagtgatttggttgcatccacacttgcgaatcatcaggaaaaacctcaagctttctccttgctacaacagaaagatgtccaaactaagagtcccggcacgcatttcagtaactgtgcagttaaggttggtgagaagagaaagcggaacgagtgtggcggcatttgcaatactgagaatcgtagcatgactgaagatgttgtaaatctaagtaaagacagaaatgtagacagcaaaagaagtgcgtttagtgataatggagatgcaacacaagagtttggaagcggaaagcaactccctgaggttgattgttctaaagacccaatgtcaaatgctcaagtgggagctgtagtgggaaactctcgaaatcttgaggtggatcaaaattctggtttatgtgattcagaatcaggaggtgtagtaccacaaaagatttctggatttgctggtttgaaatttaacgactttgataagctgagggaagaagtaaacttcgaagttgggcagacctgggctatttttgatccagtggatggaatgcctagattgtatgctaagatcataaaagtttcagctccttgttttggtcttaggattacatatctagagccagatccagatggtgagaaagagctccaatggtttgaagaagacttgcctgtttctgttggtaacttcaggcttggggaaaataagtgcacacaagatcgttcaatattttcacatgtgattcattgcaatgaattaagcaacactctttgtttcagcgtcacttgtcgtttcatcaacacttgtcattttagtgtatcccctagagaaggcgagacatgggcgcttttcaagaactgggatattaagtggtcttcagagccagattctcaccgcaaatatgagtacgaatttgtcgagattctgtcagattacgctgatgaagctggtgtatatgttgcatacttacataaagcaaaaggatttgctagtgtgttcctccgaatgggaactggttatgaaggtatatttcgtattttacctcgcagtttgtatcggttctcccatagggtcccttccttcaaactgacaggagtgaaaggaaaagatatgccaaaagatgcttatgagctagaccaagctgccttaccagaaacaattgaagagatcattgtgccttcaaactctgagagcaatataaagtctaaacgccaagccatctacattgctagcaagggataggtttttcagactggccagatctggtcattttacagtggttatgatgatttgcctctgtactatggtaggattcagaagatcacttttactcaggcatttaagcaggaccctgtaattaaactacacataggtcggctaaaggctacccattcccctaaggatgttatcgactgggaagacaggcaaatgcctgttggttgtggaacattctactcaagaaacgttctagaaataatcaccccaaatgaggtttcacatcaggtagttcctcaaacctcaatggatggcattgaatatactattctacccaagattggtgaactttaggtgatatacagatactggagtagtcttattgatgttgaggacttggagtttggtctttatgacatggttgaagttcttgatgacactttggactataaggtccaactgctggagtacgaatccgttcatgatgatgatgatgatgacgatgaaaatgggaataggttgttcagggcatgtacggagtatacttataacgaggctgaagggtccgaaccaatatttacgatcccaaagtcggaaagaatcagattctcgaataaggttcctgcttctcgtgtaaccaaagagatgcatggagagttaaaagagtttttaagtgttgattatagggcaacccctataaatgttatacactgttgaacagaggaactgagagaaggaaaggtatgggaagcgccaaggattcctttttgctagcgcttggtgcattttgtgaaaagggtttgtctttttggctaagaatattcaagactttctctatgatttaagaaatgtatttatctattgatatgaagcagcaagtatttgcaggttggtctgaaattttcttttcactaaatgtgtcttttgtgttaagagaagttaaactatttgttgctctaatgtgatgtggtttcatacttaagtgatctctctgcagatcgcaaaggtcaactgtccagttagatttgtttcagtaaaacgagcatagtcaaaggttagcttatgctcgtttttctaaaaaggagatagcttgtgcttcagttaatgccttaatggatagttcatggcaaaaaaatataaaacttttctttgtgttgttatgttgatccatcgaagtgtaaggagtaccacagtatgaaccttttcaaggatatacttactggtttatactttttattgtggatagttggtcgttggtctgtgtgagccatgaactgaagcagcttgagagagagaagttgttatttaaaatggagactctgaattagcttaaatcttttgttgatgagcaagagcaggatgtggagcgtattaggcacaaagttatttttaacaaaggttgattccatgaagaagaaaatgaagactgagtacatcaatgctatcaggctaagaaaaatatgaagaaaatattgaaaagcaaaagaaaggaacgcattcaaaatgcaaaaaggttaagcatacattgcaaaatataagtgaaaaataaccattacagaatatattctcatctcctcaagacctcaatcctaaggcctaataagaatctgttgttctgttctttaataaatatattttgattttttttagttttaagcatctttcatacaattttttcttaactcttttatatgaagtttgattttactgtagaaaaaaaattcctttacaaaaaatatgccaaaatatatatattttttgtatatgttcaacaaatattattttaaaatctaaaataaataatattttagacctcttttaccacagtccacatgcgttggaccatcgcacaacctataattgtggatatatgatttacaattttacaagccagatatgaatacaaaactcactacttttgtacgatgatcaaatagagtagtaagtatagttaaaataagagatgtgtgtcttgtgtccaacatagatcaacacctcagaaaaattgggttttataggctgtgctaattatttattattaatggaacatttattgaggaattttgatcctctcattttgctcttaaattttgtgttctaattaaacattttattattgattcaatatttgattattatatatgcggaataaacttatttatctctaatttgagaccaacttaataaaaaagaggttgacaaaaatattcttacaattttattcataaaaaaactaaaagagaatttaaaacaaactcgatagaggaaaaaaatatgactatgaaaagacacttataagcgctcctaacaaaaaaagaagatatatattatgaatttcatatactttattttgaagactagttgtgtgattttgactccacattcaacactacatattctcttttcgttgcatgcatatatcacattaagctaatcgtgagtaaaaaaactccctgtaaatcacttggactacaaattagtgatgatgtgcacagtttgcacatttactcgaaatatttgctaaaatacttgtaacattttttttaattacaatttaattatttattggagagacaagaatttttttttatatatatttgaatgttgaattctgaagttttagataatctatgaattctgaagtaaataattttgtctcacctctgtgttgatacgttataaacgcaccattgataagcttccaacacaaaccaacatcaaactacatcgatgtatcacttcttcacacacaatactctcgattagagaagatcaatattgaaaaaatcaaaagagaatatagagactagaatcttcagcaccatctttagattctacttttcccaagtagtttcgtaaaagatataatcaaatattgtatagtttagtgtatttaaatttctaattgattttatgttttaaataaatatatcgctttggtattcaatgtaagttttttaagaaacagatatagattttttggttcgatttttgatctgaatcgtttaaatcgatttttttctttgtaaaaccctaaaactaaaatatctattcttctcaaaaaagacttttatatccataaataaagtctaatttgagtataaaagtcttttccgaataatagaaaatgaccaaaacacccttgtcttcacaaattggtagcaatttagctaaacttggaagggtttttacgtaaataaacaagaataaaaagttcaaatgaccttaaagtttctaaaaattacagtaaaaccagagaaccatataaaccgtgaggtgtctccccagaaacgaagacgaagacagattccagtcaaagaggcagttgggcatcgacgtgagctttgacggtaccctatctcctccgtttcctctctctgtttctccgaactccggtgagtttccgacgctctctctgtctctctctcgcactctctgtgccattctcttactcttcagtacggttctgttttctgaaatcgattagtctttggttttgtcaaaagcccataattttaccttcatttctgagaaattcgacgctgtttctcatgtcttacttgaatgtatgtctttgttgaaaacatgtttggttctttcgttttcttttgcttttgacagtgctgaattcgaatttttacatgtagggttttagcaagagaatagcttgaaaatttgggattttttttttttggtatgagcaacaaagatgtctgaattgcatgtcatcgttggaaaacttgtttggttctttggtttttgcatttattttaacagtgttgaatttcgaatttctctgtgcagggtttagcaagagacgagattgaagaaatctgggatatttttaaagtatgagcaacaaagatgaggctctacgagccaaagatttagcagaagattggatgagcaagtcagatttcacaactgctcgtagaattgcgataaaggctcagaaaatggatgcaactctggagagtgttgttgctcgcatgattatggtgtgtgatgtgcattgtgcagcattggagaaatctggtgatgagactgattggtacaagattcttcaagtggagcaaactgcagatgaaaataccattaagaaacagtataagaagcttgctcttcatcttcatccggacaaaaacaaactccctggtgctgaatctgctttcaaaactattggtgaagctcagagggttcttttggacaaggataaaaggaggtttcatgacatgagacgaaaacctgtctttagaaggcctgcaccagcaccagcaccagcaccatcatttcaaccaccccaacaagccccgaccacaccttttttcactcagcgtggtttccagacaaatgttaatgtggcaaggaagagacctgaaaaccagaagaaacctcaagctcaaccaactgggtttgatggtctcgccagctttacgacctcatgcgcattttgtcacaggaagtatgaatatcaaaggaaattaatcaacacactgatgacttgtttgaattgcggtaagcaatacgttgcttttcaagaaactttccaaccaccagttcagccgactttctccttcttccaacagagcaaggttcctacacaagaggcaggcaaggcagtggagaagcagccagaaagttgtgctaaaagtttttttagtaaagagggttctagagcaaaaagctctggtgtttctgctgagaacatcaatggaaagagaaagaggaagaaggtcgttgaatccagtgacagctcttgcagcgagagcagtattgactgcaatgaagttccagctggtggacaagattcggggtccagcggtgcacagcattctcggaggtctgtccgtagcaagcagcaggtttcatataaagaggataaagaagaggatgcagaaagtgctgaggagtctgatttcagaaagaagtcacatgaggatcaaccgtttacagaaaccttgccaaatggtttaaacaggacaaagaagagtaaagcagcaaaaaattcaagttcagggagtgcgtcagatgcagaaattcagtgtactgatcctgatttcagtaactttgagaagtcgagggaagtgacctgtttcaaagctggtcagacatgggcaatctatgatgacatgggtggaatgcctcgatactatgccatcatcagaaaagtcataaggaaacctagtttcatgctcaaaatacaatggctagaggctgaaccagatgatgagaaagcaaacctgtgggttcgtaaaaacttgcccatctctattggcaagttcaaacttggtggaaatgagaacatagagaaaactccatgtttctctcatatgatctactttaaggtaggaagcatgaaggatactgtcagagtatacccaagaataggagaaacatgggctctcttcaagaactgggacatcaattggtcctctggtcgtcggcgttcttcccatgagcatgagtatgagtatgaatttgttgagatcctgtcagaatatgttgaaggggttgcaatacaggttgcgttcttgcgtaaaataaaaggctttacaagtgtattctgtcgaattgcaccaggtggtggatcagacacaattcagattccgcctcatgagttgcttagattctcccacagcatcccctcaaccaaattgacaggaaaagaaggaaatggcgttcccattggttcttatgagttcgatacagctgcattaccacagaaaattgaacaagaagaagctgtccctgtcttacgagaatctgccaagttaaaccaagtcaatcataactctccaccttcatcggagccagactgtatcgtcattcctaatttccagttcaacaacttcagcgctgaaagattggagggaaagtttgcacctggtcagatatggtcattgaacagcaaagaggatggcttgcccaagtgttacgcaaagattcagcagatagtatggaggccggtattcaagttgcagataaaccggctagagccaaaatcattgcttgagaacgttatacagtggcatgacaaaagaatgccagtcagttgcggaaatttcactttgaaggaaggccgggacgagacactcactaaagtgactgatttttcacatcagattaaggcagaaaagcatttcaggataaacgagtacattgttgtccccaagactggcgaaatttgggcaatgtacaagaactggagtgaaacaatcaaggccacaagcttgaagaggtgtgaatatgaggttgttgaggttcttgatgacaatgacagtcacatcgaggttatgctgttggaacaggttgatgggtttatttcagtattcaaggaaaaattggaaggaggcatcgatgtgaagaagaagatcccaaggtgtgaattgttgagattctcacattatgttcctgcattccgcttaactggagagagagatggagctcttagaggctatgttgagctcgatccaagtgcgtttccccttaacttgcgcaggtcttagactaattcttgtagggagggttgtttctttgtaagaactagtagtagtaatggcttttacattctgtcgaaatgtgtagttttcagttctagattcagacgttaacttccatcaaaaaatgtgttgatgaaaaaacctttacccttatatgtgcctcttgctctgtcttatcacgtgtgtaatacagacaactaatgtgtgtcaatttctgtcttcacttaccgtttttcgtttgagttgattagaagaaactaaagcaaaggtcagaaaataatcaactaacaagtcgttaaatgcagatagtaaacaacaagggcgtttggtctagtggtatgattctcgctttgggtgcgagaggtcccgagttcgattctcggaacgccccttcctttttactcattttaatgagttgacaagaaacacttctctcaggagccaaaaaatttaaaattttcaaaacattcttgaacctagaatctcattcacaacagctctttcacttgatgtacacaaatcacacattctcactgtaattccacaaaagttattttcatacaaaagtacaaactacaaagaacttgtatatctacaggtctcaatgttgtaagagaacccatctatctatgcagcaatttaccctttcaaatccgaactttaagaacagaagagactatctttatactaagtttgtattccgcggaaaccgcacaggccgagaggaataacaaatgcacaacaagtttaagcacattgccatcccgaaacccagtatccctgcaaaaagcattgcatagataaccggcacacgaagctgcaacaaaagatatttacatgagaactttttccaattgtaggtatgtgattatgtgttttaagtaattcaaagcctaaaacatacggtttagtattacttactgtagcatataatagatgaacaagcaatgccactagtgcaaactcaagagctgcgtatgtccatatgtattctctgatcgctgcaagtccggaaagtaacagttaacagttttacataattgtgttgggggaagaacaatatagattggaaatttttcttgagggagtggtattataccgaggatgacggcaaaagttgaggctaagagtgcaagggtgaatgaaaatggcgctgcaacaaatattgcctgtgaattcaagtcacgaatctacagaatagataagattccctgttatgttgtcttcgcaatgaaaggtaagatctttgtaatgaaagatgggatatttgttatgaaataccggaatgtatgtgtttttgaatactcggggtaagaaaaaggaagcattaccagtaaatgttcaaggaagaagaagtagcagacggtgctgatgagtacaagcactacaaactcttgcccaacactgcattaccagtcattcgattatcaattgtcagattctttaaggaactttggacaaggaaaaagggaaaaagtttttaaagcgttctgatttacctgatgctttgtggctctgaactctgctgagtgagttcccgtctattggtaagttgattaattgttgggacacggaggagtatcactggtaagttccggacttcttgtctgcatacatcgcagattcgtgttccttttgtactaaaccacttaatggcacaatgctcgtgaacaagtctgaggtcacctttgcaactgcattccattttcagtgtgttaccttcttcgcacacatcaagacaaatcctgcatactgcttcttcttcaggaatttcttcttctgtttcttctgcaggaactggagtgatttgatctgccaatgaaaacagaagaaataaggaacataggagtgtgaacttgccgtttcattgataaaaaaaaacaattttctttgaagtgataaagcttctcgtgaatcaatctattccatcattatccatgaattctaaaagcagccggcaaaaacaaatagagctcaaaacttcaatgaaagttagaaataataccgccatttgcttcatttgaaatgtgatttttgttgtcgtcaaaagagacagctcgtacaatcactctgttcatggacaaggatcttgaaacagatgcatgaagaccatctttctgcatcaaacaaattccaatcttatactttcgaaaagaagctatttgaagaaaattaaaatacttttgcacactacaattaaaatgagactcacattagacttaggctgttcactatgcaccacagcggaaacaggcgttgtagatacaaccagagacagtttagcagaattactagaaggaagtgacaaacaccttttccagtaaggcgatgtgatcggacttgcaacaagaggcttttcactggtttctgaaacactaggacttagtagcaatcttctctcatagtttggtagagaagctttccttttcagactcagatttctcaaaattcctaaactaggcgtcggttttggtggtatttggatagaaacatccaattggcttccacttggctgagatctggatacatcttcaacagattgttctttaacctgataacaatcattgattaaaacctcatactgataaataaaaaaatgaatctttctacagtgaagcaaccaagttaacaatcatagcaatcagggactgaagaacactaagtatgcaattctccatttcctttttttctgattggttaatttcagataccagtgataaaccctagattattcacaaaatgaaattcatgaaacgataccaaaccaattgagcaagaaatgtaaaaccctttagcgattctgaaaaatatacatttaaaatcacactaacggagactttgtattataaagatttcaactttaacctagaatctagcaaaagaattacaaaaatttaagatttcgaatacctgagaagaagaagaagaagaagaagaaccagtagaagaatctttagcgagaacaaaatttctgggcggttgaattgaagagccttccatcataatcgaaccaatagaaaccaaaacaattttgaagaaatcaagtttgatcgacaaaaaaatctgagccagggagagaagcaatcaatctaaagagatttgagaaatttgtcgtttattaatatgtagctaaaatccgacaagagagattttttttattaatgtgtgtgtgtatgcaactatgcatgcatcagaagaatccagcatttttactgctctttaattacccgcttaattcaattaccagtcaaactcactcttcctctgttcttcagttacccatttactttaattcgactaaaccgaactaaaccaaacaaaaatgcttagaccaaagcctgcttaatttatttcccatcaatatcacttaccaaatacaaaataagagtgtattcaacattcatatcaattgggcgccgacccagtctgtgtccggatagcccattatataacttttgggctaaaaatatttatttgcaaaacaaaaaaaaacaaaaaaaaccgcgagcttgtgagacataagagagaagacgaacagagtgttcacaaaccctaacatttcagaaagacgattactcgataacacagaagagagattaaatggtaaatctcatgcggaagttcgcaaaatcgtaagttcctgtttcatatcgttatgatatttgaccatttcgtagttaggtttcgggattgctttgataaggtagttggattctctccatttgtaataaccgtatcagttttttgaatttcaggattggtagaccgggaacagaattttggagaggggaagatatgataagcgcattacctgatcatttgctatgtcatatacttatttttctttctactgatgaatctgttttgacgagtgttttgtcttctagatggagaaatctctggaaatgggttcctaggttagacttaaacacctctgatttcccataccctaatgacgtaacttgtgcggctttcatcgacaagtttctgaatctttataacgaatcctacttgcgggaattcaagttaagaattgaccaagctaactttcgcagtaatgtatctctttatgagccgtgtcttggtgtagtgattaagaagcccaacgttcggcatttccaagttgagagtgatctgcttgagcattggtgcactagtgagatacgattaaccctttctgcttgccaggcattggtatgcttaaagctccatttagtatggctgaatgactttgagtctctatctttgccctgtctcaagatcatgtacttggaagacgttgtatttcctagcgatgcggctgcagagacgctaatctcgtgctctccggttcttgaagatttaaaactaagcctccatagagatgatgttgtagttgttctacgtgtctactcacagtcactaaagagcttcactctaaaacgggcggttcctgtttatgctataaacggtgcacatacagtgttggtcgatactccgaggcttgtgtatatgagtctcatagattaccaattcaaaagcttcaagataatcagcatgagtgactatgtcaaggttgatcttgatgtcgactttgaactgatgcgtgatgaattatcggaaagaaatattgtctatgatcttctcaacaatttttcaggtgttagaaatatgaccatctcgtggacaactcttaaggtatgtaaagtaaaactgtttacaagctctaaaatttcactttatcattctttttctcactttcatgttctgtttactcttctttttgctcgcagtttatccatagattccatgacatgaacccactacccaaatttcgtgacttgacccgtttgcgtgcaactatgtcctcagacgcctctctggaagtgttgcgaatcgttcttgagagctgcccgaagctgaaacactttcacttcaccttggtaatgatctgcaagtttcttacctaagaaatgttttttaatctactcatttctggtttggatatgttgctttgtatttgcaggaattggttaatgattttccagaggcagtaataactggattctcgagagtgttacctcgttgtttggtattttcccttgaatccgttgaaatggaaagcccgatcacggagaaagcaacggaactgaaactggtaagatactttctggagaactcagcaacactcaagaagcttgttctacttctgaatcatgagtctactggagagaaacacgagcctggtgtcttgaaacaactcattgaatctccaagacgctctagtttgtgtcaatttgaagttcttgcagtgcctccaaatccggaaccgtggtggatttatgtaaaaccccagaggtttctttagtgctatcgctgatgaaattctcataccttcctttatgttactctatttttattacgtctatgttgtaacctacatcaaagttgcatttgacaaaggaaggggacggtctagtccaaaagtttgccactaggttccactacctcatgtcgttcgtttgaatcaccatcttgtgcaagtagcttgaatccattcttttacatccgcttggaatttgtaaaactactctggaagagtttttggtattttgtaatgccttgggtcttttgaaagtctaaaaatgtgggatatgttttcggagatttgtgatattgttaaagggatattttgacagtctctaaatcttcatggaaaaagggcaagtgaagagggtatacttgatgcttctcttcggaaaggcaacatatttggcacagtcgattaatctgaattcctcttgaattgattgttctttggtaaggttggtaatttccatactgagttctacaaagaaacagagtctacattagacggaggatcatgagtaagataaccaataacactagttcaaaagcgtgatcacggagaaagcaactgaactgaaactggttagatactttctggggaagtcaacaacactcgagaagctcgttttacgtctgaatgatgagtcttctggaaagaaacacaagcctggtgtcttgaaacaactctctgaatctccaagacgctctagtttgtgtcaatttatcattctttgatttgatgcactcagtttacagcttttattataaaaagcgttatgtttttttattcacctcttttggtttgaattctaaaccccaaacataaatgaaatcaacatttaaaaaattattttatggttgattgttaatttttctttagaatatcaatttttatacatgatatgatatactgtactagatatattgatttatagtttatcctttttaaatacctcactaaattaaaaaaaaaaaatcatttgcataattcaaagtccaatactttcattttgtttcctctttttcttttgtctatttaattattgttttttacgcaaccccaccactaccagatctttaaaaggcacacgacacgatcaagaaataagactttaggaccaaccggagttaaacgtagtcaaccgcagacgattcagaggagagtttcatttccgccggaatatttcaactccggtaagttaaattttcaccttactctacggccctccggtcactgaaccatgtttgcgtttccacttcatcttttgttgatcatatatatataaagtcaatattttggtgtaaacgatcgagacaaagatctctcaagcatgcttatttcagtcagaggccaatttttgagaaactaacgtttgcaaattgtgaaattcgtttaatctggtcatttgtatttcagtcttgatacaaaaaagctatgcaaggacgagttaggggaagtggggaagacaggataagcatattacctgaaccattgctatgtcatatacttagctttcttaggactaaagattctgttaggacaagtgttctgtcttctagatggagagatctctggctatgggttcctagattagacttggacaaatccgacttctctgatgacaatccatctgccagtttcgtcgataagtttctgaattttcgaggtgaatcttacttgcgtggattcaagttaaacactgaccacgatgtctatgacatttctacactcgacgcctgtctgatgagacttgataagtgtaagattcagcattttgaaatcgagaattgttttggcttttgtatcctcctgatgcctttgataattccaatgtgtcacactttggtaagcttgaaactcagtttcgtaattctgagtaaattcgggtctctttctttaccctgtctcgagataatgcactttgaaaaggttatatttcccagtgacaagtctgcagaggtgctaattgcatgctctccggttcttagagatttgagaataagccagagtggagatgatgctgttgaagttttacgcgtctgctctgcctcactgaagagcttcactctgaaacggacggatcatgattatgttggaaatggtgaatatacagttgtgatcgatactccgagacttgagtatctgaatctcaaagattatcaatgccaaggcttcaagatagtcagtatgagtgaatatgtcagggttcatgttgatgtcgtatttgaagtgataggtggtactgtattgtcgaaaagaaatatcatttgtgattttctatcctgtgtctcaaacgtcagatatatgaccatctcaaggaggagtcttgaggtatatatactaagtactaacacacactgatccgtaaacttttccctgagaatatttacttaatttactttaccttgcagttcatctatcgtcacctggaattgaagccacgattcaaatttcatgacttggctcgtttgcgtgctactatgttctcaaactcctctccggaaatgttgccagtcattcttgagacatgcccgaatctgaaacacctcaccttggtgattcgttgctttgactctacaacttcttacaaagattattttctatgtggtacactcatcttggttttgggatttgcaggaattggttcatgattctctagtgacggaggggacaagtggacttttgactgtgctgcctcgttgtttgatatcatcccttgcatctgtcgatatcgaaagcccaatcacggataaagcaacggaactgaaactggttagctacttgttggagaactcgacaactctgaagaagcttgttctacgtttgaatcagtcttgtagagataaatatgagccaggtctcttgaaacaagtcttacaatctccaaggtgctctagtttgtgtcaattagtcattctctgacagaacgttgttgatgcagtacacatagttgatcttgatttatgatacagcctgagtaatgaatgtctttctttttaagaatgctcaaactgaaacttacaaagtctaaacctcaacttaacttgagaagttatttgattgataaagaagtaactacaactagttgcagagagcttgatctgaggtcttggaatgtaatgagacacagaaaagaatcgagtatccgtcacttcatcttctgctcagtgaagaggacatgacggttgactcgaggatcgtacttacggaactcgagcttctcaagaagtcccttggtactcttcctcttgacatagaagaaaccagttccagcagctgagacaagacggatgaacatgaacgtcttcttcctcttgtcccccattttctcacttgactacaccatagagaggagatcattaacgatcaaatctcagttcaatatgtgcatcaagcgacataaaaacctagacaaactaaagaccaaagtgcaatcacgaaacttttctttttagattttgaaagcagagaactgagaacattaggaacattaccattcgaaagattacagaaaataaacaaaaagatgcaaaaacgtaatcctagatcattcaatccaaaatgggcaaaaaaacttgcgctaataacaaaatgaaacattagaattcaccgaaatgcaacttcaacaagaaaaaatactcacagatgctcaaacacagagctgaaagcatcagaaactaaagaaacttaccgatggcaaaaggcgacaacacggtggtgatacggcggcggagatgaaacgggaatgagaccaaggaagtaggaacactgtcattaaaaagagacaagacactaaattttcattcggcccattaaatctgaataggcccaatattcttttagctactctcacctggttttgttgttctcttttctctctctcttttctctctctcttttctatttccgtcggactcagtggagaagaagaagaagatccaaatcgatccgttgaaaaggtacgacgatgttcgttctctgctctctcagtctttatcttcctgtcagcttctcttagtttagattcatggatttcgattccgattttttgggggattgcgttagattggattaattttagtttctccatttcggattctggtttaggaatttcgaatttgctgtgcgatgtcgagtgcggtggacgctacgggaaacccgatccctacttcggcggttttaacggcgtcagcgaagcatataggtatgaggtgtatgccggagaatgttgcgttcctcaaatgcaagaagaatgatccaaacccagagaagtgtctcgacaaaggtcgtgacgtcactcgctgcgtgcttggcttgtacgtatctttagctcattatattttccttctactttgcaagtttagtagttttggctttggttttggttaggaagcctcgagtatcaaatggttgatttaggattctaatcatagagtgtaagcctgggattcagaaatgagacctgaatgaagaaacgattgggtctctggatttcaagaaattaggaactgtagggactttgatcacttcttttgtgctaaactaagtgagccaaagtatctgactatagctgtgacaatatcgtggaatcatcttagcaatgggcatgagaccataaaaaaagcacacttaagtagttatggaagtcataggttgagcttagatcagccatcaaatcgtttttcattgagctctggttttgtatatgctttagagttcagactgtatttcatggaggaactatctattacactcagacatattacaatctttgtagaaattgggttgtttcatatatccttgctctcagatgttggccaagtagaaacagtttcataccacaacttctcatggttttttcctcaacttataagccattaagaagccatttgcttccctaaaaatgttggtctaagacttagttggatgtgcagaagttgtttagtatgatgtaatcctctaataatatcaatataagaagactttcagcatcatcgagatcgtagattaataatgttgggtccacatgcagatattatgttatttcttcggtaaagcattaaatttgttgtatgaattatgcaggctgaaggatcttcaccagaagtgccaaaaggagatggatgattatgttgggtgtatgtattactacacaaacgagtttgatctgtgtaggaaagagcaagaagccttcgagaaagtgtgtcccttgaaatgagaatcacaagttcttgtcatgttttgatttgtatctcataataaagcaaaatgttcatttttgaatgagctttactctctccatctcttgtttgttgtcatcccatttatttcctctcagatgctttcgtagtgagttccaaagacaactaaatgactcagttttattgttcgatggttcactaatcagcacagaatggaacaattgtttttatctgcttatattctaccatacttgacagtatactagtaattttgtgactaaaaactgttagagaaccatatccaacagctaggatgtcttgctatgatcttgtggttatgcttgtggatattggtgaaacattgaaggtttgttacaaaacagagaatggaacttaagttgggttatctaaaatgaaacaaacaaacaaaacaaaaagagcaaaaatatttatagtaaaacttcagattcctcttatgtttcactaaggaagttgcctacttcaaagccaaaatagtattatagaaagccattccttcttcttatttatcaacgactgcaacaaaacaccattcatcatcagtcatcacagatgttaatagagatagagttggatgtgagtgaatcaaactaaatgtcaatggcgctagctctagtccttgatctagagaggcatttagattaaataacaatgcagctatttatttaccttaaggatcgagaacgggaccttgacagacatcgagacctgattggagtaagcaccctctcctctctaggacttctacagtttctagacttgtattccctctcatttcgaggcaaaggagaacgtgaaatagatcttgaccttcttcgaggagagtacaaatcatcctctcttactttactatgcctgtgcttgtgccagtgaaaaagaagaagattaaaacggcttttacatactgagacaattaattttgttctaaacatacaatacaagaagaatgaaaacgtattactaatgttcttcaaatggcttttgttccttctcacgctataactgagaaaagttgtttctttatctaatgactaccttcaacacattttctggaagatacatttataacttgaaagatctcttctctccaacttttctggagcaaaacgctccaaaatctctcatttctccgagtttatggaacaaaacctatctttaatcttgtgaaatttctctactgtccacaacattgaatggctctatttctccaaataccattctttctttggccactataagtctattcattcattatttgaccggatgacaaaatggcatacgcaaaacaaaacacaagtcaagctcaattcagtacagatagtacctacaaaactctcttgctaaagttatagataacttgttgaccaagtggtattcaagctctagcttaccaaagctggtgaagatgacatttggtgaaataagtcttcaggttcagattttaggaaaaacagacaccctaataaacattttttctacaagacttatcaacctagacgtgtccaatttgtgccttgtcattgtattatccacacacaactgacagacaatctaagtgactaggaaccagtgccgtttgcattcacatgagcgagttccaagaataaataaagagccttatgaaacagagagtcatcatacactattataacaaatgcctaatagatatagatgagaatcaaaccttgactctcgccttggaggcgaacgcgaacgtgaatgagctgatgacaagaaaggacatagttagtaaacatcacagggtacataggtattgttctaaccatacactgcagttgtcctgagacatatcaaaaatgttaaaagcaaaccaaaaagctacttacaacgatatctgcgccttggtgatctgtgtgaagtcctcttgtagtccccgtgtcgaccactatattaaacgaaataggatttggaagtaactaagataattacttacaaaacatttacattcatataaaaatatgatacaaacacaagaaaacggactcttcaccttgtaccgttagtagtacgcatttcttgtggagttttccggttctcctcagcgaaaacaatggctatctcacgcccaccaataactttgtgattcattcgtttcattgcctcagctgcatcttcagcataacgatacttaacaaatccaaaccctctcggctccctaaaccacaaaataatatcacattaaagttaagagttcctactcaacaaacaactacttgaactgacaccaaaagttaccaatcaaattagtcaagaatccatacacattgacaatgtgacattgttaagagaaataaccagtaagctaaagctaagctaggaaatagctaaaagcatctgattataaaagacaaagcttgacatatacccagtataataattcctaggcaggtatatgtccttgagtggaccaaaccgttcaaacgaatccctaagatcgttcggcctgaaaaacaagaaaacattccaaaactcgtgtcaattaatcaacattagagaacttgtgatgtccttgatggaatctgaacagtagagaaggacggagagacctagcatcgagagggagattacggataagcaaaccagaaggaccagaggattcgtgatcacgagaagacggacgttcgcggaggcgattatcgtcgtagcctttccgttcgcgaggtggtgacctgtcacgaggacggggactatagcttctgctccggcttctcgctctagccatcgaagatttctcttccttaggtcttcttctcaaacaaatccaatcttcggagcaattgaatagcaaaaccctaaccctgtcggaaaacgagttagagagtgaattttggagggagagaggaagaaatcgacgactgtgaaagtttttcaaaacacaacacttgccggaagctggctacggtctgactttgtttgttaattcttatgggctttcaaatttgcaaactatgggcttatataaatcaaagctttaaaggctttgtgtcaaagttgttgacaaaaaaaaagaaaaaactcgtaccttgactcgtccggttccaaaaactcggtcacccaaaaataaaaatcaaaacccttcgataaacctcccggaggagaggagacacccgaaatgttcgccgtatcaccgtcgtcattctcgccgacaaccatttctccggtgagttacaattcttcttctcgcctcaatttctttccccataatcttcacgttctctcgctcttgcctcttgtagcgccgtagtggacagaggaacgaacctcgaaaattctcggtggtgagagctggagctaagagaatactatacggtaaagatagcagagagaaactccaagccggaatcgataagttagctgatgctgtttccatcaccttaggccctagaggttagtgaattagatttcgattttggctacgatttgaagtttttttccgggcagaatctgattatgagcaaaccaacccttctctgggatttcgaattgattttttttcaatgtggaaaccacgacgcagggcgtaatgtagtgcttgctgaaaaagatacaatcaaagtgattaacgatggtgtcaccattgctaaatctattgagcttcctgacactattgagaacgctggagcaacattaatccaagaggttattcatattcatggtggctaaatgattccccttcttttccccattgttagttcattctttgagctctaaatggtatcaattagttatctgaaccttgcgagtttctatcttgtgtaggttgcgattaaaatgaacgaatcagcgggtgacgggacaaccactgcaatcattttggctagagaaatgatcaaagctggttctttggctattgcttttggagctaatgctgtttctgtgaagaatggaatgaataagactgttaaagagttggtcagggtgttgcagatgaaaagtattcctgttcaagggaagaatgatattaaaggttactttatacttattactaaataattatgatccaactcctgtcttaattttgaaataatagggattttttgtgttctgtagctgtggcttcaatctctgctggtaacgatgaatttgtggggaatttgattgctgagactgtggaaaagattggccctgatggtgtcatctccattgaatcatcttccacttcagaaacgtctgttatagttgaggaaggaatgaaggttagtttcaaacttaagttggatgttttaaaggcttcacaatggcagtttcacacttaccattgttaacattatcaaaccattgagtttctgtgattcatgaggaaatttcttttgtacagtttgacaagggctatatgtcgcctcatttcatcacaaatcaggagaaatctacggtggaattcgacaaagctaaaattcttgtgacggatcagaaaatcacttcagccaaagaattagttccgttactggagaaaacctcacaactgagtgttccgctccttataattgcagaagatatctctgcggaagtgcttgagatactggtggtgaacaagaagcaaggtttgatcaatgtcgcagttgtgaaatgtccaggaatgttggatgggaaaaaggctttgctacaagacattgcactcatgacaggtttttctcaatcatttgtactttccaagtaaatttttactgaaaattttcaggtgataacatgacaaatcatatacacaggagctgattatctttccggagatttaggcatgtcgctcatgggtgcaacttcagatcagctgggtgtttctcgtagagtagtaattacagctaattcaacaactatagtcgcagacgcttctactaaaccagagattcaggcaagaattgctcagatgaagaaggatctagctgagacagataattcatatctttcaaaaaaaatagcagagagaattgctaagctcacaggaggcgtggctgtaataaaggtccgattttacaataacccattctttgtttataatatgctgcgacaacttgggctttcatcagaacataatttctacctaagtaagaataaaaaatactgtttcagctcttgatatttcttttgagtcctatatatcagcttaaccctgtctcaatataggttggaggccacactgaaacagaacttgaggacagaaaactaagaatagaggacgcgaagaatgctacatttgcagccatgagagaaggtatagttccaggtggtggtgctacttatatccatcttttagatgagataccgagaatcaagaagaatctaatggaagattcatacgaacaaataggtgcagatattgtagcaatggtatgaaaacgtaatgacaaaacaaaacatgttttcttaaccatactggattcgtaaagtaaccttttaagagtgaaaaatcactttaatttttttgtttgcaggcactcactgcacctgcaatggccatagcaaccaatgctggggttgatggatcagttgtggtgcagaaaaccagagaactcgaatggagaagtggttacaacgcaatgtctggaaagtatgaggatcttctaaacgctggaatcgcagatccttgtcgggtttcaagattcgcccttcaaaacgcagtttccgttgccggcattattctcacaactcaagcagtactcgtggagaagatcaagcaacctaaacctgctgttcctcaagttcctggcatacccacatcataaccaaccaccaccaaaggtaacaaagaagcacaaaaaccaaactctctactgcagattttgtcagaatctaaacctttgctcacaaagtggtgtttaatcttgttgtgttttaactaaacattagaatctgtgatgcaatggtatgtgcagagtgaaagaaaaaaaagattgttggaatcattgttgcttattgtgttagctaagctagtagttagcctcaaatttcggagaaagcaagaaaatgccttgtaatgcaagattcttacgctgtaagccctagttgaatgtgtatacggacatcttttatattattttcttttgtcagttttgtgcttagaaagcgtcatcaagtctcaattattatgcaatttcatcttattaaacttttgtagcctatgtggttatgtcgagacgtatttggagtaattcaatacattaagaataagctctcaatcgacaatcagtagtttttatctccaattgaattacagagatcgaactcgggttcttaatcttaccagacccttgtgtttttcctcggtttcatatgtgggttaatgtttaaattgttcatggtgtcatcatttatttttgggcccggactggcccatccgaaaagtgggctaatctccaattttcatagcacatattcttaataccaatcattaaccatgtcatatttctgtctgcgaaaacaaaacaaaataaagcacaaaagggtatatagtaacttagtaagcacatggtggatgagacacgtgtctattttctggtggtgaatggcttggaatgagaagaccaaaattccaccaccgttattattggagaaaaaaaaaaagcgagagagagagagcacttggggtcgctcacgtcccaagtaacactgaaccgacgtcgtattcgataatgattgatgaaccgttgatttcctcaaactcacgtagcttacacgcgaacctcccttcaaccaatcatgtgctgccatcatttagcgcgtgtctctcacgtcccgacacttcctcctacatagctcaacacctcctccttggccactttttgtttcttttttcttttgctaattataaagtagggactcccaaatataaacctataggctaattatataaccaagtgtcccaaatattgtctcccaaaatttttttctgtagttagggtttttaattctaagaattttcttttgaattctgtttattatgcaacaaaagaacgtttctatattacaattttttcaagcaatctacttctggttaatgtaaaacataaatacacctttttggatattatataacaagatgtaataagttgaaccatatgcaataaccattccaaaacgagtcgattgtgctatcaattatcaaactacttttagttgtgttaagttgtcatctgtcagaatatttcacatcgtaaatcaaaaaatgattttaacattttcattatgcaaagataatggatctttcaggatttttatcaattaattttgaattaaaacattcttttaaaaaaaaaaaatagtattagtgctatttgtgaaatgatgaattttcggatttttgtcttttgccgcaaagaatttttgaattatataagttaggcaagaaaaaaaaagaatatgtgaataaactattaaagcacgattaactaatcatgattgtgtttattagttcaacgagttctctgttgattgagtcattccacagataaaaaaaaaatgtagactattttagataatttattttatttagttccataaaataactcaagaaataaaaagttttgagatgtcaaaaaaaaaaagtaatgtaaaaatgcattattcggagatgttgatgactttgtgcaaaattacctaaaaccttcaaccaaaatcaccaacttcctcaacaaccgatggacctttcaatatttctctgaattttatcagaaattgaagactctcagatgtcttctctgtcgcaatcgccaccaccgccggagatggatatccaacccccggcattggttaacgatgatccttccacttattcctccgctttatgggattggggagatctccttgacttcgccgcagacgaacgccttctcgtcgatcaaattcatttccctcccgttctctctcctcctctaccgcctctgattccgacgcaaactccggcggaatctgaattagatccttctccggaagaatcgggttctggttcggatcgggttaggaagcgagacccgaggttgatttgttccaatttcattgaaggtatgcttccttgttcgtgtcctgagcttgatcagaaattggaagacgccgagcttccgaagaagaaacgggttcgcggcgggtcgggcgtggctcgatgtcaggttccggattgtgaagcggatattagcgagctcaaagggtaccataagaggcatagggtttgtctccgttgcgctaccgccagctttgttgtgcttgatggagagaataagagatactgtcaacagtgtggaaagtatgttacttttcttggctttgagaataagaattggatttgataggtgaatccagcgggaactgtcttagttaacctcctatgcatcctcctgggatttttgtgtgtgtttgacttaggtgttgttcagatttgatttgcagcacaaaatgatcgaagatcgggatgggtttctgttgtctgtttgattgggatagagactttgaatctattgttaagaaattggataactttgggagagactgttgatcagtttgaatgatcccacggaatttacttagtctctttgttgagcataagctgagcttaacttctgtttagcagtattattgtttgtattaattctttcaatctatgctgttatccatcattatagtgagtagtactatctggcaggtttcatttgctcccggactttgatgaaggaaaacgcagctgtcggagaaagctagagcgtcacaacaacagacggaaaaggaaacctgtagataaaggaggtgttgctgcagaacaacagcaagtgctttcacagaatgataacagcgtcattgatgttgaggatggaaaaggtataagtgaactgcgcaaatctcaaatcatatcaccatgtggtttctttgttttagttgtttgctttgcatattttgctagttaccaacgtttagagttctcttggaaattcaagctgattcgattgtcaatgctatcattttgaagcagatatcacatgctctagtgaccagagagctgaagaagagccttcattgatttttgaagatcggcatattaccactcagggttctgtaccttttacccgaagcatcaacgcagacaactttgtctctgttacaggttcgggtgaagctcaaccagatgaaggaatgaatgacacaaaatttgaacgttcaccttctaatggcgacaacaaaagtgcttactcaactgtggtgagtttctcttcagcctctaacatcaaaaacatcggtgcacttaatgaactaatttcccatttcattgcagtgtccaactggtcggatctcttttaagctctacgattggaatccagcggagttcccacggagactacgtcatcaagtattctcaagaattatatattacagtttagtgttcaaagactatgtttaccttctcagaatctcaaagaactaatatcttgcgattaatttgaatttgcagatatttcaatggttggccaacatgcctgttgagctggagggctatatccgcccaggatgtacaattttgactgtctttatagcaatgccagagattatgtgggcgaaggtacatcctgttatcttttactcatcattttcatgttcatgatgccgcgacacaacataagaaattgtttattttcagtaggttgtagtctcgagatatgctctatttctctatgcaccttaccctcttaagtaccatatacacattaaagctcttacgtttttgtgtgacctgaagttcttttgttactaaaaattgtccattatttggaagcttttgccctggagggagaaaatgcaaacttagtatctcttcccgtgaactctcttttgactttgcactgtaataaacttttccaatttgttcctgtaaacagttatctaaagatcctgtggcatatctggatgaatttattcttaaacctggaaagatgctgtttggaagaggctcgatgactgtctatttgaacaacatgattttccgtcttattaaaggcaagttggtgtgctttacttgttttctctggattttttcactctatcatattggataaccataatgtcgtgagctattaatgtgaactaatacttatttgtcttggttttgacaggtggaacaactttaaagagagtcgatgtaaaattagagtcgccgaaacttcagtttgtgtatcctacatgttttgaagctggaaaaccaattgaactcgttgtatgtggacaaaaccttctgcaacctaaatgccggtattaatgtcaaccctttttttgagctatgcttcagacatctctcgcatttctagttctgtcttatttctcatatgaggaagctgatattgcaagaactttcaaaatgttgcatttcgattactacccatcatttgttggtttgatttttatcacttgtgattactaaactgttccatatacgaaagaaaaacatgctgcttacagataatggtttcattgtaggtttctcgtgtctttttctgggaagtacttgccacataactattctgttgtacctgcaccggaccaggatgggaagcgttcttgtaataacaagttctacaagatcaatattgtgaattctgaccctagtctctttggccctgcctttgtcgaggtacccatttgtttgatgatatacagtttagaagtagctcatttcaatacgatcctcatctaatccttttgtaggttgaaaatgaatctggcctatcaaatttcatacctctaattattggagatgcagctgtttgttccgaaatgaaactaatagagcagaagttcaatgctacactctttccagagggacaagaagttactgcttgctcttctttgacttgctgttgcagggattttggggagagacagagcacctttagtggcctcttgttagatattgcatggtcggtgaaggtaccctctgcagaacgcactgagcaacctgtgaaccgatgtcagataaaaagatacaacagagtgttgaattatctgatacagaataactcagcgtcgatcttaggaaacgtactgcacaatttggaaactttggtgaagaaaatggagccagacagtcttgttcactgtacctgtgactgcgacgtgaggcttctacatgaaaatatggatttggcgagtgatattcacagaaagcatcaaagccctatagagtcaaaggtgaatcctccttcgtcaggttgctgttgtgtgagtagtcagaaggacataccatcaagaatattaaacttcaataaggtttttcactattatctgacttcccctattttcctgtttgatctatactggactctgcccacaatctatacttgtcttgcacatttggtttcttgctccactcctgagtgctgaacactaacttttgtgtgtttatggtatatttggcacattgtgacaatattacaggagtctgcgcacaatattgtgtctgtttcttggtttatttgcatagtttctgttatttaatgtttgccatttattatgtttacaggatcctgaagcaggattagattgtaaagagagaatacaggcagactgttcaccagatagcggcggaaaagagactgatcctctgttaaacaaagaggttgtcatgaacgtaaatgacataggagactggccaaggaagtcgtgtataaaaacgcactcagctttagcattcaggtcccgtcaaactatgttcttaatcgctacgttcgctgtctgttttgctgtctgtgcggttctctaccatccaaacaaggtcacacagcttgcagtggcaatccgaatgagattggtacacaaaatttgaatataagttcaacggcagagactctcattaacgtgtgtgcatcaaaaagctcgaagagagctgtaagagtgttcaacagagctcagccacaacagcttctcagagagtttcccttcagaaagagacaggatatgatcagatgaggtcttgctctttctgtgtgttcttcttcccaatttctataagaccggtgatgctgcaactgtaataacaagaaatgctcagatcagtgattaattatctctagtcgaatagtgttttatgtatattagggtttacttttgctcactgtaacctgttttttctttgtttcttggtctaagaaatgattcttgaacaaatcctaatcgtaactttatgcaattttctacttcaagcaatgtcttggctcttgagatctctctaaactctgtttggtcacctctattatcaaatgttatctttgacttttcttattattattgtcagtccaatagattaactagtactcaagtagcataataatttgagatggttttattcttttcttctctttttgaagtacaactgtattaagatgcatgttggattgagaaatcggcactgagattgattgcaacatagaaggcaaatgggtagaaaaagacaaagaagatgagatttgaaaacaacgaagagacacacatataaggaaatgcgtcagttctgagtcatatattttggtaaacgacaacattctaacattttatttatttgctttagatgtattcacctttctttaaacgtatcaaacgctagctttaacgtgctaatttaaacatagactaatctattttgcctttaaaagtttgctcaaacttagaagcatttctctttaacaaaagaaaactattagagattacttggacgtatgcaagatacaatctcaattctcaccgaaaaagtttgtacaagttcatttcacttttgcagtcattagttaggttagtatttttctttaaatatatgcatgctacgcgtggttgctgcgtttgttcaacagctaacgtagagaattaaattgcatttttttttcatttttttgtcgtagagaaattgcattttaattacgtctcattacctttgacaaaaaaaaaaaaaaatacgtcttggagatactttttatagattcatttcagtttgtcaattagttattatgttattataaataaaaaaatgtaataacacccttttttcctcaaatgtaataacaccttatatttttcagaagagaaaaatataatgctgaactcatcattatacccgcacaccaaaatgagtgatgtcatgcgttcaaacatatgatttggtacatcaaaataatgtccgaccgtacgtgtacatataatattggaaaatttagaacttgcgccaaacaacacatcacatgattcattgaacaaaatgatatgcacatgactcaaatgagttgtacgatagcctaaaatcactgttttaaaaatacgcaaaacggttatatcgatttcgtttgtaattacagaaggaaaaaaaatcatcttggaaatgtgctttaattaacggaaggtacagtttagttcatgtttattaatttgatgatctagaagtaagataacccgtcggattagaaaagtccatgcatgaaatcctaccaacggcatgaacataacgcatccacaaatatctttaaagacgaattttgatacgattttgcctttgttcagaacaatttagaggttagtagtgacagtagttagatattacagtatacaaaattacgtaataaatcataaaaagaaaccaataaacatgtacaaacaaatctagtatataagtacatgtggacccaaaaaaagcaagcaaatgtggacaaaatattgctgaagctcgtacatgggtacatgatcgcaatcactatggctagtttggaaaatacccacatggtaagatatcaacatgaaatccgaaatcagtttcaaaacaatttttatagatttattgtcagtgccggctgagatggtaaggcaggtgcgacagccgtatagtactttagtgacgagtaaaaattaaagtttgtaacccttccaaaaaggtattaagaaaattgtatgatcaattcgatctttaaaataacatgttttccatttcatgaatatcaagacttataaacttttgttgttttatataagttgatacaattgttttaattttatgtaaaataataatgaattacttaaacgtgaaaaacaacttcatatgttttgttcgatgtatacagttacaaattacattgaatctcacaagaaaggaaagtcgtagtattatgagattacattacttgaaagattagatataaatagtaatagtaatgtaaaagaacaaggaaaaacttattaggtagtaaaaaagaagagaatgaagtggagatgactaactctaggggtaaacatcagagccaagtcagtgagagcttcatcacagtccccacatgagaactatttttgtcagtattaatctcaatcattatcgcatttaatatttcattaatctattttgccgtcgaaggacaaatattgtaaaaatcttcgtcccatgtcgagactttacatacatctattacctataaatacctaattcacgaaccaaagtactcttcacatctatctctttctctctctttccttgcaaattttcagctctcaaagagttaagagttagagagagagaggatggccattagggaaatcaaagatgtagagaggggtgaaatagtgaataaggtagaagatcttgggaaaccatttttgactcatgaagatgatgaaaaagagagtgagaataatgaatcatatttgatggttctcttcagtacttttgttgctgtctgtggctcctttgagtttggctcttgtgtaagtttttgcctatagcgagaacactctctttcaatccgaagtttcctttatagttgccagcctctgtcttaattaattcaccaaactattttctcagattttcttttgtaattatttgttaaaggttggatactcagcgcctactcagtcatctataagacaagatctcaatctctcccttgcagaggtttgtgtctatacttctggctgaaccagagtttctttcctgaactcttttatcaactaggatttttcaaaattttaaacttacaatattttaacttccggggaaatcacaaaaccgcggtccaaaaaatggaaggaaacaaaaaaaaaatgtacggtactccggcgtgtttggttcataaattcatgtaattagacttgcaaataatattgctttgtcgaaattttggacatctagctaatatttgtgattttcggtaactaatacgaaagaaacatagttatactcttgcaaaatgatactaatggacaaacattgtaggttgtctaaattacatctttagctacagcaaaaaatttacacatagctagctatctttttacctatttagttaatatggctgtgctatatggaccaattttattcaactaatcccatttaactatatatatttttactacaaatttacagtatataggagatcatttttgtgtgttgtgtgaaaaatgcagttctccatgtttggatccatcttaactatcggtgcaatgcttggtgctgttatgagtgggaaaatttcagatttctccggccgaaaaggggtaaatatatcttgccaatccttgtaaacttaaggggccaataatacaactaaaaaataaaaagcaatgcttatatatgtcaaaactcatttcaggcaatgaggacatcagcttgcttctgcattacaggttggctcgctgtcttcttcaccaaggtaacacagaaacttattttcaattattttgcaacaccgaaactacatatgctgaaattagtatagattttgatcttaatatgatgttaaaatgtggtgcagggggcattgttacttgatgtaggaaggttctttacaggatatggaattggagttttttcttatgtggtaatttactctctttttcaccaagtaaatcttacataataactctagaagtcaacattttatgtagtagtcaaagataaagcagtgtgattctaattctactggttttggcaaattattttgatatttatgaaccaatgtttataaaactctcagtctccaaagtaactgaatgcaacaaatcaggtccctgtgtacattgctgagatatctcccaagaatctccgaggtggactcacaacactgaaccaactcatgattgtgatcggctcatcggtttctttcttgatcggatctctcatttcttggaaaactcttgccctaaccggtaaatttctctctgtttctatgttactctttatagaaattccctttgaaaactgatcaaaatatgttttttgtcttcaaaggacttgctccctgcattgttttgctctttggcttgtgcttcatacccgaatctcctcgatggctggtaattttctatctgattcatgatttttatcgatcttttttaaatataagtatccaaaacatgatctaaatatttcattctcttgcaggcaaaagcaggccatgagaaagagtttcgcgtagccctgcaaaagctgcgaggaaaagatgcagatatcacaaatgaagcagacggtattcaagtctcgattcaagctctagagattcttccaaaagcaagaatccaagaccttgtgtccaagaaatatggtcgatctgtcatcgtaagtttaactaagaagtcaaaaacataatttatcaatcttttgtatatatttgattcattaaactcatgtgtgatcgaatgttcttcagattggtgtttccctgatggtattccaacagtttgttggaatcaatgggatcggattctacgcaagtgaaacgtttgtaaaagccggtatataagatagacctcgatatcttttcttgtatcagaaccaagtaaagttagattctaacatatgtgtttaaaacacttgcaggatttacctctgggaaactaggaacaatcgctatcgcttgtgttcaggtggagaaacgttttcgcttcactcgataactctatgatgatctgtactcttattagtgtttaaacagattgattcctttttaacaggtgccaataactgttcttggaacaatcttgatagataaatctggacgaaggccactaattatggtaaaatctttgagtctacgaaatgcgctttcgagtcaaaagtttcaattttataacatgtacaaatgttgctgcagatttcagctggtggtatcttcttgggatgcatactcacaggcacatctttcttactcaaggtccgtatcattaaccctagctcaaccctgttttcactttgaaatcgattaatctgtgcgttaaagtcaagttgtcacatcaaattattatattttggattcagggacagagcttgttgcttgaatgggtcccttccttagccgttggaggtgtacttgtaagtaaaacttagttggttcttactttttaccaaaaacagaactcaatatattgtctgagctgaggtatgtttcttgtgtaatactataaataatctctcttcttcactattttagatctatgtagctgctttctccatcggaatgggacctgttccttgggtgataatgtctgaggtatgtttccttgtgtagaaagcaaccttattttgaaacagatttgttacttttgtagcaagtaaatttgtttaaaaacagagtcaatgcttttagaagagtatactgaactggtgctctgtttttggggatgaaacaaacacagatatttccgataaacgtaaagggaatcgcaggaagcttagtggtactagtgaattggtctggtgcttgggctgtttcttacactttcaacttcctcatgagctggagctctccaggtaaacactctttaagggcttgtttggggagaacagcgtgtaataaccgcaagaaaaccacgttccagaaacgcttaattgagtttttatttgtgtaggtacattctatttgtactcggcttttgcagctgcgacgataatatttgtggcgaagatggtgccagagacgaaagggaagacactggaagagatccaagcttgtattcgaagagaaacataagaagaaagatacaatcaatgttatgggaatgttatcaaatgaaaagactcgaactattcccgttggtgagctcaaagtggagtagagtaaaaattatcgccgggagataacgttgaaagtccgatgatgaggcataagggttttgcatgaatgttatgagaataggtttacttttatgtatttgttcacgttttaagttttcatcaaataggtttttgattggtatacagtatgtggaatattaatagaatggagtggcagatttcatattcaatcattctacatgctttcaatcaaaccaagtccgtgagatcaatacatcaaaaccctctagatgctctagaggctccttgaattaccataatactcctatcttctcgaatgttagttatgttgatgacgtggcgcaatttctatttatattaatttgttttttttttggaatttgagttttttctgtgttctctggattgggatcactggaagaagattatcaatggcgtctccatcatcgtcaccgacaacaagaatctggttccgtacagtgatcttaatcgctttaatggtggttctcttctacgttggccgtcctctctactggaagatctctgccacaatccacgacatccgccacaacaaacaatccgtcagagaaggtaaaacacacacacacacacactctatctctcgatggatttcttgaaatttcccgatgagttttttttggatataggtatttctcagatcgtacacgaagcgcagagatcagtgggatggtatcacgacgaatcggattcagggttccgagaaggtcacaacaagaaatcgggaatcgccgtctctcggaggcttcttttcgccggagatcagtgagaaattttctccgatccaaattttcgaaatatcaagttctgatggagtctcttgttataaattatatatttcatgtttttaggtcaacaattagcgtatcgttttgtgatgataatgttaaatcggttaaacaagttatggattttgtttggcatatagacttttgtagatttgtgagctttttgctattgagttgagatttactcatttagtttgttctttgcttcttttgatgtttttcttttcttaagtgaatgtgatcaaattgatttgagcgttgttgttttgatcaattttcatcaaaccactgtcttatgagcagctgttctgtcgaattagaaacaaagagtaaatttgtttcaaataatgtatgttgcaaactgacaaagcggaagaactcatttactagtattgtaatccaccaaaaaaatgaaatggagaatgaaaaactgtttttatcaaaatcaataaaataataatggaaaaactagtgtatgaaatccatcattgcgggctagatcttatccaatgatgaaagcaaaaaataaataaaaaattaagtaatatactaatatgtatgcaaaaggatagatgtgtacaacttttgtcttggtggagacaaatctgagctgtttagtgatataagacgtaatagactttggtaatcaagtatttctttccattaaacaacttaggtcaagcaaaaaataaagagtcttttttcatacacttactatcattatgggccaaaactcaagtgggttttgaccaaactgaatcatcaaactccaataaaacccataaaacaaagcacgttaccttttggtgcacgccaatattctttttttatcaagtttgtatcttcgatatgttgatttactattttaattacatcctgaattgatatgtttgcagtagcgaaggtcgataatatgattttcgaatattatccctatttgtagtcgagagtgtgtacatctagttacagaatgtaaccatccgttcttgcagttttaaatatgattccgaaatcagaacagatgtcagatcaagcaagatattaattcaccctttttatttcagctcccacctttagtttctagtgatgcgaagcatgcatagctaatgtggccaactccgcattttctatacatatatatttcagtaataaattatgatgaaagactcaaagagataatgtagggacctccattcgacctagaaactagtatttttcgggcttaattctgcttttttcagcttatttcgatctacatagttacgtagtaagatttaagaataatgcaaatgaaatctttttccgttttaatagattactacatgatatattgtctcaaacgtaatgtggaaatatcggaaattttcgtatgaatgacacaaatatatcgtttgtcctcttatataagggaaaactacctccttttaggacaaactccttcattggcacatctctggcaaattggcaattccaaaagaatcataaagtttagatcttccgagtttgacttctcagcttctcgctttttcttttcttttctttgttgcgacttatcttcttcatttgcttataaaagtcgaatcttcttattcatcattacattgttacacgctatgaatattttatggttttatgctatgcatatttaaatgtatcacgcgatatatgagagtatagtttagtaatagttaatatcatcgatgtattattatccaaattgtatactacatgttgatatatatatatcaataagctaatggttggcatgcctagatttaatttatgtttaagtcttctatttatgtagtccatacatattattaatttgtaatgtgaatccttcaccatttcacattcgaaaaaataaatatcatcacataagacaacgactttcactgctttattattaaaaaagaccgaaaataaaattagaagaaacgggtcacagaaaatcataattttaccgatcgattttattagacaaatgtattaaaaaggacagctaattaatacaacattggacatgtcatccgccatcggtggacttccaacaataaccgatcacgtcacatggtattgtcgtcgtgttttccacgtgattattgaagccaacactctcttcttttggtaaacctgttggagaaaatcaagtcaaacaaaaaatatgtcgtagagaaccttttaaattaaagatacacacacatacacacccataagagcatcttcattagataaaaattgataaatgtctttagtattaataagtaataaaaattaaaaacacttcttttattatgtatctaaaatgtctccagaaaaacacaaatttcagtttaaaaacacttattattttgttattatcatttttattactattatatttagagacactcacaaacaaataatcactaatgtagatggtctaacactttcgtgattacacatttctcgaaacatttcttgttttctctcgttatttaaatctaattaaaaatttgtattaatcacaagttgtgattgtttattactactctctttgatgacggatccgaatctttttctcgtttgacttgggaaataatatttagaagaaaatgtgatcagaagttggaaaatataaactaaaacactacaaatattattttgacagcattcgtcttgttttagttgtaaatgaaatcacggtcgaataagaaatataatacaaacatgtttcccacgtaaaagataagatatctatattcgtgcacacatatgtttcgaactaccttgaaaaacatgctcccattttcttctattatttgctataaaagctaactaaagtgatggacgtattaactaattcattataaaaattagcaaagaaaacactaattcattatagtttagtcgttgaatggttagtttgtaggtacataaattcatgtaattccaactatcttatccataaacaagaattacttagatgatgtcgctaatgacgtgatttaacccaaaaaagaaaagaaaaaacgttatgcacgtattataatgaacaattattgagaagcaaaaagaatatggaccggaatattaaaagaagtagtaagaaaaataaaaacctcactagtcacaataaaaaaaaagtagggaacgttcaagacacattcgaaggaagttgacttcaagtttttccgtatatttcattttatatacctaatttagatgtcattttttcttttttttttattatcgattctggtccctagtcgccaaccatttctcttttttctttttttcgtctctctctgcatctgcacgtctgttttatcttttcttgatctttgttttcctgtaaacttatcacagaactatttatgtaagccaagagatttttaagtttttaagctgctcataacagaaagttctgaagaacaagaagacgttgaaaaaagaaaaagaaatcttatattttgctatattggctttttgtctaatttgtaaggctttgatgtaacagtctctctctctcctttgagctgattcgtcacttgtccataaacaaaggaacccaccttcctcattcttcttacctattccttctctttggtttggacatttgattctagtttatgtaatggtttcttgatctgatttttctgggtctcttgccatttggtgaaacagatcttgggttttgtttcagattcagacaggaaaataatcaccaatctttctgacatcttcttaagatgttgacgagccctactttgaagagtttatggttcttgttcactattcttggactcttaggacaaaacctcccttgtgttctgtctagttcacaccgtattctagtggatacagatgtcgacacagacgatttattcgctatactctacctcctgaaactcaacaaatcagaatttgatctagtcgtaagctcactactactttttctacaatccacactctaattcttcaactttgttttaatgctctgtttttgaaacaggggattacactgagtgcaaatgcatggacaaacgcaggacacgccgtgaatcaagtgtatgatttattgcacatgatggatcgtgacgatatccccgttggtgtcggcggcgaaggtgggattagcgacgacggtactattcactctgacgtcggtggttattttcccatcatcgaacaggtttcttcttatatattcttcttatttgttttcttgaataagttttgatattagtttggttttgaaaatgtaaaaaaaaattggtgtgcttaggggatgacaacaacaggggaatgtagatacagacaagccattcctaaaggtcttggaggccttctcgacatagactccaattatggatttcgtaaacagtttcttcctcaggtatttattaaattttgacttatgtatacgtaaaacagaaaattttgacttatcgtagtaacaactatatacttactataatcgcgtcggttatctaaagaagtataatagcttcattttatatcatatagatcgcatgatcccatcgcaccaactaagctacttttaattgcaaccaccatttagaatcctttatacattgtggagggttttgtgtagacagacatttgtgttggtatctcttcggctccacgtgtcgtgagaaattagaatcattgtaatggtgggattccaattgaagtagctgactttgtacatccaaacacttgtcggcaacttataagattccgatatatagtagtgagacatataattggagctttaggattggtcttgtcgtgatattccatatacaaaaaacataaaaataataattggattctctgaacatctttatctagcctttatccagtttttatttttgttttttaaatgttatcacaatttcttaaaacttttcaaataatttgaacgtctaagattaagaatctgtttttttttatataaaaataatataaatccgtgttagttcaaaattaaaaaaacaaataacaaaaaaaagagcaaaaatgcttaaaatatcggtatagtagcgaagaatcgatttagtttgtgatgtttttatatatttcacaagtgtaattttatatcgaattaaatatttaaaagacgggttttgacttcttgtggttggttatgtttttgtgggaaaacaggggaacagaagatacactcctctccaacaaccaacggcacaaaaagtgatcgtcgacaaaatttccgaaggtccaaccaccgtaatccttctcggatcccacaccaattttgcactcttcttgatgtcaaatcctcacttgaaacacaacatccaacacatctacatcatgggcggtggtgtccgatcacaaaaccccaccggctgttgtccggcgaactccacggtggcggaatgtcaaccacgacagtgcgggaaccgtggaaacttgttcacagattatacaagtaatccttactctgaattcaacatcttcgctgatcctttcgctgcttaccaggttcattctcctactcttttatcttctctcaactctcaaggatttgtttggtttataaactatcttttttttaagtctaaataatgttttataaaaataaatatgacatttgtcttaggtctttcaaaacaagacatgacatgtgttttattacaggtgtttcattcaggtgttccagtgactctggttcctctagatgcaaccaacactattccgatcaaccagaagttctttgagacattcgagaataattaccagagaacatacgaagctcaatacgttttcttatctctgaaaatcgccagagacacttggttcgacgatgaattctacaaggtaacttttatgaatccatttccccaaacttaaaataaatcaagaatgtttcttttcttttttgattttttttggtgatattcttcagagctacttcatgtgggattctttcacggctggtgttgcagtctcaatcatgagaaactctgctaataagaacaacaaaaatggtgagaacgatttcgcggagatggagtatatgaacataaccgttgttacttcaaacaaaccttatggaagatcagatggctcaaatccattctttgataatagaagaactccaaaatttaacctagcccttggaggagttcacagtggtcatgttcagacgggtttgcgagatccaacttgcttaccgaaaagcggaataggaagaggaaagtgtaaggtttgtgtttccttcatataccatattctttttgtaatctgatttggttttgtttcagagtaaacaatacaattttaacctctattaattaggatggttacacacaagagatctctggttctgattctgttcgtgttcttgttgcgacacgagctaaacccaacataaacatcaaaagtaaacttgacagagaattctatgttgatttcctggaagtaagttttcatattctcagacaaatgacaaatctaagctgaaaaaagttacatatcaaacgttttatttgtttgtttgatataacggagttgtttacataatgaacaggttttgaatagacctgaagaaacagggagatttaacttttcatctcagtttccatactacaaagaagaattgtttagaccagatcttagcaaaacacgtcccggaaagcctgttgttttcgatatggacatgagcgccggagatttcctctctctcttctacctcctcaaagttccggtggataaaatcgatttgaaggtatgattttacagagatctagctaatccgtgttgcaaaactattgtgtaacaaataactcagattgcaacggttgcttattgcacaagtaactaggcttgctacacaagtaactaggtgaatatgctgttttcttcaatatcctaacaccccctctctcttgactcgcaaggctattattgtgagcccaaccggttgggctaatgcagcaacaatagacgtggtctatgatctgcttcatatgatgggtcgggacgatattccagtgggcttgggagacatgttggcattgaaccaatccgacccgatttttccaccggttggaggttgcaagtacgtcaaggctattccacgaggctgtggcggatttctggattccgacactctctacggtcttgctcgtgaccttccgagaagccctcgcaggtatgtttgtgtatatgagtaatgtgaaaatatcttaagaatatgttatatttatacaatgctatgatacgatcagtttaagcaatatatatctacattttgatgcagatacactgcagagaattcagtgacacatggagctcccagggacactgataggcctgaactccgacaacctctggctattgaagtttggcaaaatctgaccaaatctggtaatggagtgtctaagatcactgtactaaccaatggaccgttaactaacttagccaagattatctcatcagataaaaaatcatcctcactaatcaaggcaagaacaatctgacaatatatttgataaattcaattaagatcctagacttaatagatggcttctgttgtaaattgcaggaagtttacatcgtgggtggacatataaaccgtgagaaatcagacaaagggaacattttcacgattccttcaaatgcatatgctgaattcaatatgtttcttgatcctttagcagctaagaccgttcttgaatccgctctaaacatcacactcgtccctctagcaacacaacacaagttgagttctttccaaacaatgcttgatagactctattcctcgacgaaaacaccagaagctcggtttgtgaaacggttgcttgtaagattgcaagctcttcatcagaaacacaggagatacacgcacatcgtaaagcttcctttctcattatgtttcatcttaagactaatatgatttttgccttgatttaaaaacacgcaaaagcaaaaaaaacaatcaagaacctcgtctggttttcaaactcaccctaaattgttggtacaggacatgttcttaggggaagttcttggagcagttcttttgggaggcgatgacgcttcactgaagccgaaaatgagagccgagcacataaaagtgatcgcggaaggggatgaatcgagagatggtaagatattgatcgataaactgcgcggcaaacaaataaagatactcgaaagagtagacctaataagcatctctgagagttttgcttctagactcgatgataagaaacaatctgcagtaataggaagctttgaagaacaaaagaagatatggagcacaccaccaagctgactgttcaataatatgattatattatgtaaaataattaccagattattttatattcatttctgtttcatttgactgttttcttatagttatcctttttcgtaggatgatcattttctattcatttgtgttttttttactgttttcttttcacaatttctatccaatttttaaggcgacaagccaaattgtattacgtgtttgatgacggactacatgattagttctaaattaaaaaaaaataaaaaaaaaatatcaacaaaataaaattatataaccatattataatatttttttgtctgataaagatatcttatataataagataaggtttttttctaacttttcctcctattgcgacatttgacactctgtttaggtgacatttgtcgtccttaatagtaatttggtttctttaaatttatttgaattcattattttaatagcttatgacaaacatttaattccaaaaaattatgctatcctattggtacatttgacatgtactttaaactgaaattttaattattatctacataatgtcaaataacttatttacaatttgctgattttaattatttaatttcttaaagactcttttctgatcatttagaataaaaataaagattagtttattttactataacctaatataacccatactccagcaatataatttacaggaattattggatttagtataataaggtgttggtaaatgagtttctaacttctctggcagcaaattaaattataattaagaaatagtaacatgcactaattaagaaatagtaacgtgcaaatgattttttttccctggaattaattacccaaataaaacccacaaatgaatttactactacaatatatgtaacgtcaaataatccaattaatgcattaggcacaacaataaccataattaatccaatttattcaaaacattaaatacaattaattcacaaaaaagtaagctaaatctgcttctatatatattgaagttcttcttttcttttcactaaagagtcatacccatatgagaagctaaaacaagctattgttagaaaaattggtgttcaatatacttttttaattgatttttttttattttctctctttattttattctatcctccacttaaaaaaaatggtgttccaagttagtttgtttgtagttttctatgctcttcgagttatgtttaattggtggtaatgttgaagtataatttgaggattgtccaacaataaaaataatataaaaatgagatgagagatgctatttctcatataacaattgtcaaaacaataacttccatgtcaagctttgttattatattgtcttacaattagtttgaataaaagtcaaaaataacaacaaagtgaaacattgaagttagtcatatagttgaaatgattcttttataatctgttcaatttatagaaggcaatcgtgacaaagttctggaaaacaaacattagaaaaactatcagaaccaaaatataaacaaatggagaaagtataaaggttgcaagagtacccctaatatgtttccttttaacattaccaaaatttccaagagcacaaaaactgattaatcgtcaccaaaaattgataaacatcgaatggatacttcttgaaaacttctcattatttgattttgaagacttcaaaaattaaaatatatgtttcttatagttggcaagacgaacctatagatgaggctgttaaaccgtcaaaactgtcgaaaagttgaagtcgaattacaatcgactaatatacggttagaagtagcctaaaacacaacagtttttacgaacatttggcttttgatttgagtgagaaagacttaaaaactcgcacaaccgaaaaacttgcttgagtgttgttggtggtggggcgaatcatgaaacgtcaaaaacatctacatcaaattttggccaaaattttacgagtgtaaaagaaatatattttcaactaaacatgacaaactcaaccacatagattatgctagaagtacaagagccaaagcatctctgtttcaaatccgatgaataaaggcaataaaacggaactcaatgcatgactagaattaaaattggcaagatgaggaacaaaacctctcaaactaaaagcaaaagaacaagtattagtgagaggctccgatcaacagtcgaataaaataccacgatcaaatgtttcaaaaaaatagaacaaaagagacttaaaagaaaaaaaatgttactatgtggaatcattcaagtattttttttctaaaaatttaataatttgatttaattcagaattttaatttttgtgaacagaaacattttcttattaagaaaaataatacaaattgttcaataggttttttatcagaatgttggattttttaattagtacaatcatgcattaatttgagatatatatctaagtaggtgatataatatgtgtatagtaaagtctaattttaaaaaatgacaaaaagttgtcaattgtgtaaatgcatacaactatcgtcacttttgtcttggcttattaaaaaaacaaaaaaaaaaacatgttaaaacaatttattttgaaaaatcatttcattctatttttaaaaatagacttaagttattctcacgcatcgggtgggtcgtcttctagtataatcatattattaagattagttacttcaaaagcgtgaagttattaagattagttacctctttttgtccgtgtcttatgtagacagatcatgtgttttgttttaaattcagacaagaaacagaattctcttagtttcttcttcttcttcttcctcgtgatgttgagtccacgaaggttcattctagtcgtcaccattcttggactcttaggtcataacctcacacatgttctgaatagcccacaccgtattctcttggacacagatgtcgacacagacgatttcatcgctctcttgtacctcttgaagctcaacaaaacagaattcgatctagtcgtgagccttagcacattacttatccaacatccacactttgttcttcaacttttctttaacttcggtttcgttatgctctgttttttgaaacaggggatcacattaagtgccaattcttggacaaacgcaggacatggagtgaatcatatatacgacattctttacatgatgggtcgtgacgatatcaccgttggtgttggaggagaaggtgggattctcgaagatggtactattcttcctgacgtcggtgattatcttccgatcatcgaacaggttcttcttcattctctcagcttctgacatatacaattggttttgcttcaggtgaggattttgaacatgctcattttttgaaactacaataaatgatttgtggtgttcaccttggtaacagtatgtccaatatgaatgaaatatacaaaaagttataagaaaatatgaagagaaataaaacatagaagaagaattaagaacagagtaaaaaatcgattggtaataaatagagaatgttgaatagtttttttcactttttaaaagcttatatgcatacttattccttttctctctactcttatgatgatatctagggatgttaaagactaaagacaaaaaagggatcaaactaaagtgatcagaaaatacttaactgaaacagaattgtttataactacaacggtatcgtcatttttcgtagcaaacaaccgaaactaaatctaactaaaatagtgcatacaatcgaattgacccaaaacataaaccaatgctttaaaaaaaaaaaaaagttagatctaattatagtggaagaatttattacatatagttattttcacttttaaaattttgtttttgatttcaggggatgacaacagcaggaggatgcagatacagacaatccattccaaaaggtcgtatacaaaagattgactccaattatggatttcgtaaacattttcttcctcaggtatcttattttcaactattatcaagaggaatttatcacacacaaaaataaatgaaatttttatcaaaatcaattaagtctagaggtctcttttatttagtttctttaaaaattgtttagttaggccacacattggtggagacaaaacaagtgttgatcttcagacatatttctatgtcaaagatgtttgttagtccagtggttcatcctatgttttgccattttcatcaaaaaaatgatcaataagtagaatatgatatgtcaacaaataaatttacgtaagcaaaatttgtagataaaaacatcaaaaaaaatgtttttctgattagttctcttttggtgggaaaacaggggaaccgaagatacactcctctcgagcaaccaacggcacaaaaagtaatcgtcgacaaagtttctgaaggtccaatcagcatcttcgtgatcggttctcacaccaatctagctctcttcatgatgtcaaatcctcacctcaaacataacatccaacacatttacgttatgggtggtagtgtacgctgtcaaaaccctaacggattctgcggaaacttgttcacagattatacaagtaatccttacgctgaattcaacatcttcaccgatccttttgctgcttaccaggtgttaagatcaatcaaagatattatagtgatgtgttttggtttctttaatgttgtttaatagttatgtgttatgtgttcattacaggtttttcattcaggtgttccgattactatggttcctttagatgcaaccaatacaataccaattaacaaaaagttctttgagacattcgagaagaatcaaagaacatacgaagctcaatacattttctcgtctctgaaaatcatcagagacactttgttacccggaaatttttttttttttttttggttttaatgttaagatttataccaaagaagagttccaaacttacaaccgaactacacaaaataaaacccaataacacaggaacagacagacaagaatagattacactggataagaaaatctagagaagtaaaactgaagaagagaaggggagcgcaagtcagccgagggaaaagacaaaagacgattccgcatagtccgatcaattgccaaacggagagaggaggccgaggatgagatggaggtgaagatccgagcgttgcgttctttccaaacatggtagactgccgattggaggagaagcttgaggatggtggtggaatgagatcggagaggcaattgtagaatccaggacgaagcagcaggcagcccaaaaggaggagatggccgaaacttcgaagcaaagaactcccaaattgccaaagagaaggagcactcaaagaagagatgtgcatgagtttcatccccatttgagcaaagaacccaagaggagggaatattcatgccccaacctctcagtcgatctctcgtgggcagcctttcaagaaaactcatccaagtgataagagagaaccgagggatgtactctttaaaccaaacaacttttgcccatggaacagtgggtgagtgaacccgaatctgttcccaagtgtcacgagaagagaaagaaggtagatacgaacctgcagcgttacgccataggaaagagtcttgtcccctactttcatgaggcacaggggccatcgtaagagcagccaagaaaagctgcgaattatcagatcttgcagctggcaagaaccaatccccatttcttgaagcttcaactacgcgagcatcttgccttatacgaagttgtcgaggaccagccgctccaagaaaagttaaaagctgtccaaaatccgtccaggcatcataccagaaagaggcggattcaccattacccatatcacacctcatgaactccacaatggaaggtttcagctgaatcatactcttgatagtcttagagagcctatttgaaacctccagcatccaatagctctttcgttacccggaaatttctatacggtacgtaacacttttgttactcatttttgttttctttagaatccatcaagatgtttgaaaaacgttgtctaaaagttatcaagttgatttgaattgtttccagcacttctttatgtgggattctttcacagctggtgttgcagtttcgatcatgagaaactctgctagtagtaataagaacaacaataaaggtcagaatgatttcgcggagatggagtatatgaacataaccgttgttacttcaaacgaaccttatggattattcgacagttcaaatccattcttttataaaagaagaactccaaagtttaacctaacccttggaggagttcacagtggccatgttcagaggggtttgcgcgacccaatctgcatatcgactagcggaaaaggaaactgcagggtaacacatgtttttccctaatcttgtttcagttttagagtacacaatgcaattacattctcttttatttattctcatattaggatggttacacaaaagagacctccggacctgattcagttcgtgtacttgtcgcaacacgagctaaaccgagcaagaacttgaatagtgaactggatagagaattttatgatcattttttggaagtaagttttaatgttctcatgaggacaatatgtctgccctagaaaaatatgacagatcaaatgtttcttttatgttaatagcatctccatcagtgagatttcttcttggtttctcaaaaaaattttttttagtattttaataaatattagttatataattaaattttaattaaaaaaaaatattttgatcaaataaacaagtgtctttacgagtttttttggagtttttcattgaaaaactctcttcgctctcttttttactttttgattatatttcatttttatattagatagtttctcaataaaaaatcattgacgaagatgatcttatataatgaacaggttttgaataggcctgaagaaacggggaggtttcacttttcaactcagtttctgtattacagagaagaattgttcatagcagaacttaataactcacggctgggaggaaagcctgttgttttcgatatggacatgagcgccggagatttcctctctctcttttatctccttaaagttccagtggaaatcatagatttgaaggtattgttttgaaggggttcaaaccatttcttgctccataagttactaggtgaaaaagtaaccctaataaaaatggacataattattgctttttacacaagtaacacttcagctctctcatcattctgaattctccaggcggttatcgtgagcccaaccggttgggctaatacagcgacaattgatgtggtctacgatctgctgcatatgatgggacgcgatgacattccggtcggtttaggagatatgttcgccattaaccaatctgaaccggtttttccatctgctggtgactgcaagtacgccaaagcggttccacaaggttgtggcggttttcttgattccgacactctctatggccttgctcgtgacctcccaagaagccctcgcaggtatgagaactcagtggcacatggagctccgagcgacactgatcggcctgaactccgacaacctctggcccttgaagtttggcaaaatctgaccaaatctgttgatgaagtgtctaagatcaccgtactaaccaatggaccattaactagcttagccaaaatcatctcatcagataaaaactcatcctcaataatcaaggtataagagctttctgttattttttctaataaatttcatcaagatccgatattaattaagatggcttctgacgtaaattgcaggaagtttacatcgtgggtggacatataagccgtggaaaatcagacaaagggaacatattcacagttccttcgaattcctacgctgaattcaatatgtttcttgatcctttagcagctaagactgttcttgaatccggtctaaacatcacactcatccctctagcaacccaacgcgagttttctttccaagcaatgcttaatagactctattcctcgacgaaaacacccgaagctcggtttgtgaaacggctgcttacaagattgcaagctcttcatcagaaacagaggagatacatgcacatggtaaagcctactcttgtcattctgtttcatcgtaagactaatatgattttggccttgattgttttcaaacacgcgaagacagaaaaacattcaagaccctcggctagttttcaaactaaccctacattgttgttacaggacatgttcttaggggaaattcttggagcaattttcttgggaggagatcacgctttattgaagccgaaaatgcgaactgagtacataaaagtgatcgctgaaggagatgaatcgaaagatggccacatattgattgacaaactgcgcggaaaacaaataaagatactcgaaagagtggatttgagaggctgctatgagagttttgcttctagactcgatgataagaaacaatctgcagtcataggaagctttgaagaacaaaggatgaaatggaacacaccaccaagttacaaacctataaccgctcgaatatttcactgaacttatggtacaaagctcttttccagagacgtttatcaacgacaataatactccaccagaagaaaaagagtgatatgttaaatggcaagacatgctactggattgacaataccaagaaacacacatattatataacctattaagtatttgactgaatctatgtgtttacattatattcttttcaggaacagtatagttttacagaactccccttagaacaaatttcatcaacgacaacaactctaagagaaactcggaaaaaaacagaaaactttgagagtaaaggcacataataagacaaagaagaggtaaaataaagtctagcaagccttacagcttcgcctgcaatagccaggaagctctgtagttccaaccatgtactctggattctttgtgcattccccaagaactgcccatctctcacagctctcgttcatatccgtgcagtttccgcttggtgtcacgatcctatcaaatgagtctacgtggatccacttggttgccgaccatttctctccttctatcacaggacatccaccgtgaaggctcaatgggtccgggattgcgtctgggtggaggttgaagaacaacaaagcatcccctttccttggtttcactgatacccatacagccacagaagatattgagtttcaataataataatccatacattattgttatcggttttgtttctcaccagcaattcctctcttggcacaatcagaaaggtcttctttattttcagatagtactcggcgagaaggtatctgtaaaatcagatctttataagagaaaatgacccaagagtgatcttgtggggaaatgctaagcaaaaactcattgatagcactaacctctgcatcagggaatacagtttctccacctttcgtcacattggatagatacataagaattgttgccatgcgatgtccaccacggacaatgttgactttgtcatgaaagtaatcaaagtgagcatcgtatttttggccgtgctcgtatctcaatacctgaatgtcttccccgttttctgtcaccacgaaaagtaaaggacttaatgaagactatcttctgaaatctttcaagaatccaacatattgagcttgtattatttttcaataatcttagttgtgaccttgtaagaaattcagagtgtatagtaccttttggaagaaatgtccaagtggagatcttatcttctataccagaaacaatgggatcctgtaattcaccaaagaaaacttcaggtgatagagtaacaacagatcatggtaatcacaaaaatgacacaacattaacagatctgagtccagaaaacttcataatttgattcccattcacacacaaaaacttaatttgttagctaagtaacaatctaacataatcatcagatccattattcaaaggataaatgtcacatattgcttaaggggcataagctggtttagagctgtaatccaccacacatcaaaatctgtcatttgcagagctaagaaacacgatccagttcctacttcgaattagggatctaactctaccagcgaaataaggaattagggaagcaaacaaaggaaaaatcgaacctttcctttggagataaaggtgccagagctggttcgaacctcgctgaatttgctctctccactatcattatcagcaacagcagatctcttcaggctcgcttttgccttttcaatagtcaatacatcgaaatttagagtctttagcagagaaaacaaaataaagtttccaaatttaagctcaaaaccgaagatgaattgaaaactcacaagggagaccatatgatcacattccaattccgtgagaaacccttcatacacaaacgccctgaacacaagtaaaaaaaaaaaacgaatttttcaaaattgttaacattcaaagttttgaaatttcccaaaatcactttaggggttttgaggaaacctgggtttcgatgaaacctgcttgactttggaaggattgacgaagacgctagaagaactgatcagagaagtggaagattgaagcaggacggagaagatagcgaagaacgaaatcaataatccacgtcgagccatcgataccgcttggatctagatgtacaaggaaaggagatcggaagagagtaaaagtttaattatttttttccgggaaaataaaagatgagagagcttttctcgggaaagtgttcaacggtgatgacaactttaagctctacctaacgatataacgacaaaacgcatacgtcgcttgcgtttcggttctttcagaactttggctccgaaccgaatcgaaccgaaccggctccttcttaattagcagctcttttaagaaaattttacagaaattgtttaaagtggaaacatttgaaaaaggattatctgagaaattttgaaatggcagaatttattatatgtttgtatttttttttcttttaggttttatgaaacattgtaatttttggagttgaattttgatttttttatatactttttgttatttggagtagagtggatcgaataattgttgatacaaatatagtaaaacggtctacgaataccataaaaattcaggatatctgatccgcgtctatccctaaatagtaggtgaatacgaaacgaataacaaaattcatactgtgaaaataacaaaacgatagttttaagtcaaatatggggaaaaaggaaagaacacaacgtcatgatcatgatcaaatacatacaccatggtacaatatatgttaaggcaatattgaactttttcagtccttttctctactaacttaatatccaatcctgatcggattcatctccaatcctcagcagtcatacaaactctatagtgaacaaatatatggactcaatgaaatgtttgtcttgcatttagcaagtaggacatttcagaattaatccttagatgttccgagaacggtctccatgtgtcgattaatatcgtttaaatatcttgtcgagttgtattcttcgttatccaatagttcttcagagtaagtcctctggagtttggagttttctcgctctcttagcttatctaagctgcacttgtctcccctcagaatctccacaacctgtatatgtgaccaaattaatcacctgtatatgtaacttgatgatggaattgaatattttgatatgcttgcctggctcatctgaggccggttcatggaggtttgatgtatacacaaggaagctatgaagacaagacggtccaactcttctacgtcgtagtcatcttccagaatcggatcaacaagttgtttgatcttgttctctttgatcaatggcttagcctacaaagacatagatatgttagggatttcacaatgaaaaaaacagatcaattagttttaaaccttctaggattttgaagaaagtacgagataaggattctatctagctatggttgaagaggtagccacatcacatacccacatgacaatgctatgttgtgagctgtcgagggcttgtctaccggtaatgagctcgagaagcaggacaccataagcatatacgtctgttttctcgtctactatcccatgcatgaaaaactctggcggaaggtaactgatcgatgaacacataagagattatgtaagatagatatatataaaacacatgatatttgtgaatcagtgtgtatgatctttaacaaagagagagattccaaacccgaatgttccttcaacttttgatacagtatggtgagtccattggtctggtagccatttcgctagcccgaaatccgatatctatagtcaacatttgttcgaaaaaaatcaataaattacttcaaaataaatcttttttcataataataacttcaaaagacaataaactagggtatgaagatcttaggtttttcttagtaataattacctgagcctcaaagttctgagtgagaagaatgttagaagctttaatgtctttatgaatgattcttctctgacaaccttcatggagatagtagagtccctctgctgttcccatcgccactttgtatctcatgctccaattcagtttctccttcgcctctacaaaatggtacaaggatatttgtttggtttttgatccaaatcatagtttgagatgacattgaaaacatcaaacaaaagagaattatatatcaccgtagagcaaagaagcaaggcttccattaggagatagctcaagaacaagatgcattcctccttcaacacaataaccaataagcttagcaatgtttggatgatctacatgaacaatgatccctagttcggacagataatccatcgtcatctcttctgcagaacctctagtcaacttctttatcgctactatctgcccatctgccatttgtcccttatacacctccgcatatcctccttctccgatcagattttctgccataatatccacatgttttcatgttacatcactgcataaaatagtatttatctattgaaaatgtataacaagggttctttagaggtttccggaccacggctgtagtcatttgtcgcggtctgaatatctcggagagagaagttcctccaggagggtttgaaatagaacaagtgatcagtgtcaagagcaggtataacgggaaccatgttgtcccttatgcgtttgctcttccgtctggtcagtttcggaactcctttgagaggtgtgaacgtgttgaatggcattgcggatgatcctttcttaagcaaacggaagaaacctcttctccagtgaccgttgttgggacctccagacgaatgatgatgatggtgatggtgatgagtttctgatgagtctgacgtgctcaccacggaagatgaagtttcggcttctatgctccttaataattcatcgtctgattccgatttgatggggcagaatgtttttacttcttcatctcgacagaatgatgataaatctgttgcacagaaaacgaaattcatgccaaggacaaggacaaggacaatctcaagtcaatgagatctttataaaacctaattaatgatgatgcagtttttaataaattaccatgagaagagaaagaatcagagaagccggctcgagatcgtcttgtagaaggagttaattgttttccacgattgtcaacgtctacatcgctgagtttgtatatttccatatgagatgacttgtgagacacggtacataatcatatacaaatcttgtagatgtttctgaaacaaacagtatatcttgtagaaaagatgaaagaaaatttaccaggacggagacgaagaagacgacgtcgtggaagagatagtttgtgacgatgagtctcgaaggccttccatggattggagacaagaaatgagacaaaaaagggaaagagagagaaagagagaagagatcaaagactaaggaaagagagagagaaagtaaccatgatcattggttttctcttacaccacctcatcttctcttcttgttattaactgaaaatccgcctcttctctctttcttaatcttagacgaaagaaatatccatttttgcatttcagacagaaaatcgccagagaatattctccataatttgatcaaatgttttaaaatcctaaatttagaatactaacagactaatgtctttttagttgtcaaattggaacaaaaatttaaatcaccattttgcaacaaaaacaatgacattttctttgatattcaagaaaacaaaaattgtttgtttggtagtttattctctattgattgtgatagctcccacgttggtgggtaacgccacgtgtcacagtgacccgacaaaggttagtggagctgaagtcatttgagacaacaatctttgtcttttgttcaacttctactcttggacttatctacatgttgaccacttatgcatgagactgaaagcttcttcttataccaactaaacgggcctgggctttaggttaaaaaactttaaaagcccaaaagaataaaataactttccgatttctgaatcttcttcttctctgctgaagaaactaaatttcgcagtgaaatggagaaagtgacggagaatcccaattccgagacgcaaccttctcctcctcctccgccgaatcatcaaatggatgcagacgacgatgacgagaatgtgaaacagctcaaggagtgttcttctctctatttatctttacaggtttgtgtttctcatctctttgatttccccaaatcaaattccttaaatcattgatttcgattttgtttgtctccgattttgtaggattgtcttgttgatagtaatagggactggaaatcttgccaaaaacgtacgtcactctctctatctctatctcaatttgtaaattctgaaatctgagggttttagtttagagctcaggggtttagggtttgtacctaatcgaacgaaactgggattattgttaatatgtgtgaggaattgttggctgattgataaaagaactgatggattcggacaaaatgttgataagagtttgttgtttgttatgtgttacaaagatgttcaagctttgaaggaatgtcatgaaaggagaatgaagaaatgatagagattaagaaaagccaatacttgattagttactgcttatagaggaaccatataagtatgacatttttgtcgtcttgcaaaattgattaataaaacggtgtcttgtgattgtgttcttgttggggggattgcaaaatttacaagctttcattcaatgtaatcttggttttattttgttgctatttgattttggttcattgcatagaatctttctctttactcttaagacttctctttctgacacttatttcggataagacaatagtgatggtgttttgagacagtttgatttgttttcttcgtggtagaatttggctctgctttataatgagatcttgaacgtttgactcctttgcgaagaacctttgtacatcactcttccagaaactatataagaagagcaaaacaagctcgttaaaagatttgatttttgatttatttacttgggatgaactgagataagtcatgtttttggctaaggtttactttttagccaattattctcacgtgcaaactggattttgatatgttgcggtgggaaaacttacatgcgcgattattaaaagtaaatcacatattaatacttttaattggtcagccacaaaaagtgtaaccttactttttttgccttatgagttttagattcattggattttaatttttttagtatgtagtaatagattttaaaatttattcattctttgacttcttatggttaaatgtcaaacacacacatggagaaaaaaaagcatttgcctaaaaaaagagcatgagccgccaagtccttaatattatccaagtttttagggtcacagtttcaagttatgcataattttaaaattttatttcattcttgattgttctatgcttgatcttgttcagtgtagtagtagtagtagtagatgtgatggagactagcaacaaaatgatacgacactaaatactacaaatgtgtaaaggtaaaagatgatggaaggtttgctaactataattttaacggattttaaacttgaaatacaagtgtcgtcgaccggcaatattattgtggtgctaattctgacttgagatatgtttggtaacgacaaaacatatcgaacagtagctaaggatcttttgaaattgttttacaatatttttcacatcataattagtttacttttaaggtgaatgaatttgtaaccatataaagtaagaacgattaaaaccgtatatcaacagtctgatatatagatttaagataatttaaatcgaaaatataaaaaacaaacataagaagaaataaaagaaagacaaaaaaaaaacagaccaaaccatttttaccatcccccactaaaattctacaacactgaacctcaaaaatgcttaggcgtgacattgccacaagtgcaaagtggggtgcatgatcatatgttcccacttaatatcctccttaaacccaagtcaaccaatcatttccctccacgtcattacctgtttcttttttctcctttaagctaattgaaacctaattaaaacattttctccttttttactcctccggcgaagcctatttccgacgaggcgtgaaggactgataaacgacggttccggagcctggaaactcatccataagacggctccgacacttaagatcaagcttcttagctaacacacgctccacgcgcttagtcacctcgtggttgtaatcttcgccgccgtaagtggtggcgatcgagacgtcacttggacggaaaacatcaatggcccggcttaacacctcagagatatcttcgtgaccgttgtcgtagagagacaaaccacactcgaagctcgcgtagctaaaaccgtcttcaggcgttacgtggatagttgagtaacggtcaccgtcgacgccgttcatcgagtaaccgcaaggatcaaacgcgaaatcgcatatataagcgtttgcgtttatgttatcgataccactgagccgcgtcatctctttcccggcggaatcgctgttgtttttctcgtcacctttccgtttaaagaagcttcgagcgttgactcggtccagctccgtcatacatacttcgactacgacgacatgttcgtcggattccacgtcagcgcttgcggtgaacacgtgccaagcacgtgatgggttattagaaggcgtcataacagaggctttgcggtaacagagagattttgggaggctttcttcgacgacgatgacttcgtctttgaagcttgtgtaagggaaaggctgagctttagggaagatgaagctgccacgcgagtagcgacacgcgcgtaacgtgaggccgaggttacgtgcgagatggatcaacggtcggattgatttgaggagttgcgtggttccacatgttttgatgatgattttggttgggtatacaaagaggcttgactctgagagaacgtaagcgtcgaagctacgattcgctacggcggagaccactgtgcactgcacttcgtttaagacttggtctaaagattcgaagtctattagacggagtcccatagggtttttggtgattggtttgtcatcgtcgaagaaccgaagttcgagtcttttctcgaaaccctcgaacccagacactgccattgcaaagatcagaagaagatgttatgaaacagaacagaggaagttgcaagaagaacacggcaaaggaaatgtgtttgtgtgtgagtagagagagaagagagaggtagtggtgattagtgggagagaagtggtatttataggagagggtttggaggatagagaagaaggagcatgcgggttaagagaccaagaatcatgattgtaggcataatgaacgagaaagatgatgagagtttgtgttttgttttgtatgtatgcgtgtatgtatctgtgtatgtgagagatctagttagtgtgcgtctgattctgttctgtattcttgtgttgttctgtaatgagaaggagtttcatgggtggttaagcgcatgcaaatttggatgtttttttctattactttttataatcaaatctttcttgcaggtgatatgttagttcgatttgataatatcgcagaaatgcaaaatcatgaacaacaaaaaatgtaggattgacgccttaataataaaacatggtttaactcctttgactattatttattttaagaactatgaaattgtgcaaagtatttatttcggatcattctacttactgaattaagatatgtttttttcataagattttcttttaaatcttaaactcaaaatagctaattttgaagaatattgtttacataaattatataaaacggttcggtacgaacttttcgttccaaattgtctcaccataatatggattagttaatgtgaattttggattccatataattatgttatcagtaaaattatatacatataataatctcaaagacattagtcattccaaatgttagccataaaatgtctcgcttcaaaagctaccaatcatattcctaaaagactggtgacactaattgatggcattaccttttttagtggtgtttatgccatccaaaaatttcaaggggaggggtatttttccttatatattgtagtagttggttttgaagctgataaagcatataattaagataattggtttaatagttatgtgaaatgtatatcttttgactatctttaggctctcgtacaaaaactatcgcaggatcgacactagaagtggaaaggcttgtttaggctatgctatcaactaggacttcaggatatattattccatggagtttatttaaaatgtaaaacattaactaaaagcttgtgtacaagaacaaacaaattgacagatacgaaattcttgaagaaagaatttcaaagagttaaatctactttcacaagtagaagaaacgatttggttgatcgaatgaacttgtcaatatatatctcaatgtaataccatattctttgttattccatggatgccaatatttgtgttacaaagcttataatggaaggttcaaaaatgttttggcacacgaaatacaacacataaacaaatagtaccgatagaccttaacttaccgattaattaagcaaaaaaaaaaaaaaaaaaactgaaaaaagaaaccgtgtttacaattcggttacgaggctctcgtacattggttccaatcacccgttatgtatcactcatcatgccaaaacaaagtacacatgacacatctttacgtagcccatattaaataatatatctgattagccacacacacacatactatatcgtggacaagacacaaaagatcttgaaagggcaatggaacaagtgtctgcaagaatcatcaattttagtggcttgtgtgtcaaacaatcgctaatgcacataaaactttaaattattttcttcgtatatatgcacgtatatgttaatatctaatttcattttcaaaagacataattagacgcagcattttttctctacttgttctctttttgtctacttgttggtgaccataacttgtatcttgtaaaaatgggttttgtttttgttcatcggctttctccctttcttgatatagattttaaggtttaattactctgtctcattgtagtgttccctctttttttcttggttgatttttaaaagtttgtgttaacaacaaaataaatattatttaaaccctcaaatcatttaaaatatattcaagttgtaaatagaatcatggtatatttccaattttcgcacccgacaataagacgaaaatttggaattgaatactataatacataacgagaagaattaataattggttgtagcaggaagctcctttttttttgttggaaagagaaatgataaatcgtgtgctaatttgaagatgattttgttgggggctaactttagagagagagaccttattaaagtttgaatcataagtagactccattttgttgccttaataagaatcattcaccatttaccctcaatacatttgaccacaactagtttggtcatatccagaaagtgatcgagactgctaaaacttaataaataaattaaagttgaaactcaacatatataatcttacacagtttagtgatcatcaaaagagaaaatgggcatagctatacattgagaggataacatttaatcgagacggactagtacttaccaattgtcgctagtccaccgtccgtcaacacacttcttggtatgttctatacatattttgattatcttctctttgaattatcatttttttcggaatttctgttaataataatagtataccaatatataatttatttatcatatttactggttttattttttgatttgaatgcgatttgtaatcaaatgtataattattattaaataaattcatgttaaaaaatcattaatcatcggcttcagttttttcagtgttacggatatagaaaataaatatattacactaaaatatggtacacagttaattcgattagttacttcggagtggccttcaaccatatgaaaacagtttatcaaaattgaacacttataattaattttccactaccaatgaaaaccatggtcactgcagcatcatacattaaccatacgccatctaattaattattgtaaaccgtaatataaaagtaaataatatatactcttgctgttgttgtcgtcaaatatactgtatagtcttgttaggaaatcgagatcaagtaagattatgcttaaagtcaacttatccatccagtaaatctatggagctactcacaaaaaatatcattgcaactgcatatataatccctttttaccaaactccagaatttactcttgtattgctgagtttctctagtacatagatatttgttaatataaccgtctctttgtttttgtttttatagctaaattgattgatatcaaatcaagattacgtacaaatcagtatacgtacgtaacatgtaaattgtttttctttgataaagaagataagccttctttttttcctgtaagttgacatcaacaaatgtgttgattaatttagagcttgtggttcaattatcgtatgtttgtttatttaactgagagcaaaaaattgaagtaaatcgacaaatggtagtacgtggctacgggacaaaaaaaacacatgttgttagatctctaattaaaaaaaattatcgagcgggaaattacgaaataaaagacgatcaggcgtggcaacttgataattatatatttttccttttcaattttaattaggactgagtgaaatgaatgcttcgttacgtgataccaaaagtgcgcttccaacatcatttctattctccatgcagtgttatgtctaattctcagttccggcattatcattatccatttttatttcataattcgattacatatatatatatatatataatctgtcaaaaaattatcattataatctgtatacatgtgagtacattacaagcaaaagtataaccgactcgttgttgatttgtaacttgtaagcaaatttaggcgttgagcttatttacccgttttaatataacccaaaaagagagagggatatattcggttaaggcatgaatccgtcgaattgagcaaccgatacccttaagatcaatgtttccatttaatttgttagactaaattaattatgacgattataacatagtcaccaatatactgttagtccataggtgaaagggtttgggaccagatagtctgtcaattactaaaaaggaaaaataatcgattgatctaatgcttaaaatttcttcctcattactatagatagtagtattcttagcttttaatttaagctagtttttttatagaaaaacttatcacactatataatataaaactaaacgaacgattgattcttgtaatttagattttaaagttgtacaaaacgatgtgcaatctgtgttgatatgacttattatgtaaaaatcatagataatgaatgacgtttattagatttatattttaaaaaataacaactctaaggtctatttgtacttagtttgacgattaataaatcaaatacttataaattaatcttaggtaatttttcttattactacaaaaagaagtatttttaccattcttaacctatggttgacagtataaaaaaaacactgcaattattttcaatatcccaataagactctttctattcaatgaagttttatccatgcctggttgtgatgtaatattactattaaccaaatccttgggactagatagcttctcgctagaaaacaatctcttatccttttgtatttttaccacgaactcattgatatgtagttgtaatagcatgtacaaaatcaatctctaagattaaaagctttaacaattaaaaatgatttaacatattatctacaaatctacttttttttacatattattattatctacaaatctatttacatattcatcataaatttgcttagctagtgtttgtgcgtgctattttattataccgttattctataattctacaattcatgtgacttaccagtcgtcacaataagatatttagtttccatctatcttgaaatatataagaaagccagcggataaatatttgtacaatatgtatatttttgaaagattagaattacagatatgtataggagtagcctctaaactgaaccaaacaaaattgagaaattaaactaaataaaacatacccaagtaaagtttagtttactttgggttagagacaactttcagtcaaattgatcagaccaaagcaaagatgaagaaaccaaaatagtgtggactaatctgaataaaatagtaacaaactacaagctaactatttttactttggagggaatataaacatcaaatacataataccttcaataaaaaataagtttatggttaagattttgtcaaaatgggtaaatgataaatctaaaaagacaaaaaaagaggaaaggtttactggtaggagagcagtaagcattatgaccacaatcccacaaatagagagctgcacgcgcacccacaatcttctctctcacttgtctcttccatcactcctacacccacacatccttatttattaatcaaacaaataattaattagttagtttacaattttatataccaaaaaaggagaatatcccacacccatatcttagttagacaataaacgaaatttgaattccataagattagacatatcactttcaccacttatcccaattagttatgtaacatggaaccatcgatatagtggatcactccaagcgtgcatatctcatcttcatgacaatttttatttggaataattcattactaagtttctaggattgtccaaaagtacttccgaacaaagaccatttaactaacttgtaaacgagacccaattatataaaaatttaccttttaacattaaacatatctttattaatattttgaagtacattttaaagaatttaattggatcggtttttatttgattttgatccaaaattgagtgtgttaaaacttgcttaatttatacaaaagcagaagatacttatcataaattaatgatagtctgaaaacagcttaaagtgtaatatttaaatttttttcattaagttttaattatttatattgggaattttaaaattgactcaaattatatatgttttaaacaaaagtttttttttttttaaaagaacaaaatgatgtttagttatcacgagacgagtttttatggtggagtatgtttagataagacaagtttatatgatcaaatgggtgtggatgagacggattttaggggagtagtttggatgggacgagtttgaatcgatatgaatataaaacatcccaataaaaatcaatattatattatcaaaataagtgttaatcttctttaacacatctaaatgtataattgtaatacaaaactactaaattacatatgttctacaggtttaaatctaaaaatagcgaaaacttaaattatataattgtaatacaaaaagttgtgaataaaaaataaaatattatcatgtagtatatcacatatcaaatcctagaaatttttttttattaatatcgtaaatttacgactcactaaaaatcgtacagaaccttatcgaaaattattaatcaacacaaccaacaacaaacagtatacacaacaaattattcattttataaaaaacaaaaatatataaaataactaatccgcggtataattttctagtagttgttcaatatgtaaaacctaaattcggtgatagtggtgagtaaaaaaaatagctttctacgtaagtagtttacattttttatttttattttggtttaattaagtagcttactttattctagcatcaaaggtttatggttgtcttgggtaaacccatcatgttagcttttaaaaatgagctagtgaaagtccttgaagcaatggatttaaacttccgaagacattgtatcatacatggctctaaaaggtcaaccacacatagttgtaccacgtgactcaattaaaccttacataccctattataatataattaaacaaagtctacgatttctctttaaaaaatgtctgcgacactaaaaaagcaattctccacaaaatctatcttcttttcttctcccttttaaagccgcgtgccgaattttatctgttaggtattctatcatcctccttaatgtcttaactccagttaagtcgaatagaaactattaaaggaaaaaaaaaaaagaagattgttttgtttatctctaaccttaatatatatccaatgaattcgactacccgatagttcgtgatataatcagctttcttaaacaaaataactctctccatctcgaagatctttttggcgatgaagacctatataatcaaaattttcttctatcattgtacttacgtgtttaacctttaaacatttttttttacacgttgttagtaatgttttcgcaaaagatttagaaagttagcaagacatagtactatcgcctggatacgagtcgacttctcaatatgtatgttgtggagccagcaatttggatgaaaccgccgacgtggaaaagggtcacacacagaagtgtgagaatcttgcagcatcattggaagtgcgccctgaatcgagggcaaaagaggaaagttaggtcccacaaactaacaagtctgatttcttaagacagtgacatgtgaacaaggtggccctacataagtcactcctctgggtgacaactacgcttatgtttggtacgtttgtttttttcagtattgtattttctttatggtcattaagataaagaaatgtagctagttgattgatgaaaaactattgaagcaaactttgtcttctttatattttcagactacaaagatatcgtaaacattaacccttttaaccccaaagaaattgtaaaacatagaattcgagtttctgaagctcttccgcggaagccaaggaaaaaaaaaaattgtgaattggtttgtatatggtcattttaccaacacggggcaaaattcagttcgaacgttgttcaaggcggatttaagtcacatcaaatcataaggtctctttttcctcttgtgaaattcatcttgtgttttcttaatctgatgttactttaccaatctgaaaaaaacaaaagaaaaaaggatgaacattttgtagtgcgggcttcaatcctgttcaaataaatatttaatttatacaataatcagaagtaaattctgatcgtttagcatgattgttaataaaatttaaactatagtataatacgtactctttaatcatctacatgcatttatgtaagtgtaacatagctttgcttacaagataagagctacaaaacattaacaagttactaaaaataacaatgattcaaaccgtcaaatatgagaaatactatagtttattagaaaataatccgacgcatatatttctatctaacattttcactatataagaaaaaatgtatgataaaattaagttctctaatttaaatatttataagtagatggagcataaaataaaatgggagtaggggaaaatgagactaatgaggataaattgagtgctactgtatcatgcgcacacaagtttatatccaaaaataattaacgaaagcggcccacttccttcacacacaccatatgttaattcatcactatctcatgttgtcttcctaataatctttctcattatcattttttttgcttataaataactatgttttttttatctaacagaatatagatattgcgaccatatatctttatttcttttcatcagatatcatgaccagccgggatatatatatatattttgatacatggccgctaaaccaaactttgaaattacaccaaaaaaaataaaaaataaatcgctcagacactaatataacttcaatcgattccacctaacttttttttcaaagagtcttcttgcggtaagtacattaatcttcaaggaagatgaagaaagagaagcgcatgtggagaaaaggagacgacgcgtataagattaagatgtgcctcgacctcgagcccaaaaacaaaatctataatcaatatcgacactcgatagtgttattgctatttctatatataataatacgatgagttatattattcttatgaggttgtttggtacatatgaggcaatttattattcgatgcaaatcattccccgtgcctcttatgctgtgtttttctttataataaacatcagaataattattttgaaatttgattatgttgagaattttaaacaataataagaagaagaggaaagaatctgatggacccttgtggtttctccacgcaagaatcataccattgaaagggctaaatacatgcatgcattataactttcgactcctggaccaacatttgcttcattattcaagtccgtaaaattcaaacgattagactttgttttgctaatgaagtttctaggaccaccaattatttgatctgaaatcagtaaaacaaattaaacatataataactacaaccattatataatatgaatatttaaaaaaattctgatccataaaactaccttaagttaggttttttaaaatataaatgcagctatgccgataataattaacaaagtagtcaagtacgtatcgtcatctcttgagcatagtattgtttatctaaagttgaacagtttccacaataatgagacgtgctggcgtaagcatgcgtcatctctttgtcatattgtgcaaatccaacaagacattattatatgtgacacttatgtaatggagagactttcaagagatttggttcagtctatcttatttcctcttctatttaatactttttaataagatagctgatgatgagagaagggtgaggcatggaggccatcatgttccctcttccccaaaccctttgtcctcttcaaaaggtatctgattctctctttaaaaaaaaatgtacaaaactgtacattagattcattttacctcacacactattgcttctatagcttcttcaataatttactttcaaaaactttttcaagtgaatatagttaatttgaaatgggttttgtcaaacaattagcatggtgtgccaaaaagaaaatccactttgaatttcgcattgaggtgtgctctaaacggcaggattatggacatcttggaactcttaaattatgtttatgtatatatatgatgcactaactaataatcagttaattaacaactagtcaattattttttgcttaaaaataatctgaatccgttgccgcatataattagagtataagcctagctatgcatgtatcataattacttattttgtgcaatgttatagaatattcatctaagttttggcttgtgggctcattcatttgcttataaatactgtcccctacttctttatatgttttttctaactaataaatatatagttgatgattatacatcctactacgccctaataacgacaatcaaaaatatcatgtgaatatatggactcaaacttgagtttgaaggaacgctaatagaagtaatcgctaaataaactttttttttgtatatatattaattaacgatctcttacctcatatgagtttttagtttttgatatattatacactattattttacaaggtataaacttcttcatgtttattttctcagatctctgaagactttgggacatataatttgcggatatatttattttattttattttaagagcaataaggaattttcggaagaggtgaaggaggaatttatatgctgatgatgatgttgctggggatatgaggagtttgatagtgaaggggcacattgatatgacagtgtctccaaatcaaaagccctaactcctatgcaataaacacatatgtttgggttttagggtttcactttttaactctctaaggtagacaaatcataaccttatcaactatctaaggtagacacatcaatgaaaccatcctctctctcatcaactatcgcatttctcttgttcgcactaatttcagccgcttcttgccgttttcttcgtcggagaccagtggccggtggcttccgtagcattggaactggtctctttgtccttgtagtttatgctttgttttgtagtagtagagatctcgtccttgattcagttagttttggatagatgtgagtaagtgcttggttgattctgcagatctattggccctcgtttggagaatttttcggtttgtttcaagggatgacttttgtttcgttgaggttgcggtaagagcggttagatctgttgatctttttccgtttaagtggttagcgtggtatctttgccgttgttggtttatggtggtgggttctcgttgagttggtgcccgaaccttgcctttccctccgtctcttgtctccttgcttcagccatcaattcccatttggattgccccatttcttttcagaggtttcgttatgtttttgttgtgatagtcttctttgttggcagtcggtctctcctccttagtgtagtttgttgtggttgttagctttctcctacctttgtggtgttctctcacgatgaaggttctcggaggctaggcttctctccttgtcctgcttcagatcttttctgatagctttttgaagacttctatttagatgtaattagacgcctcagtcatcaccgtcgcacccggaggcttgttcgagtttattccagtttggttggcttgctgggttatgaagttcttggttctggtttcgagagattggctctctttatgataggaggtggcagattttttttcggggtggccgtgggcagccgaagtaagtctcttcgcaagtgcttctgaggaggaggtcttatttgccgcttgtagctattgttttctttggtttttagtcttgttgtctctgtttatgtatttgggttcgttctcttacgctttagggtccaatttttgctgctttgtgttttagtttcttttgtttccctttcatagggctatgcttccggagatatcttcgttttcctccggctttatctctgagaactttaatttcgttcgtcggctttgcttccattgtttgggcatcgtgtaattccctggttccacatcaagtttatcaatcaaatttcagtttgagtgacaaaaaaaaaagtagacaaatcataaccatatagtcttaagcaatatagggaacttgtagacatatatatccactatatgtattgtctttttttgttctagagggaaaaataattaggtttattgtaacggtttagagagggaaaaaaagaagaaggttaacggtttggtatacgagaaaagaaggtcttatattttcgtaatgacacatatagttgggccttgttgggccaacactgaattgaataaaagatagatatacacgttgcgtccatactggatctctagcttaaagcgaacaaaacaacactgcttttaacaagattaattctattttttggtccataagaggtaatgagttgagtttccccaaattatgaatttttggtaatacaaacagttaattttttttgtcattccccaaatttgtactatcctaaatattacaacaggataacatatatctataatcctcttggactaaaaatttcacaattgatttagatatgattagaagttgggaactacagttataaagtttgtttgcttgcataaacttttaaagttaatggtatttatccatttttcgtttggtcaaaatttgtcacaaaatcgtaattagaaaaaacaataatgtgcctatgatttgacgatctgcttgaacaagaggaagcgaaaggatgtgttaccctttctcttgttttcgtatagctattgaatgagtttcatccgatccacgattccgtctctgagctcagaatcataaaagcggaatccgaatctgatctcatgtctttctcattcttcaagccctctaggcctaaaacgcctcaagaggttgttaaagccatcagagacagtcttatggctctcgacaccaagaccgtcgtcgaagttaaagccctcgagaaggttctctctttattctctaccaaaaagtttgtacctttatgcctaacttcttaattttcgaaatgggttttactcatttgtttgattgatgtttgcttgtagcttaaattttgagttttggttatatgggattctggcaaatctgattttttttaattgaagaattcagaaatgtattctctggtttgtcttttaggctttggaagaagttgagaagaatttttcttctctaagaggaatactttctggagatggtgagactgaaccaaatgctgatcaggctgtacagttagcattagagttttgcaaagaagatgttgtctctcttgttattcataagcttcatattttgggatgggaagtaagtgagattttttaaaattgtctccctctgtgtgtgtttaatagaatctgttacgaacctgttgggtaaatgatgcagacaagaaaagatttactgcattgttggtctatcctgttgaagcaaaaggtcggcgacacttattgctgtgtgcaatactttgaagagcattttgagttgcttgactctttagttgtatggtataatactaaagattctacttttatatattttttttgtctggctgaaatgttctgtagttgatttgatctgtacctttttgagttaataccaagaattcaccgtttatgaacacagctatgacaataaggagattgctctgcattgtggaagtatgcttagggaatgcattaaattcccaagtcttgctaagtaaggaaaacccaatatcttggtttcactgacgcgcaatggttgagatttatctttcacgcggttaagttttacgtagtggcttttcaggtacatattagagtctgcctgctttgagttattcttcaagttcgtggaattgccaaactttgatgttgcttctgatgcattttcaacattcaaggtgatttttatcaactatgattattgacttggaattgtttcagattttgcctatttattcattgtactttcttacctctctcgcaggatcttcttacaaaacatgactctgtagtctctgagtttctcacctctcattacactgaggtttgcttcagcatctttgtcaagtttagatgaaaacatgagaagcattttttcggttataaaatcctatagtgaaatgaattatacatcatgaacacttgcttcttctcctttagctcatagactatttacttatggtaatttcagttctttgatgtttatgaaagacttttgacatcttcaaattatgtgacgagaagacaatcactgaaggttctcttccctacaaatcattttttggttctatgtccatctctgaaatagttagttaacaatgaactattcgtggtttgatttagcttctctcggatttcctgttggagcctccaaattcccacataatgaagaaattcatcttagaagttcgttatttgaaagtcataatgacacttttgaaggtgagcgatgaatttgtggtttcatttttcaaatttttcacaaattcatacgttatatcatgttaatggttcatgttcatttgagtaggactcgagcaagaacattcagatatcagccttccatatatttaaggtaacagatcgctttctttttgtagttaatttggtaataattgaggatgaagttgttattatcagagtttgaagccttttttaaaccttatatatttgtgtgcttacagatctttgttgcgaatcctaataagccgcaagaagtgaagatcatattggcaagaaaccatgagaaattactcgaactcctccacgatttgtcccctggtaaaggtatgtttcaaactatttcaatactaaaattctataaatcttaccctttaaactagactcattcctttacttaaaaatcttgcttaggttccgaagatgatcaattcgaagaggaaaaggagctcatcatcgaggagattcaaaaattgtctggcttgaaaaacctcgaacgttaaaaattcttttgcctcctcatctctctgttccacgcagatgaagtttcttgtgaactctgtgtgtccaatgtttcataactgctcgtcttaacatgaaactgctgcttttcctagtgagtgtagtaatgtaacttttgattcactctgtgttgcccctgagttgttcagattcaaatataacttgtcctacatttaaagaccacaaccttttgttaccttttaatatctttatatgaagattctgcttttgtatgtaatctttgaaatggacaagaatcattcaatgaaaccgtttttgttttattaaccaaaaaaaatacagatgctaaaaaaaggaattggcctttttgtggatgatgaatcaacctaatgttatacagttctagagtcagacaagactcccaacaaaaataagtttctttcagacaatctctagatttaaagaagttgcaacagaatcagacatcttcagatttctcactagtgcagcatatgccataccagaaggcttcaaacctaaggccttaagctccttgtatagtttcaagcctttctcaaccttgttttctttgcaaaatccttttatcaaagcgttatacgtgattgcattcggtgtaaccccggtttcagacatattcttgaaaatctcgaaggcctcgtctgattttccatgtgagcagaaaccctttatcatcgtattgcagcttaacattgttcctccatagccatttctcaacatctcattgtagaatgcttcaacaagcgaaatttcgcctcttttaaaatgcccgtgtatcatcacattgtaagcgaactcgtttggtcgcatccctttctttatcatctcaaaccaaagcttcctcgcgctccctaaccatcccttctcacagaatcctcgaatcatcgtagtatacacaactctatcaggtgcatagcctttatctttcagattcttgaatatacaataagcctcaagctgcttcttattcatacacaacccctttataatcttctggtatatatacatactcgggaaatggttccacgctatcatcgtatgaagaacctccgacatacaagcatagttcccaatctcacagaatccagatatcagtttagcatacacatactgtcctggatcaagcccttgtttcaatccctgcttcaaaagctcatagccttctgaaacatccccaccatcacacaaagctcgaatcaaacaccgaatcctctctgaatcaaactcagattctaccatttccttatgaagttcccaaaaccgatcgagtttcctcgctttcaagcaacctaataaaacagaattgcaagtcacaactgaagaactaattcccatatctttcagtacattatacacttcaatagcttcctctaccaacccttcttcactaagacacttcacgtattgctctaataacgtaggctcaggtttaaagccagtggtatcgagaaaactcttcgcagctttcacggcttttccatccaaaagggcaccaaagagaatattcaaagaaacaggaccaggtgtgtaatcataattggaacacaaccaccggaaaaaccacagagaaaacagaacattgttctgagatttcaacagttcgccgaaaaacagaggatcagcgaaatcaaacgaaggaaaatcagataccagagtttgttgccatctctgtctctctctcatgatggtagacacagttttagccatctccgtataactcacagccgatttttgctcatcgggcttggattcacaatcacgagactcgacagttagactccgtatctgggtattagggttctttcgagttcggtttctaaagaagctaatcaaatacgactgacctctactcatggcgtatcactaactcaaaaaactcgtgggcaaactcgaaatcaagctccaaagagagccagaagcaaattgtagaagaaaggaggtgaattttttattccgggaaaagaaagtcgaatacttatcaccggaaccctagatttggatctttctgtgtcatttccaggagatgatgaaaaaggtttggactttggagtaaataagaataattaaacaaagtttattacagcatcaaatataatttgtcaataatgttatgacgacatcaatttttagattggtcttgcttttaaaaaaaaaataaaaaagaggtcaatttgacggataaaaaaaggtgcttgctttgctttagcttcttcttcttctctctctgtatctatctatctatctatcgtcttcgctgaaatccctaattaatttggttcctaccaccctcaatttcccgcgcaaagagaatgtggaaggtcatgaaatgaatccttttagtaaattccaatcgacgacatctagctgaaagtttcaagctttctcgcaatctccgtcctttaccgattcgtttggtctttggtggtcgcttcgacgagaatggagaggtagttttctgatttttgtttctatttatttccctgaatttcatatctccgttcttgtgttcgttggcttcaattagataagtgtacttagatttcgaatcttcttgtaaagcttcaagttttgaaaattgttatgttttcaattgcagtgtagatactgagcttactagtttcaacaatatggttgctaaatcatcatatcctgtacggattttgcatcacaacaatggtattagtgaagatgaagaaggaggttcaggagttgaaccttatgtgggtctagaattcgatactgcagaggaagctcgtgagttctacaacgcttacgctgctaggacggggtttaaggttaggactggtcagttgtatagatcaagaactgatggtacggtttcgtctaggaggtttgtttgttcgaaagaaggttttcagctgaattcgagaactggatgtaccgcgtttattcgtgtgcagagacgtgatacagggaaatgggttcttgaccagatacaaaaagagcataaccatgagcttggaggtgaaggtagtgttgaggaaacgactccgcgaccttcgagagctccagctcctacaaagctaggtgttactgtcaatccacatagacccaaaatgaaagttgttgatgagtctgatagagaaacacggtcctgccctggtggttttaagcggtttaaaggtggtggtggtgaaggagaagtgagtgatgatcatcatcaaacacagcaagctaaagcggttacgggtactgagccgtatgcagggttggagtttggttcagctaatgaagcgtgccagttttatcaggcgtatgcggaagttgttgggtttagagttcgtataggtcagttgtttcgatccaaagttgacggttcgatcacatcaagacggtttgtttgttcaagagaagggtttcagcatccttcaagaatgggttgtggagcttacatgaggattaaaagacaagactctggtggttggattgttgaccgtctcaataaagatcataatcatgaccttgaaccagggaagaagaatgacgctggtatgaaaaagataccggacgatgggacaggaggattggattctgttgatcttattgaactaaacgacttcggcaacaaccatatcaagaaaactcgagaaaacaggattggtaaagaatggtatccgctgcttctcgattatttccagtctagacaaaccgaagacatgggattcttttacgctgtcgaattggatgtcaataatggaagttgcatgagcattttctgggcggatagccgagcaagatttgcttgcagtcagtttggtgattccgttgttttcgatacttcatacagaaaaggaagctactctgttccgtttgctactatcatcggttttaaccatcataggcaacccgtacttcttggttgtgctatggttgctgacgagtctaaagaggctttcttatggttgttccagacatggcttcgtgccatgtcgggtcgtcgtcctagatccattgtagctgatcaagatttgcctatccagcaagctttggtccaagtctttcccggggcacatcatcggtactcagcttggcaaattagggaaaaagagcgggaaaacctcataccgtttccaagcgagtttaagtatgaatatgagaaatgtatataccagactcagacaatagtcgagtttgactcagtttggagcgctctcatcaacaaatatggtcttagagacgatgtttggctcagagaaatctacgaacaacgagagaattgggttcccgcgtatctaagagcaagtttcttcgctggaatcccaataaacggaaccattgagcccttttttggtgcttcacttgacgctctaacgcctctcagagaattcatttctcgatatgaacaagcactcgagcagagaagggaagaggaaagaaaagaggatttcaattcttacaacttgcagccgtttctacagacaaaagaaccggtggaagaacaatgcagaagactctacacgcttaccgtcttcagaatcttccagaacgagctcgtccaatcttacaattatctctgtttaaagacttatgaagaaggagcaatcagtaggttcttggtgaggaaatgtgggaacgagagtgagaaacacgccgtgactttcagtgcgtcgaatctcaattcgagttgcagctgtcaaatgtttgagcacgaaggacttctgtgtcgacatatcttaaaagtgtttaatctgctggacataagagagctcccgtctcggtatatactgcaccgatggaccaagaacgcagagtttgggtttgtgcgtgatatggaatcaggcgtgagtgctcaggatctcaaggccttgatggtttggagtttgagggaagctgcttctaagtacatagagtttgggacatcgtctctggagaagtataagcttgcttatgaaattatgcgtgagggtgggaagaaactttgttggcagagatgatgaactcggcttgaccatgtaagatcaatcttcttcattgatgtctgaaattaaagatcatccgtatcatgtctgaaagttgttgaagattctagtgtgagaaatgaaagaactaaagaggttgttatcgttgctgtaggtgtttttgctttacccttgaagaagataaagtcttggtcgccgttacttaatcttaacctttttgataacatcgtcgatgcaagaggtggtggtggaggtgggagttttgtggtcattgtggttcctaatgataatcatcattgtaatgacgacgcttccggtgacatgtttgttctcttgtgtgtttgtttatgttgcttgttccagaggatctgagaaagtgagaactgataagaattaggattttgttattttgggagtgggcggggaagatgcagatcatgtttagagtatcaaatcgtttgatgctaagttgttgcaaagaatgtaatgtgtaatattattatcaatctcttttcttttttttcttcacaccaactaatcattttacatgatcataataatcaaacaaaacaaaagaataaacacacacaagacacaacacacaaattacacgatctgaagcaaatgtaaaaccgcttttaagaagaatcatgaaactcaaactctcccaagatgaggcctttctccggaggcgactgtttctccgactccagcatgaatagctccggtgcacaacaactgagtagcactcacaattatagtcagaacttcaagagttctctgcaaaaaagaatcaacaaaacacaaaacatgataagtatccgtagaaaaacagtttacaaattcagtttcttagaattaaattttaaatcagagagtaaaaagctcactagattggcttcggtccagcctatgttgatctccttgcaggccaatctgtatcaacatcatatcggtttagatttggtttaaggagaatgaaaagaaactgaaccggattaaaaccggtttaatttaataaaaaccggatggttaagtttgtttaccccatggcgaggagagtgagagaccaggagattagagaggaagccgcggcggagtggagattcggagagtcccattgaagaacgttgatgattccggtgagtgatgtggccattccgacgacgccggcgattaacgtgaatattacgaaaaaaccggtcgccatgttccccaccgggaagtatatcgggaatatcttcgccggaagtgacagtgtcgacgctgcaaaataccacaaaaagaagattgatgatgacattttctaacgttggattaattgttacttaatcagttgttatctttgttagttaccagactcgcgagttctctcgatgccgtgattaacagcccaagaagcgatgatggtgatgacgaaatagagaccaagattcagcatcagaagcatgaaagctgccgactttgatcctcctgaagccatgcttataagattctccgacaaaaaaaataatataaagacttcttaaaaaaacagacaggtctttttctctggttttgtcttgggatgatcacaagatctctgtgtgtgtcatgtttgtatatattgatatatatccagttcataggaatagatgttccttctgctgaaagcaatgttttcaattctttactttgtccttaactttggactaagaatcaaatcctaagcttcaattttcgtttagacctttcttgcagaatttaatcaaataaattaaagaatatattccataaccatcacatttgtacattgtttattcattcttcttacaaaacaatgagtcatatttgcagctctaatgcagagctttgaagatattttgcaggatgatgtgtattcttcatttatcctctaagaatttccaaggctagctctgctagtgaatggacagttctgctatgacggcttagtccaacagtaccggagaaaacatcaaagttctcaagctcagccgtagtttctagaaccttctcaagctctttctctagacccatctctctaaacaatgctacattatcctccaactcatcatcttccatcatccaaatcgcaagctcaattacaaacctcctgattcttggaaccttaatcgcgggcttgtcgttctttttcagaattgagaccaacgagtttgccagttcttgtctcttgatgcctgaatacatgaaaacatagcttgattcttttgagctcatgaatctaaacacttgtgctgctaatcccaccatcacttcctgtaatttgttgtcttctgatgttattgatttcaagacctgcaacaaaatgaaaaaatagttatactagattcgagttgtacctaagtttttcaatcgtaagtgtatatactaaccgttggtgctgctgctttaacgaacttcaggtcatgaaagcattcatccccggagtataagcacatgtttctcaacactctcgcagcgttcacacggatcgaaggaacttcaagtgcttccacaagtcttcccataaccccaagcctaagaacatggaggcagttgctcttgctctccaacacaagcatcgctattgcttctcctgcagcgatcctcacacatccctcattcccttcatctccgcgtgtttcccgtttaaagaaaatgttgaacaactctttcagaacaccaccagttccgccaattctctcccgagcttcggcctcaagtgcaaggttggtcaatatcccaatcccgagcttctgcagctttgggtatctcgccccgtgtttcagtacatccctcacattgctaactgtgaatacaatctcagagatctctctccggaggcacttccctgtgttccctgttgtgctggctaacattttcaccagctgtagcgaccgtttcagtgtcagaacccgtgacctcgctatgtctgcgttttcatccctcaacagattttcatccgcgtgtgtgaaatcaattattttcggaagaagacctctcgtgttgccgagttttccacagttgtcatgatccttggctaatttcttcagaattagaaggcccaaattgttgaatctccagaaatcgtagtgtagattatggtcatggaacacctttttctctccaatctcatcaggagcttcacctgatgatctcgtgttctctaacaacgatgaaatcgattccattgcaccagaaatcccagcgactctcaaagaattcccaag

SEQ ID NO: 1448 - DNA, 82411 bp, Arabidopsis thaliana
aagcttgcttatgaaattatgcgtgagggtgggaagaaactttgttggcagagatgatgaactcggcttgaccatgtaagatcaatcttcttcattgatgtctgaaattaaagatcatccgtatcatgtctgaaagttgttgaagattctagtgtgagaaatgaaagaactaaagaggttgttatcgttgctgtaggtgtttttgctttacccttgaagaagataaagtcttggtcgccgttacttaatcttaacctttttgataacatcgtcgatgcaagaggtggtggtggaggtgggagttttgtggtcattgtggttcctaatgataatcatcattgtaatgacgacgcttccggtgacatgtttgttctcttgtgtgtttgtttatgttgcttgttccagaggatctgagaaagtgagaactgataagaattaggattttgttattttgggagtgggcggggaagatgcagatcatgtttagagtatcaaatcgtttgatgctaagttgttgcaaagaatgtaatgtgtaatattattatcaatctcttttcttttttttcttcacaccaactaatcattttacatgatcataataatcaaacaaaacaaaagaataaacacacacaagacacaacacacaaattacacgatctgaagcaaatgtaaaaccgcttttaagaagaatcatgaaactcaaactctcccaagatgaggcctttctccggaggcgactgtttctccgactccagcatgaatagctccggtgcacaacaactgagtagcactcacaattatagtcagaacttcaagagttctctgcaaaaaagaatcaacaaaacacaaaacatgataagtatccgtagaaaaacagtttacaaattcagtttcttagaattaaattttaaatcagagagtaaaaagctcactagattggcttcggtccagcctatgttgatctccttgcaggccaatctgtatcaacatcatatcggtttagatttggtttaaggagaatgaaaagaaactgaaccggattaaaaccggtttaatttaataaaaaccggatggttaagtttgtttaccccatggcgaggagagtgagagaccaggagattagagaggaagccgcggcggagtggagattcggagagtcccattgaagaacgttgatgattccggtgagtgatgtggccattccgacgacgccggcgattaacgtgaatattacgaaaaaaccggtcgccatgttccccaccgggaagtatatcgggaatatcttcgccggaagtgacagtgtcgacgctgcaaaataccacaaaaagaagattgatgatgacattttctaacgttggattaattgttacttaatcagttgttatctttgttagttaccagactcgcgagttctctcgatgccgtgattaacagcccaagaagcgatgatggtgatgacgaaatagagaccaagattcagcatcagaagcatgaaagctgccgactttgatcctcctgaagccatgcttataagattctccgacaaaaaaaataatataaagacttcttaaaaaaacagacaggtctttttctctggttttgtcttgggatgatcacaagatctctgtgtgtgtcatgtttgtatatattgatatatatccagttcataggaatagatgttccttctgctgaaagcaatgttttcaattctttactttgtccttaactttggactaagaatcaaatcctaagcttcaattttcgtttagacctttcttgcagaatttaatcaaataaattaaagaatatattccataaccatcacatttgtacattgtttattcattcttcttacaaaacaatgagtcatatttgcagctctaatgcagagctttgaagatattttgcaggatgatgtgtattcttcatttatcctctaagaatttccaaggctagctctgctagtgaatggacagttctgctatgacggcttagtccaacagtaccggagaaaacatcaaagttctcaagctcagccgtagtttctagaaccttctcaagctctttctctagacccatctctctaaacaatgctacattatcctccaactcatcatcttccatcatccaaatcgcaagctcaattacaaacctcctgattcttggaaccttaatcgcgggcttgtcgttctttttcagaattgagaccaacgagtttgccagttcttgtctcttgatgcctgaatacatgaaaacatagcttgattcttttgagctcatgaatctaaacacttgtgctgctaatcccaccatcacttcctgtaatttgttgtcttctgatgttattgatttcaagacctgcaacaaaatgaaaaaatagttatactagattcgagttgtacctaagtttttcaatcgtaagtgtatatactaaccgttggtgctgctgctttaacgaacttcaggtcatgaaagcattcatccccggagtataagcacatgtttctcaacactctcgcagcgttcacacggatcgaaggaacttcaagtgcttccacaagtcttcccataaccccaagcctaagaacatggaggcagttgctcttgctctccaacacaagcatcgctattgcttctcctgcagcgatcctcacacatccctcattcccttcatctccgcgtgtttcccgtttaaagaaaatgttgaacaactctttcagaacaccaccagttccgccaattctctcccgagcttcggcctcaagtgcaaggttggtcaatatcccaatcccgagcttctgcagctttgggtatctcgccccgtgtttcagtacatccctcacattgctaactgtgaatacaatctcagagatctctctccggaggcacttccctgtgttccctgttgtgctggctaacattttcaccagctgtagcgaccgtttcagtgtcagaacccgtgacctcgctatgtctgcgttttcatccctcaacagattttcatccgcgtgtgtgaaatcaattattttcggaagaagacctctcgtgttgccgagttttccacagttgtcatgatccttggctaatttcttcagaattagaaggcccaaattgttgaatctccagaaatcgtagtgtagattatggtcatggaacacctttttctctccaatctcatcaggagcttcacctgatgatctcgtgttctctaacaacgatgaaatcgattccattgcaccagaaatcccagcgactctcaaagaattctgctttttgccagctagtttcgatagtatctcagcggctgatctcctaatctcttcctcttgcagatctttccagttcaacatctccaccaacctagttaaacaaaaagttagcaacaattacaaaacttcctcaactcatttctctgtaaaatctaatattttcattagtaaaaaccaaacctttcaataacgggaaagttgattccgatcttctcaagtgtatcctccgagtaccgttcagtcactgaaaactgcctaagaatcctcactccaataagctgttcatcagaagagttcgagttcaaaagctccataccaaagctcactatatccatcttcaaaccatcaaatatactcccattgacacacttggaatacgaatcatagaaaaacctcttgatcgaaaccaaaccactaaccccaaactcacattctctagtcacattctcaagcaaattacaaacactgacttgccattcccaataaactttctccacaagaaacaacaacgcctcagcaaaggcgagcgagtagaatatattgagagcagactgtctattcctcttatccgtatctcctttgtgaacatctccatagttatgcctaataagcttgtaagaagatagagctacacaagccgtggcagagagaagctggagccagtaaagaagacgactcactgtactggaaatgaagaaccatctcgcgtatggaagaagaggtacgtctgagttcttccatgtctctaacgtcgtctctggaacgacgcagtctcttgccgtcgcttctctcgatcgtggcttgaagattgaatcactgcagagaaacataaacgatcgttactcaaatgttagaagcgaggctgatcgatttatgcaaaattgaacctgattcgttttagatttttgaaaagcgaggctgagcttgatcggagagcgcgaaagctactgattccgacgccggcgacggtccacgtggcttggtgttgccactcgagctcgtgacttctgctgaagattcgagcaccttcgattaggagaatgatggtgatgaaccagaaatcggaaccgtcgagtgtgattgcgaagccgccgagaagaaccaccgtggcccagataaaccctagggttccgattccagtggcggttttctcaagaatcgcgagttgtagagcgaatagcgttagcttcttctccggagctgggactgttgattttctacgaaacgcggtcgcggaggaaatagaagctgcgtctgcggtttcgccgctgtcgcctttctcgatactgcttcttagatcaaaaacggtgtcggttgagcctatagcttcctccaatttttgaagctccgagacctatacaaagacaaacataatttttagaaaattcaattgttaaaactactactccattgattaaacaaaaccgaaaaagtttacaagtatttgataggaactttaaattgagatactattcattttaatcttaagaaatatgaagaggacgatattaagtgaaaatgtagaagcattgattaaaagttttcaagaaaatctaattgaaatgaaaaacagtttagagacaaagtaagaaattaatgtgataaaaacctgtaaacgaatgcttcgatcttcgtcttcttcgaactttcttgaatccattgtgaaccttttgttgtgtttactcgtttcctactcaaaccgtaatcgaaaatttcactttttcgatctttctttctttcttttttagtttttgaatagtgcgtaatgacttgaggagttgttgatgatgcagagaaaacgagtaaagcgtgattttacattctttctatgaacatatggatgtgtgtatatatatagagagagatagagaaaagagaggagagatagggaagcaaaatttggcaaaggagtggagagaaagtctgcaaataagctaaataacgcaagaggaaatgtgcaagaaagtgtaacttcgagattattgttgtatatcatgtatgcttcatcaagcaattttattaccaaaagttacatgtaataacagcaacaaaaaagaaagaaaaaaaaaaactacttttgtgacatgttacaaccttcttcttaatcttttttttttttaccttgaaaaaggtcaatttcttttcgtttttctctttatgttttttagtttaccttttcttttcttatatgatggttacaagttgctttatcaaagcagccctgactctttttaccatccattaaaaataaaatgaatgttttaggcagaaataaaacaaaagtcagttactatttttagaatctaatatgatcagtaattgtccttatatcaataattgtagtatgatatttttgccgtctttatgttaagaaaagccgtggggattgttcatatttacgattacaagtaaaaataatctgttttaatttgctttgtatttgcgtctagaatttctagaaaaatgtttggtaaagcaataatatcttgtttcttttaatgtaaacataaatacataatagtaaagtgtaaacgaaaaaaaaatatatatatatatatatatatatatatatatatataatgtggccaaataacttaagcaattgagtagctcttggatcgttagctttcggatttcaagtttgaatggtggaagatttgtactaatgttttagataagtaacgaattattattgatactaaaaaagttgacgtaagcaattaagcaaatgtaatgaaatctagattgtacttaagaaaataaaaaaaataattagtgagtcaatagctcggaaagagttatggtgacttgcaagcatatgtgttccagcagaagtcttcttgtgtgaagctaaagtctcaaatgggatcctctttgggacctacttaatcctccctttgtagaataaacacaaacatagcttccattaaagacaactaaataactatttttatattactattttttggtgaggaacaactatttctatataacgccttgagaatttataggaagaccaaaagatttccgagtgtggttatttctatttccaaaccagctagctacttatcaatttacttcttaccctcaatttgatatatagaggcttataggtcatatcaaaaatatggatagagtcgtctactaagatttaacttaaactgcatatgctcacaaagtttgtcgtcttccatcaacaatttatttgtttcatattctttaaatttaacaatatagttaaagattcgatgcacttctattatttttttaaactaaaggcaacctatgtttgaatttcccaaaatattttgatatatgatgtaaattggcatttattttgtcacagcatagcaggaccataattaggccataatgctagttttctatatgaaagtcattattatagttcttaatctttgtagcaatttccagacgaataaaaagtctcgaccactaactttacgaccgttaccacaatcacaaagattacaacttcctttttggtttctgacttctcacacaaaaccaagattttgataaccacaattagaaacaaacctaaactttccagtttcatgtagattctactttaattactcaatcaaaacccgtacataatcaaaagaaaataaagtaataaaatcttcatcaaaatatctacaattgattcaaaagcattaaatctcacgaccttgttaaataatccatttcctccaatactctcgcttaccttacctctcttacaaactcttgcgttttgatatcatctcatcaaaatcagaagctgtaataatgggaactcatcgaattatccttggtctcgccgctctttgttgtttttgtctacctcatctcattgaagctaaaccattcgaagtgatcgtcgatcaatcgggccatggaaatttcacgaccatacaaaaagctattgattcggtcccaatcaacaatactcattggttcttcatcaacgttaaagccggcctttacaggtcagtgtagcacaacatacatcattgactgtaaataaagttacatatggcttgtagggaagttacatatgtgaaagtgtttactaactaatgttttttctctatgtcttgtaaaatcaagagagaaaataacgataccgcaaaaaaaacctttcatagtaatcgtgggagctgggaaacggtcaacgagagtagaatgggacgaccatgcctcgcttgcacaaagccctacctttgctactctagctgataacaccgtcgttaaaaagatcactttcgccgtacggtgattttactttatattatggcatttcctatgatgattccttctttttattaaatatatataaagggtttcttttaatatattagaattcctacaacttccctagcaatgggaaaataaacaagaaccctagagttccggccgtggcagcatttatcggcggtgataagtcggctttttactcggtaggatttgctggaattcaagataccttgtgggactcggatggccgacactacttccatagatgcaccatccaaggcgcggttgatttcatcttagggagcggccaatctatttaccaggttacattctccacaaaatgatattggttttatatactataataacatcatacgaataccaaacataaattaattctaaaacatttgaagatttgcctttagactggctaagaattttattacattgtctatgattggaaccttttctatggaaagtatagatatgatcaaaaatttaatccaaactaataatgttgtagatttgattttggtttggtaccatttatcaaaagatacctaaaaagtaacatgtatattaccatgggctcattgtagaactcaaatcctatttgtccgggcctaattgatttaaatcaaatatgtgtggttgtagagctgtgtgatacaagtgctaggtgggcagctaggaccgggggtaacgggttacataacggctcaaggacggaccaacgcaaacgacgcgaatggattcgtattcatcaactgcctcgttcatggattcggcaaggcttacttgggcagagcctggcgcccatactctcgagtgatattttacaactcgaacctgacggatgtggttgatcctctaggatggtgggaatggaactaccagggttacgaaaagcagctgacctatgcagaacatggatgcttcggaagtggatcaaatacatcaagacgtgccaaatgggttaagaagctgagtgcatctgccgtccaacatttggctgatctcagcttcattaatcgtggtggatgggttgaagatttacccatccgtgtttgatcgagactttcgcttctagtttctgttttttttaaaaaatttcttattgatcatcctttcttttatttagtttgaccagatgtagtaatttgttatgcttgacattgattaaaataataaaacatttcaacgagtttgtttttatatttaataaaacatctacgatctacccttgttgagtttgaagatataaagttgctatgtagcgatgagagttatacgcagacagtcagttctaatttgattgataaatctatgaagtgtcacatttgccaagaccgctagttctaactgtctgcatagtagactcaggacaggaatgtaggttctaactaatgtggagaaataaaaagtagaaaaaaaagcgttgaaaagttaataaaattgaaataatagatttaagaaatgtctgtaaaaaaaaaaaattttaatttaaaaagatatgattagaaaaacaaataatttgtgaaagcacttaaaaaaaaaaattgagagaatgtagaaattttgagataaaaagaataaataaaatttgtaaataaataaataatattaacaattttttaatttataaaatattatgattggctacagcttctctagctgcccaaactctgttttacaaaatcccaaaccaaacaagttatcattcatgatcgctttcgttatattcattctctcttttctctttccattttggctcccaccgacgtcatcaatctctaccggagacttccgccgattctcacaccgttcttcttctctccttccgattccggattccaatttcgttccttttttgttttctctcaaaacccctaaattttcttcctttcttcgatctggattttttgtgttccccaaatttcaagactttgatctgattccttctaagatttctccaaagcaaagatcttttttttgttttttgggatctctgtattgttgatgggcacaactagggtctgctcggaggtttcttctggatcttcgaaatcgcttagccaatctctcacggtatcgacctctaccacagaaacagtcaatggtttccatgaattcaagatctgtgggtactctctcgctaaaggtgttggtgtcggcaaatacgtcgcttccgatacgtttatggtcggtggttactcgtgggcaatctacttttatccagatgggaagagtccggaggataactcgtcttacgtttctttgttcatagctcttgctagcgaaggagctgatgttagggctttgtttgagctcacgcttgtggatcagagtggtaatgggaagcataaggttcatagccattttggtagagctctcgatagcggtccctatactctcaagtatcgtggaagcatgtggtgagtaaattatctctctctatgcatggaaagtttctaccttgctatagtagttcacgagttttgtgatgaatttaggattgtgatagagtggtatgttctggttgcttacaatgttgataatgtctttgttggttgcttggtttaggggatacaagcggtttttcaggaggtccagtctagaatcgtcggattatttgaaggagaatagtctcttggttaggtgccgtgtgggtgtggtgaagtcagttacggagggaccgaggtattacaatatccctgtgccagtttctaacttgggacaacagttgggaaatttattggagagtgggaaaggctgtgatgttgttttccaagttgatggagaaaccttcaacgcacacaaattggttcttgcaacgcgttccccggttttcaacgcacagctttttggccctttaggagaccgaaataccaaatgcataacgatagaagacatggaagcacccattttcaaggtcctccctttaactctcttgctgtgatttcatctgttagataagggaatgtctaagtagagtatctacagtcaatttggttttacatggtcttataggaagagatagatttcttggttccttgccttttttttttcttttcgggtgagtgatggtggtgtcatacaggattgtctattcacggatgtaccatccgggatcttctcctggggcgctactcctattctcgagtttactcacccgggataaggttctttctttctgcttctcttcttgttttctatgtagctaatacatggacatatcacatatctatgtgtttatgcgtcttaattcctttttctcttagccgtatttatgtgagtcaactagatgaacaaattgtgtcttcagcatattagagaggttgacttgagggtttagagtttaaaattacgcgggcgtatttgactgtagaaacttcatgttgtatgatgtaaaagtatgaatttctccgtttcccattgttgcttattatgagttcgggctcagatcctcactcctggtagttttgatctggatgtttaacctgacacaaacccttcttctatgttgttttattgctgttttgcaggtattgctccattttatctactgggacgaattgcctgatatgcaagagttaataggaacagactctacattggcgtctactcttgtggctcagcatctactagcagcggcagaccgttatgctcttgagcggcttaaagcaatctgtgagtcaaaactctgtgaaggggttgccataaacacggttgcaactactttggccctagcagagcagcatcattgtttgcagctaaaagcagtgtgtctcaaattcgtggcactgccagagaacctgaaaggtaaacacacaagatctttctttttaatcgatctgaatcaactctgttcacatgatgagacttgtgtctgttttttcccttttgttatgatcagctgtgatgcaaacagatgggtttgattatctgaaagagagttgcccatctttactaacggagctattgcagtatgtggcgaggctaagtgaacactctgttatagtatctggacatcgaaaagaaatatttgccgatggttgtgacgcgagtggaagacgagtgaagccccggttgcactgaatgggagagaaagaagaaagatttgtgcattgtataatctctgttatggataatggctgatctaatcggatctagcaagtacaatgaatcgttttcaacgcgttttctcataaatcaaagatccaatgaaatttggggtttattgttggtgcatatcagattattaggtgaaacagattgagttcatgggatataagaatcgtagacagtgtaagtgttacaacgtagataaacaaaggttgttttaagaatacaaaactatgaagacaaattacatgacaggatctgtaagaacttcttttatcttctcacgcttccttctctcatttcgctcttaagcatgtcttcacgtttcggctcttgataacacaatggatgactcaaagggatactctttttagctctccctgagacgtgaggtggtaaagctaaaactagaaccataacatcatgtttaataccagcgactcattgcagtatcttgtgctgcagacactttttgtggtatatactgagtgtttggcttcaatctacttggaccttcagcagcggtggcgcaatcttcatctcctctgttgcttttgcaaggttgagtcctctttgggtattgagacgcagcagctggatttctgaccatccttctctgttgttgttcaagagcttcaacgcctgtggctgcgccgcagttgttatagcgtaacactgatccaactactttaccaggcctagctactgcagcacctgcttcattacaaccagataaatgttcaggagacagagttattctgcatcataacattatatacagagagggtgagagaccttggattgtttgagggacgttgataggaattctcgacattggcatctgggcattcctgtctgcaccccgaggtctctcgtctctaatgctacacttggagagtccatcagtgacttcagctgaactctgttgtgccaccggatgattgttatcagagtacaatacgcaagccctgcaaaacataaaaagaggctttgttgagctgtttcgaaagaatcccaaatgatcaaatttttaaaggacgtaaagcataccttggtaatgatgcatgctgttgcctctcagggggattatgagaagtaccattcttgtagtgttcctcgaggtaagcaaattgtttcttgaaatgttccaccgcactgcagaatgaataatacattaaccataagaacatggataatacacaggagtatagtatgaagcaggtcagctcaggccggtacctcgggtacataaagttagttggctctgatccatccaagtattctttcagcatctttgggtggtactccagagactctctgtatatgagctctcggacgtcttcttttgtgatcctccgcctttcaaactcaaattccaactttgtgacaggttgagcagaaggctctctttcaaccttagctaaacccttgaagtacacatctgcaagcgcctgaggtaacacataaaaccatttagttagctataaccaaagttacatcataaggagtgtaaagaacgaaatgtatgaaccacctcttcagctgtaggccggtccttgggttcaaaagacaacatcttttctagaagacgaagagcaagaggatcagtatgtgggaacttatgtgaaaaaggaataggcttcttcttcctcatgctgctcaagtatcttcgagctttctcgttcctaacctgtttcagtgtaagaaattcagccaaaaaaagaaacaatgcttaagcattgtggaaaggaacacatacccttccaatggcttcagcagatggagttcccagcatatccgtcatcagatccaattgatggaccacatttttcccggggaaaagaggtttccctgttaagagttctgcaaaaatgcacccgatgctccatatatctattgccggtgtatactgaacagaagcatagataaagaaaaaaaatgttaccataaaattttataatctgaatgagagagctatagtgtctactgactagattccctatgaaaatttgaaacattcgatgaaagtatatatacaaaatcatggtcacctttgagaaaaaagatccacatagttctggagccctgtaccatcgagtagctacataatcctgcgatcagaaagcagtaggaataaaaaattggtttcataccaaaaagagtaaacttgtaaagagtaagcatttaaattactactactcacagtccagaatatcgcagtcggtgtatcattgaatgcgactcttgcaagtccaaaatcacagatcttgagtttgcaatcagcatttgccaatatgtttttgggtttaagatcccgatgaaagacattagctgaaaggaagagaaaaaaaaagtattttcagaaagataatcataaacttatactaatcaatgaaattttattgctcgctagcttaacctgtgtgtatatacttgaggccacgaagaagctgatagaggaaaaactgataatgctcaggagtcaaatcatcatttgccttaataacctgatgcaaatcagattccataagctcgaaaaccacgtaaatgtctcgaaactctcttcttgaaggcggcaacaagatgtgtttgatctcaacaatgtcaggatggcgtaagagtctaagaagtttgatctcacgaagaatgcgagttgcatccgaaacatgctcaaagatatcattgattttcttaatcgcaactttctctccggtatgtgtatcgtaagcagaacagacaactccataacttcctttaccaatcacttcctctattctgtatctgcttccttcaccatattccgtgaagaaatctacctcaactgatgactgaatatacagaaaaatctattgtcaatatcaaaagcttcaatacagagaaagattaggactaaactaaaaggcagtaacagtaaaaaggattgctacagatcctaatcagttctaataagcaaatctgatacataagagattgaaaaattggacctttttgcggtgatcaggctgcatcttcagctacagggcattcaaaggacgcttacgaagaccaaatgtaatagcttctgaaacccaaacttagtgagcttttgaatcaaaaaaatgcaaagactgagaattttagttccaaaggcaatgtcaaaaacagagagctctatatccaaatcccgaaatccagaatcgattgaaacaaatcagagtagttcccgagaccaaaaaaaaggaggcaaatttatggggtgaaacaaggaataacctaatcgagatttctttgctttttgaagtgaaatcaaagagatcaaaagaaggaagcgatgggtaatttgagaatcactgagattgaagaaagacgaggtttttatcttcttcgatcaatctctctgcttgaaatggctaaaaggaaaaaggagagagtttttgaaagtcgagagaagcttttatggttcagaaacccaaaaatgattcttttgagctaataaaatttctttacaggatctgaaatctcacgaagcagacgaagaggcaagtttatttgctcacttttgtagaagaaagtgtagagaggagagatctatgagatgaagaacagaacagaacaaattattaaaatattattattattcgtttcttttattgtgataattgaaaaaagcggataagtggagtctgattatcgttgtacgaaaactccaatttgccccccaaggtttatgggtacttgcgacttttgtcttaaatctagcttttggataatgtccaaacgtcgaatataatacagtgtggatatttttgtataaactattttaatatatgctcttcttaatgaatagatatccgatttattatggattagtgatgacttataattattacaataataaatagttcgtttactttataattttctttcgtgtcatagtcgttgttaaagacatataaatgaagtggattatcctatatttcgaatccgattgaaatgagtggtttaaattttttttcgtatgcagttaatgagtaatcttacttatttttaagatatagaatttgaccgataagacatacttaattatctagagacaatatttatgagttatgtacaatggtacaagaaacttacaaaaacttatatatgcaatcgtcaatctagtattttatttgaaatatgtatttcgtatctaatatcttctgtctttggtgggttctttgaaattgcttcataactgtaggtgcttgcatgcgtaaacttttgcatggttggaaaaattgcatttgcatcgatttcaaacgtataaataaagcgaagctttaaatcttcaagtagatgtcactacaagaaaacacgccagttgcgagggaagaaaccgtcgctagtctctcgcaaaaagcatttagcgagggaattgcgacgaactccagttcctcgcaaaacgcgcgtcgtaaaatcaaattcgtagcaagttcctcgcaaatgttgcgaggaacaagttgcctcgcaaaacacacgcaatttgcaagggaagcaatccgtagcaaattcacagcaaatttcgggtctcgcaagtttctcgctagttgcgacggacgaccagactcgcgaagcacacgcaatttgcgagggacgtactcggtagcatattagctgcaacagtagcctcgctctttcctcgcaagttgcgagggaatacttcagtagcaaagtagtcgcaaattctttgtcccgctaatgcctcgcaaaatttgcgatggatttgcgtggcttttatctgtagtcgcaaatccgtagtaaagtttgcgatggattcgcggtaaataagcgactcttttctgttttgttttaagcatgattactgttgaatatagggattactgttctacttaacaatatttaatggttatcttaattggatttttatactaaactttgaagttgaatactaattaagaaaccttaaactcatatttaaaagctgaaattttaggtttcaagtacagaaaaagaaactgaatacagaatgttagaaggccaaataattttacataacaaaccaacaaaagattcaagttttgatgagtgaaaaagaaacttaatacagaatgttagaaagcctcagatggagatgacccagtgtttgggttagctacaacagcctcaggttcgacagcttcaggtccgatcccagcagttgtggcattaggcgcatcaggtggattggagctgactggttcagttcttgaagaggatctgactcgaaacaaggcagcaaactctggatccttcttggcaaggtaatcaaagtatgcgtcaaaactggtgatcttctcagcctggtttgcaatgagggcttcaacagcagccagcttctgggaaagcacaaccggatcatctcgaggaagcaccggtccggcatgcgccgaagacgcctcatgctgcaatgaaccagccccataaatcctgcctttcttcttaggagcaacctgtcacaaactcataaccaaaacaagcaaacatgatcaaagcaaagtcgaaacatatagacataatgcaaaactcttaggccgaaaatacaatgatattattcagaccaacaacacaactgaatcaggccaaaaacacaaagacacaacatattccttaattaattctgtccatgaatccatagagttttcacttaagttattatcagctttaatagtcatcatcctagatgccaaagataacttagaatgtccttctctacatccctcgtagagtggttgatttacagcatctaacatatcgtaaaaatgttgagcatctaggttgggttcttcactaatattttcaggaaatgaagcaatagtttcatgaaatgcatctgtaaccatatcatgaaatctattttcctagttatgcccataaccaaattgatcaggtacttcctgaccataattcgcatcattattaaaattactaggttgctcgacaccacaatttgtattactagttcctgcgctatctctacaaccatctccatgacgtaaccatacatagtagtttggcataaatcctctattataaagatgcttcttcactacattaaattccaaatatttctcattgagacacttacgacatgaacagaatattgtaccgttctcacgaacaaatggttcgtttgtcgcttgatacatgaaaccgcgcagtccgtcgtaatactctctcgtcacctccccggtcgcttgatctctatgattatacatccaacttcgtaatgtgtaaatctcatgctctccgccccaagacattcttatttttgtaataagtttttttttaaaaaaaatatttttttttgtttgtaagtaaatgttgtgatttgagttatgatttcttacacatttcattggctatttatagatgtcccaaaaaaaaattgcgagggatttgcaaggcatttgcgagggatttgctaggattttgcttgaaatttgcgagggaatcccacctaccaaccagactggtaagataattaaaaacatgttcacctaacccgccaagactcgctactctgtcgcaaaagttgcgacagaataatcgatcctcgcaaactcgtcgcaatttgcgagggattttggttactcgtaaatccctcgcaattttgcgatgagtttgcgaggattgatgctttccacgtatattactcgcaaacgtctcgcaatttgcgaggaattctgtttacccgtaactccctcgcaattttgcgacgagtttgctgggattggtgcggtccacgcagacttctcgcaaacgtctcgcagatttgcgagggatatattcgtcgcaaattttgcgagggattcgcgaagttctcttcttccctcgtaatacacttgcaaatccgtagcaaattgcgagggatgttttccaccgcaaatttccctcgcaaatcgcctattttcttgtagtgtgtatactaagagaatactcttaatcatcggtatttttgtggatccattaacatagtattatcatttttattaagaatcacaacaacaatcttatcattctgctcttaacacccatttgaccaacaattcatcatacatgtattgcatattttctcaaaaaaaaaaaaaaaatttacagttttttaaatattctgatttttatacttatattaatagcaaaatgttctctttaatttgtttcttacttgaaaatgtatcatgagcctatgacaattgacaactaaatatgattacacagaaattattgtaacgagatcaaataataattttaccaaaagacagtcttagttattcgtactaatttaaataataaatagaagcaaaattatttgttcattttctgataatatgatactatattttttaaaataagatactatagcttttgaaatgaaataattattaattagttaataaacaaacccaaaggaaaccaagggaagaacgaagggtcacgaagaaccgtggaaatgcttcagtccatgtgcatcacatgacttttattattagggatcataaaataccaaaaactaatagtgtggactaataattatcttttcttttgttaacttctctaatgattgttccttttcagcattaataaataggtaattctttgaatgattcataaagaatgtattatttaacacagtaatgaatcatatttaaaaggggccaaacttgaagattctttatttttcttttagcattttaaaccccaaggcttgatcaatctcaaagacttttaaatacatttgattacaaatatcttcagatcatactactaaatcatataatgacttacaaagtgagacattaaataacgatatttcaaaagataataatattaaaaagaaataatttgacttttctcaaatgaaaaattcaaattatttattttaatattacttaaaaatttgggtcaaattatgtatttcttatgattaattttcgttgagaaaataaagattataaaaattcacgcgctttcgtttgggcaataaatagccagctctgctttggtaggacccaataaaaacacgaacctaactcgtttctaataggcccatacaataagcccactacgagactaaatacaattcacacaacaccactgaaggcacgtgaccactcaacatctctcgttcgcatctcttctctaaccaaagctacatcttcccatctccctgcgtctgcataaacgttcgaaagcataactttgcatcctccatgagatggatcaatcgctgctagctcagtagccgcaagttcggcgatctcgacgttcccgtgagttcgtgaagctgataataacatcccccagatcattacatcagcctttacaggcatcttcttgatcatttctttagcttcctctaatctcccagctttccccaataaatcaaccatacatccataatgtttgatgtctggctcgatcccgtgatcgctcttcatgctttcgaaatacgttttacctaactccactagccctgcatggcagcatgcgctcaagacaccgacaaaagtgatgctgttcggtttgatggggagagattggagatcggagtagagatcaagcgctagttttgcatggccatgtgtcgctgagccgcaaatgatggcgttccagggagagattgtagaagaagaaatgttctttgtttggtggaaaatgtttagagcagtttcgatgcttccacatttggcgtacatgtcgattatagcagcggttagattgtcgttgggaggaatcgtgctaaagtttagataatcatgtgctctcttcccttcttccaacgatcctagagaagaaattgcagaaaaaacactaaccattgtgattgcatctggttttacttggctactactgatcatttcgcggaatagatgtagagctaactgaggcgatagactttgcgcgtaacccgatatcatagcgttccatgaaaagatgtctttatcatgagtctgatcaaatacttctcttgcctgctcaaccattccattcttcacaaatcctgcaatcaacgcgtttctcgacgcaatgtggtccttaacactcgcttcaaactgctgaagagcgagttttatgtcattagagacagcgtagaaatgtatgatcgttgcttgtaagaaatcataacaatcaaaaccccttttcacaatggtaccatgaagttgcaaacccttggagctaccaactgatcgagctgaagccgagagaaggtccaccatcataacttcactaggcttcattccacagcgcagcatctcggtgtagtaaacaagagcttcgtcaagctgattctttcggagacacccatcaatcattgtaccccacgagacaatatctttctcagtaatctgatcaaacaattcctcagcctgttcaataagtccagcttttgagtacccatttaacatcacgttccaagtaactaaatttctctcaggcatttcatcaaacaacttccgagcatccttcaaacacaaacaaagacagtacatatgcagcaaattcgtcgaaacaaaaacacgaccttcaagcttgagtttaatagccaaactctgcaacatcctacaatcccaaatcccacccaaatgtgagcaagcagatataacagtggctaaagtaacttcatttagcataattcccaaatttctcatctccctaaaaagctccatagcttcactccactgattgttttgagcataaccctttatcaaagtagtatacgagacacagcttctctcaggcattacgtcgaacaacttaagcgcatcccaaagtctacgagatctaacatacccatcaaccataatattgaacgaagcagaatcaagcttcgcgtgatccctgaaaacagattccgcatcagccaagagacggcatttagcgtacatgttaagaacgctattacatatgtatccattagaatcaagaccggatttcaagacacggcaatgaatctgtctaccacaagtgacgtcattactggaagcgcacgatccaagagcagagacgagagctcgttcagtatcggagctttcgccggagaaatcgaagtgggtccgactcggagcagagaagcatctcgcctgcagagaaatgacccaacagcgccgagaccggaaaaaacgaatcaatttgatcataagagatcatgagagcaacaaagctaaaccttaaagcttgacttttttttatacttctctctcgtcttctatagctcacacagtgtatatataggttttacattattttatgtgaaacaaagactacaaatatacaacacaaggcattagatttgatcattcgaattagatatttcttgagtgtatatatagttacacagagaaagtgttcgagagtaacaagacatttgagtttcagggatttaactctataggaaatgaaaaaaatcaataattttatatttttcctcctaatactaaatgaatgttatccgagaagatgaagaagaacctctgcaactgcaacatttcaatgtgataatatgtaagtatagattggaaagtttctggatcagcgattgtctatgcatccctttacagctaattttgccggcgatctgcagagaatacttgcaaacgaagtaagatacacaacagaagattggacaatcatactagtcacagtgaatcaaaatggaatcctaaagagatattaaaatcaagaattctaagcagctatgatgaatttaggaatcaccaaataaagcaatgcaccagcagatttaaatagaagtattggttacaactaaaaatggagttgtgtcctctatgggtaggcaataagctagacagaagctatccatattgtcctagagagtgtggaactacttttcacaaaggaaaaaaaaaaatcaaaagggcaagttgatggcaaattatgaatacgtcattcaacgcagcttatttcctattagaacaaaatctcattgaggccgaagaaacatttcccgccttagttgcaattgactcacccattacttcatattctaaacctgatcctaaagtttgaatcttttagcatctcactgctatcacataactacttaaaaagtgaaactggggaaatttcaaatcacagattgtatatgatgcacatgttacggctgcatgtgcgttaagtctctcaaccaataaaacgttatggtgatagaagctatcatacaatacattacatcaaaaaactagattccatgttcaattgttcctctttcctcttaaaaacaagattcaatgtgctgaaaagatcacaacatggctttgaagagcatacccgcaaaactactcatatgtccacaaattgacaagtccattcatcattacaactggaataagccaaccgaccacgaggaataacaaagccgaatcaccattatcgataagaaacgagtatcaaagcctaaagacttgtctaaaatccatagccagtgaggaggattacataaacataaatcttcactacaaactggtctcaaaatgatcaatggcaataaatacgtcgcaagaacaggataaacagaacctacaaattcactagtcaccaagttccatctaaccaatgtggccaagattcacaaaccaatgcaataacatgaatcattcaaggcttaaaactacaacattttgagttcgaaaggaacttactttttatgacgccgacttctcttaggtccccaaccttcaagcttagcaatagggcaaccacattttgatcggaaaatcaaaacagctcgaccattaaccggagccatcttcctcagctcagctctcaaacactcataatcaggattactctcactacctcctttccacggtaaccgatcaatctctttaaccgaaccggatttaacacattcctctgtctgtaactgcaaatcaaactccatagctttcttcattcctttacacttagggttacgacatttccttgatcttgaaccacaacacaggtcgagaaacgcaattgaagccgcgaaaaaaactgcgaatgcgaagaagaacgaagccggaggagggatttttcctgagggatgatgatgatcttcatcttcggtgctgtgatcggaggagaagaagatgattagaggagggaggagagaggagagggagatggtgattgaagggaaatgagaggagaggagagataaggagtggataaggtatgagaagtaagaggagaggaggaatgtgccggagaagaggacgaggattaggattaagaggtcgagagtcgccgacggtgaatgtttgcagagatggagagaagaggaggagttttgattagcggcggatctagaagaagggggcatggtggtggaattgtcttctacggcggtggtggtggaggcggcggaggagaagaggaagagatggagcatgttaggaggaggacgacggtggccggtttcttttacatataagtctctgtgtatgtataggttttggaaattaaattaaattttgaagaattctttgtgaaatatataaataccggaaaaatacgtcacgagagaagtaactactattcgatttttttttttttaaacaagaataaagttgccgacattgctcgaccgatagaatgaagtaggaatttcttctacagaagaatctctgtttctttacgaaattatagcttagtgttatgtgaaatttttattaaaaaaatctacacaaattgtgaatgcaaaaactttgattccatgggatattaattattaaaaaattattacctattgaatcagagttattgtatattaccttctctcataaaacaacatacagtaaatggttaagatcatttatttacaaaaaggaaatcggaatgtggtctccggcgacgggacaaaccaggctgaccaaatttaacaagaatgaacctgccatcaaagaactaaaacataaaccagtatcaacaacaatttcatgttatttgttcaatcaagaacaaataaccaatccgggatcaagttataaggtttggtcaaatggatcttgaagacccactaaagtatgaaacccacaccatagaggataaattgaattcaaagaagtttataatatacctttccgttcatggcttcgacagccgactgtgcgtcctctttgctgttgaaccagacatatccgtatcctagtgactgccgagtcctttcgtttgcgatgatttttactgccagaaaagtagtgctctacagtaagaaaaataagattgaacgggtttctgactgatgctaaatcgcaaattccttaatcaagctaacctattgatactcttaatgctgttaaaaattgactcactaaccacaaggtttgcttataatcgacctagcgtaggttttacagttatatgaagggaaaagaaaaacactaagaaacaacaaataatatctagccaatgattccaccataaatagtatcaaacaagaatccacaattctctcatttctttctctatctaaagacgtgattataacgaagaaaagcagagaaagttttcagcaaatcaatagcttctctttagctcatgaggacttgttttttcgtttcagagcttccatttctgcttctgctcaacaccactttgtgatatcaaaagcacatatctttcatcctcttatcttggtattgattcggaccacgactcatagtaacaaaaacctcacaaagaacttcactatttgagtaccacaagctctactccaaataagatttaggagctttagatatcatagagtagacaatggaagctctgacaccattgcttatcacagtcaagagcttaaagagaaatcattgatcagcataaaaaattctctggcttttcttctactcaccctaatgaacctcctaagcttcattctcgtttacgattgaacagtcacaagctaaacaatgagcttcaaatcaacctattcactatattcaatgttcttgtatatgaaattatgaatcatcctatatagagagactcaccattggtaacttgtccaaactcggagaagactttctttaaacgtccttcactcactgaatccgaaaaccctaatagtggaaacggattcaatttcgtagaaacctaaatacagtggaacataatttcaaagagggagaatcaaatcagacatacctttcacgaaaagcgaagatatcgaagaaggaagagaagatgcttctctggtttcatcgtctccggcgacgcagctgatggtccggagaggagaacagagtttgcttcgcgccgtatgaaatgacgaaatcaaacgatctctggggattgtagacatcgttaaaataggtgtcctcagattttgagacattccgaagtaacggtgtttgaggaacgggatttggaaagtcgacgaagacagagccatctccgtcgaagtacgtcgccggcgaaaaaccttataaaacttttgacgatgatatcagttagagtttattttcggctcattaacataccattaggcttatctgccaaattgggcctaatatgtcggcccatctaaagcaagatttttgtattcggcttgtcatgatcacgttaattcattacaactacatacatgtacaaaatattggttagaacttgattgatccctaaagccgaacaatggtcgaggccaggtagtgtgatcgagaccaagtcatttcgattgatgcgtgacggaactgcaagaaactgactgaaaatctgggtgacaagggtttggccgaaagaaagtttaaactaattcaatgaacttgcatgtttgattatatggaaactgaccgttcttactaatttattccaaattactacgttttttggtttccaggaaatggagatagtcgaataatgaacggtctagctatagtgactggggtctatatatgcccggtagataaatggttatagtatgcatgattagaagatttgtatgagctagtaagcaaatttggaactaccggatctagtcatccacgcgttaagcgaaagtaaatgttggatggaaaatcattttttcatcaaatgttaattaattcatatctagacataatactctaatgatacactttatatacttgtttaattagatactacataatcttacattttctttattattttagaggttgaaacatcaaactaatcaactcaacatatatgtcacacgttgagttaggaacatgtgaatttagagacagttgtgtgttaaactttcaaaccaaaaggaaactatattgttttatgatcaaaaaagaaaaaaagaatttagtgactgttgtacaaatataaatcttaaatatcacaaacgcatctcatccagttttcttcagtcttctcgaccaaaaaaaaaagtaaaatgttgtagtggtcgaaaattaagattcgtacttactataaaagttgccctaattcgcgatgttttttcaaaattacacgagaactgcatacttccaccaataggtagtagcatataagagaataaagattaccaacttgtcttatagacataattaatcattgcccataactttgctttaaaattcaaagatgatgagacttatactgactcatgcatgcatctttccaaataacagtttttcgtgagttatattcttgcataaaataattcatataagaataacttacgaaaattatgaaaagtatgtctttaatgactgatttgaaagtacatataagtgggaacatactttacttagcttaaataaaactgagttagtcaaatcacacgttaatacaaacatggtttcgcttaagaaaatgaaaataattcaacaatgccaattgatatcgagttgtttttctttgatgacacgcattgatacaaagctgtaagataaataaagtaatactaattgaaatgttggaaaacaatattattgttatgaaaaacagcttgtggctcgaatacatctaacgtgacaatgcctaataattgaggcattcaaaactctaaagcaacttgcctaatgggaatagtttttgacatccatcccacatttttggcccaattattacaaatttacaatttttatacctcaacaaaatgcattttagttatgataaaaagacaaaagtatttatataatggtagctaagcttaatatatatactgaagcctagctaacgcgtattggtagacgatattggtcgttagcaaaactaacatgatacatattctagtatatttaccctcaaattcaatgcatgcaactggtaagcaacgaaccacaaatatcctagttaccaaaattcagctacccgtagtttttataacggagtacggaattaacaaaaatcaatacaacaagacaatttgcaagagttgaagacattaattagctatataattgaagacaagtatttaaccaaattttattttcaactatatatacatatatatatacatttcttcaacttactccagccaactaatcaagtagagaaataaataaatgaaacacataaactactttttttttttttttttttttgctaagaatgtaaatattttatagaaatgaaaacaatttaggtttacaatcgatgattataaacctacagaaatggtttcataacaaaaaaagtaaaaacataaaagcataaaccataactaaaattcggttcatccactcaaccaaagcagtgaggctaatggagttagatgaagcgatccacataaactacatgaaagtcctttttaatcaatctgcaacgcaacagtcctaaatttggaggcactatgtaaccttgtttcgtttaattgaaggtaaatttaaggaaaaaaacaaaaaaaaacaaaggagctctatgataaatacagaatagtacgtgaagttacaaaaatcatattacttactgtatatactataaatgtaaggaataaatttagaatttaaagccataccactttttcgaaaaaggcatgtattcatatttttggtgtgtggcggtgggtagtgggcatcaactcacacaagaatctcttatcgaatacataatttttctcatagatatttttatatcagaattgttaatttaatcgcaattttcaaatccattcgtctttttataacgaagatgatagtagttacacataagctcatggacaaagacgattataaacaatattaacaataatcacttcacagccgtttgattgaattatttaacaacatcaggtcaccccaaacacgtatcggacggcaatccgccgccaaaagttgggtcaatgtccaacacaacaaaactccctttttagtccgttggatcctttattcttttttaacaaaaccgcgttgaccaacgatctctctcttaaacctgactagtccaccgtataaaccgtacactattccgcacgacaccctagccctaaagtactatacccggaaaataaaataagggaaaaattatctgcgtccgccccgcgcgtgcagctcacttccctcaaaactgttttttccgtttaaccgtaacacactttctttaagtaacagaattaaaaggtcatcatcttctccaagacagcgaccaatctcgccacgtggcaatatcatggcttaatcctctttccgaccaatctcgccacgtggcactattatggtttttcttttctttaaacttcccttctttcgtcatcgtcgtatacattgatttgttcctgttttacctcaccgggaaatcgccgccacggcggctggaagaggcggaacggcagagatctccggtaggagaatattggcgccttccaaatggtggtcatcgctgtaactaaggaacttttcgacggcgagtgcgctcggatgagccactgagttatcccaagcctcatcagcttcttctcctcgtcggagaaaaacctccgtcgcgtcgacacggtgcatgttccacttccactgcttgtaaagcctttgaatcttctgcaattgtctacacgcaagcaaacaagtgttctctttaatcttctcgatcgccgtttcaagaagtctctccgtcgtctccgccggataattccgcatctccgaacggagaaattcgtcgagctctggaactccaatggctcggcgaattccagcggagtaatccgacgaagacggatcgaagatgcggcgaacctcgtcgacgagacccatatcaaccatcttatcaactcgctccgagacaaacgagtgtaaaaccggtctagagacgtcgacccacaagaagcaacaattataccttaaccggaagtcaacgcaatcgttgaccagagcctcgatgtaagaattggaaccaccggctatgatcgggacacggtctctctggacgattgactcgacggccctgattgcttcacgctgaaaatcctccgccgtgaaatcttcgtaagtgtcgtggacggtgccgagaaggtggtgaggaacgccaaggctttcctcaggagtgactttgttagtcacaatgtctagacctttatagacctggatcttgtcggagtttacaatctccgccggaaaacgagtggctaggtcaatggctagacgagatttgccggttccggtggctcccatgacgaaaacaaccttgtcttttcgccggaaaaacggaacgtccaccatgtttccttggaagttcaacgacaatggttgaatcacttgtcttagagccgtcatgcatggcttcattcttataaaaactcctttaacttcccctgctggattaattatgtaattaatatttttaagacagaactaattagaagcataataacatgcaatagattcgtttgatgtcaaagtagagacaccgttcccggatattactaaccttgaagtggcttgttccccggagcactgtctcttccctgtcaatttctataaaaataacaataatcttccttttttcttgtttaagattgattatagctcaagtgtgatagttcatatatagaaatactgaaacttatcttgctctcaacgagcatatgttgaggaaaggatcgcggcttcgaatttatagtggctggaggaatgttactgtgaaatgttgatgttattcattttgttttatattttacggacactagctccataacacgtgtctcaaaatgatacatacatatatttctattcgtctctttcactcaagaatcattgaatgtgattggttctttcaccagttagtataacaaaaataatagtaataagcttaggaaatatattttttttttaaacgaaagtgatataatacttctaaatcaggggttaggacataggagtttgataaatgagagagttaatgtaaattagcggaggtaattttattgtaaatcttcactgtaacagatatagaaccgttcatagtaatttcactgttacataattgatgaatagtagcttgttgtcgatgagctaacttagctaatcacagatttttttatttttttttgttgggggcaaagcacaacacagttagctcacacacaaatgtcaataatttcactgttttttccaaagcgaaaagcttcctgcacacctccacaactctggtcctctatcaaatccaccgttgcagtagattcattccatataaaatatctagaaaataattgacaaatacagtgaacttatataattatattttttctatatatcattatgttttccttgataaagttgatatggttaaaatatcaatgtggtatttataacactattactgctttaagaaaaattttgtgaagtcgaacacatgtacatatatgtataagaaatctcaaacaccctcgcatgtttgatcggagtcggaccttatcacatcattatacacatatagaagttttcaatttgaaaaaaaaaaaaaaaaatcaatatacaaatatagaacactaattacaatgttagtggaatcaactaaaattaaattggtgatgcgatttctggctcgaataaattaaggtctcaaagcttttaaataattttggctttcggtttttagctttttgctatttggcttattcccaaacatccattttttgttaattgccactaactattcttaattgaaacgggacgttcataacatacattgttaagggtgtttactgtttacgaaagcaaaatatgtaaagcactaaaatttatgatggaaaaacatacatcaatagcctttcaagtctacaaggttaaaaggaaaaaaaatctactcgatttgattgaaaaacttgtttttaaagtaacgaattttgttgtagtaattgttctatactggcaagcaataatcgtaattgaaacagcctagctagaatcataaaaattaatttgtcatatgagtacacatcttgaaacagccttaaattattacttttatttaaagaaaatatttgttttgttaggagactgaatgtgaccatgcaaaaatgaatcgaatagtacaagatttttttttgcaattcagctcatatgttattatttgctaaactaagaaaacaaagataaaaccagtgcaaaattgtaatggatatctagaaaagatcactatcactcaaaacctaaaataattgtatacgttcctaatgatgataagaaaattaaatcataagaaatttaacttgcttgtacgagagtcattatcattataagagggaacaaagattatatgatgtgtttaagttagtggattggactaaatttaaattgattggacgtttagtgaatggaataaattaagatatcatattgggttaacctctaacgataaatttgatgatgtatagtgtcgttcagtttcaagaaataatgtttatcgaattcaaattttttataactacatgtacgcttgcattgcaaaacaaaaatatacaatattccttttttctaaattctatggcctcaaagaccaaccaaaagcctctgatatatatgcatactgtgcaataaaggtattgcacaaaaaaaaactaaaatgacatgcacggtcgaaataggggttgacgtaaggttgaaatagttatttaataaattgatattggttgacaaaacaacaacaactaattgacacaaatatataattctaaacagaagtggggctgttcagggagggtatgatttgttatatagcttttatgaagcaattatttagtttcataagaagtaaatattattgtagtaatgatataatatttaaaatgataattatggtatagttgcagactaaagtacaaaaaaaaaaaaatgggtatagtcaacttaagccatgagaagaggctggtggattcctccatacaaacattcatttagttcaatatatttgttatcaatttaaaaatatggatttttgttttggttgtagatttgaaaatattttggccataacttgtaatctatatgttttttaatctaatcaatttattttctgtgtaatgggtctatatttaatcgtccattatataaaaagtagctatcacgaggtgacaacaatttgggggatctattttctttcaacaaagctacgagcaatggaatttgcttttctttgaaaacacaattgttcgatgccttataatcactaataacattgcttgatattacaagacggtagataatatatataagttgttatatctcacaaaaatatattttccaaaatttgtctaatctttatttaaaaaattggttaactggatttagagtttttttttaagtttgaaaagtgcttagatgtattattttacaccttttttacaaacacttagatgcaccaccattaaaaaaaactagaaatttgtaatatatctgaatattactgataaaaaaacgtagttaaacatatgtttcagttggcttaatagctaaaacaattggttgaaactattttttctgttctatttcaacattgaaatggtaatcttcgatttaatggcaaccacctttatctttttacttgtttagtttttacaattttattgactaaaaaaaacttacacatgttttttttggtttaatgttaaaaaaacttacacatgttaatagggttattcttaattttccgtttagaaaatctgtccgtacactcattaaaaagaaacatagatttgacattgatagctatttattctctctgaattttctttttcttttttgttaatctttagtttttcttctttggtaggggccaatgccaaagaggcaaagacttacccattattattttcgaaataaaaaacaaattttattcggttcgataatagtaatattacaactatcaaaattttatagaaaaggaacaaattgattaaaattattaaattagagtgcccttttaaaattaacaatgttatcatgctccaaagtggagatagggtttctcatattttataacatattttttgcaatccatctgggtctataaaggcataagaataaatacacatacgacgagacaaattaagaaaaagatatattaagaacagaatgaacaaaaatgtaattataaaatattcttgaggaagcgctcgaccagaaggtgaaggtggttagcattgtaaattcgctgtgaaaactagcctgtctttcgagcaaaagattaaggctaccaaaaatatatccaccagcatatgactcgtttggttcatcaatctcatattaaaaaatatgaatcacgacttctttttattaaaccgatagtattttagtaatttttggaaaagtccaatatatgaaacaaaaaattgagtttatagccaactctaatcgaacttcatcaacatatcgaagctagaacttagccaaaacttgccagcttaattagcgtcttgtcttgatccttcatcgctataatataggtgtaggattgagcttgcaagtgtttgctgcgttgcacgaatgtaattaagaagttttgttccgttagtacataattcattatctcacttttctaataaatttttttagtgccaatgcaatataaaaaaatgcgtcgtgtggatagatagatggtgatgttttgattaaagagtactagatgtattttggagtcatttgcaaatgattaatcaaccacacaattgcatttagaatatctctctctttctctctccctctccctcttggaagaaaataattacgcccgtacgttattatggatttgatagagtattctatattggacttatataatgttagaatacattatgtacatagttagattcggacgcatgtagcatttatattcactcctattcgtgttcctctctttacaaatttttaaaaagagttgcataggtttacctattaacttaagaaactaaaactaaaacatacaaaataaccaaccatgcatcgatcgagttcttgtgtttctctacagtcctagactctttaagtcgtaaaatatctgattatatatatacgtctattattattaattttatccaatttatacgtttattaataatgtagaataatttggtataatataaactcagataagatatttctgaaattttcttattcttctctggaacggatatcataaataaattgctaatgtgttattatcattaatatcaaaatattgtaatttaactatacaataaaaaatgtgtgtgccaattaccattaggttaagcaaagctatattattagtccactagtagctagattaagaaaattgctggcgtggtgggagttctgaatcagacattttgttttgtccgatcgattttgctttgtattatatctttgcaccggaacacaaatttttagaatatcgagcgataaaattatctaatacatattggggggggggggaaaactagagaaaatcactatactaaatttgttttgtttaaaggttttagtcactacactaaagtactagatcgatatatcacttctgtatcatttacgggacaacaatgaaaattcttcgactatcgtgtctttaaacttgtcgtctggtcaaagaaacaacacatgctctgatgctcatattaaagtacaaatagtacgtatgcatgtatacaagttacgatgtgtgtgcttgatgcttgcatttaatcaatcaaagcaatttatatagttcgtaaacttgatgctaaacatgttgggccgattatcctcgtaattctcaaatcggataatgctaagttggcttttaaacttggcaagtcttttattgggctttactaatggattcatagattagtagttactctaaggccttcttattaattcttattaagatcataataagttcctgaataggggtatcaaaataagaaataacattatactcaaccattcactcttgttaaataagaattattaatttattttcctactaaccatatatgaaaatgacacgaaataatattataattacattatgagccatcgtagttgagattagagactaattatgtatttagacgttattatacataataaatttgagacgcaatcaaaaacttcaaaagtccgacatgaataccaacgactttctctcgccacgcgtatgacggcgcgtgtatttcactctttaaaatttcgtttcatttgtctcgcaaagacgaaaacgaaatctgaaacggtcacacacagtcgctagatatgtctctctcgcttccatcttcttccgccgccgctgctgcggcgtcaacatcgggatcatcatcttctccggcggctgcttcgtcttcctcaacaaccacgtcatggttctccgggatcgttcgtggtcgtggtgataaatccggcaccgcgaagctatctaaaagctcttccatggctggaggaggaagcggaagcggagattacggtggaccaatcaaagggaagaatcaatttcgcggtgttttgttcaaatacggtcctaaatcaattcaggttcgcttctcgatttcgatttgttaaattgaattgcttttgagttacttcgaagcaaagacacaaaattttgaataataaattatcatttcgtgattctagggttgcttaaatatgtgtgttgttatattgcttcgtgactgtttttagcaaacattgtgttcatcacaagcttgtttgctgatcatgtttaaggttcgttgaagaaagtcaatgaaaatttaggtcaacgttccaagccatgtgagaccttgatttcaacttttgcatcaagttagatgattttagttgaccacttgtagcagctttgatcaaagtttacaaagatggatcctttttgaaaatcagaataggtttactatagattgttgggtatagtaacatcagcttccttgtctgtttatgcatcaccaggttgcttttaagaccggagagtataaacaacaagtgatatttatcggtggattaactgatggacttttagctactgagtatgtagcttcttctctctttgacctaaatctttatcttttgggagaaattgtgtacagtgcagataccttatcgaatcatgtttgcttcatgtatattaattgatagaacatttgcaaattggctgtttcagttacttggaacctcttgcgattgctttggataaagagaaatggtcacttgttcaactactgatgtcttcttcatattctggatttggcacttccagcttgaaacaagtaagagttatttcatataatttcatcttgccttgtaatattgttagtctctgggaaaaaactaagaatttctccattccgcaatatactaaacaatatatctttgtttcttctgatgaaggatgcacaagaaatcgaccagctaataaaccacctcatcaacaaagagaattctgaaggtgttgttctgcttggtcatagcactggctgtcaggtgattggttaagccctcaaacactttttgatcatggttctgaaagaaaagttatgacagaaacttgtgtcttctcgcattttgaaacaggacattgtgtattatatgggaacaaatgcggcatgctcccgagctgtccgggctgcaattttacaggtgcgagtcctagattctttgacttctattttgcgttctctcttgaagctacactttttattatgtgaaaggcctcgtatcatatgttctgactgtagtgtagctttgatcatattgcctattgcaatgcttacttaggcaccagtcagcgatagagagtacaaagcaacgcttcctgaaacacctgctatgatagacttggctgcaaacatgataaaagaaggtcgaggagaggagctaatgcctagagaagctgatccttgtgctccaatctctgcttataggtcaatatctatttccttctaccatattcgtagctttgaaaatggaaaaattgtgattcgaacatgtctaaatacaaaaatcaatcttttgcttgcttcctgcagatatcactccctctgcgcttacatgggagatgacgatatgtttagttctgaccttagtgatgatcagttgaaaactagacttggccatatggctaacacaccttgtcaggtataaaaaaaaaactaatcaaaagcatttccagtcccgctgaacataaatttttctagttgtggccaattgggcattgattagcttcttatatcatctatgtcttggttctacacaggtgattttctccatgggtgatgagtatgtaccagattatgtcgacaaaaaagcattggtcaataggtgagggcagttaaactaaagtaattataagaatctgtaactgaagacaccttacatagacatggatgtcccatttttttcatttgtttgcaatttaagttaaaattggtatatatgaagaactatagatgcaaactttggatcaaaatgatatcgaaatgattggacatgaacaatcagatcaaaaggattgatttgatctttgtgattacagattaagtaaagcaatgggaggagcagagaaagtggagatagagcatgggaatcattctctctccaatagagttcatgaagctgttcaagccatcattggttttgtcaaaagagaaggacccagtggttgggatgatccttggagctaaatctgctttttccatttatgtggatgaaaaacttatccaaatctgaatctcatgaattaattcacttcttggctgattcgtaaccatttatccttaaaaagtaaaaaagtaaattgttgtccttttgttctgatatatacttggatcattaagaaaagtgtcttccttattatatccttcttttgttgcttggttttgtcttgctgagtccataagttaagcttgaacagagatgctttgggaaactatgaaaaaactaaatcagtaagcaatcaaaggtaaacggtaaagatgatataacagagtgtttggtaagatgatagtaccaaataccaaacactgacaccaataaataggcattgagttgtccaaaggttaggtaaataacagaaatttccattagtgtatacataactgtttcctcctaaaacaatcaacaattcaacatcatactaatctttttttttttttttttttgccaaacaacatcatactaatctatatcttcttttctcttctgttcaaaatttataccagtatattcaaatttagaataaattatgtaagtatttagttcttgcaataaaagaagataaggaaagaagaattatttgaaggatcattgtaagcaaaaaggttttcagttataaaaggatttcaattggtggcagcctaacaatttttctttctaaattatgaagttccagtctcaaacctaatctttaaataattagttgggtagctactaaatctcaatatctgtttttttacaccagtttaaaatttttatcccggcaaagaatatgtaagcgggggtgcgacaatgaccaaacaaacaagacacgtgaccgcgaacattgtcctaaaatcccaccgtacactgaaacgtcacgccgacgcgactcctgaacacgcttccttcgcaacaacacatgtcagtgctcattagttggcgcgatcaccggttcgagccaatgctaatatctgctgattcacaagggtataatcgtctgtacatcattaaattgtcatttctatactcttcggccttttggcaaatcacattgaatttgaagcaattttccttccgacaatctctaaattcttacctaattagtacttttggagactaatgttctgctcgagattcgaaactaggaaactaataaaaatcggacctgttacttaccaaaactacaaaataaaaatcgcacctttagaaatcgccttgtcacaaatttgatttcttgccgatttgtcatcatcttcttcagatttcttcaaatgccgaagaaagtagtgattccgtctctggcgatgagtcctctacatcaatggagattaagtgcgctaacatctctcgtcttcttcctcatagttgttgtctggagcattgacagttgttcaatcagaagcttcatcaaatcatggagattcaactcttactctatacgactcacttctcctccttctctggatctggatccgacccgagtaaagcttgcctggatctccgtcgagcaagagcagaacttcacagcgaatgtactcaaaaactggttagctccgggtggagagaagtgcagagaagcaaacaccgttgagatttctgttccgggaatcgaagggaagggtttagtagagttaacggctggtgagattcacgaattcagatttcattctctagatgattctggggaacgagtttgtatcggtggagattacttcgagactgatctttccggtgaaaactggaaatcaagaccaccggtgaaagatttaggaaacggaacttactctttatctcttcagattcatcctgatttcgccggagattatgatctcaccgttgttttactcttccgtcgcttccaaggtcttaaacttagccctgcacgcttcgcattcaacagaacgctacgaaatttcaaactacggtttatcaagaaacctcacgttgttttaccggagctccggagatgtgaattgtccgatttcgacagagatgtttggtctggccggtggattaggcttggtaagaacgacgagtgtgaaatcagcaatgatggacgttaccgttgcttaccagatggttaccgttgccgggaaccatggtgcgacggagctttatcggcgttagaaagcaatggttgggtttactcgagtcattgctcgtttaagctattctctagtgaatcagcttgggattgtttgaagaacaaatggattttcttctggggtgactctaatcatgttgattcgatcagaaacttgttgaactttgtcttgggtcatccggagattggtgctgttcctaggaggtttgatttgaagttctcgaatccgaagaactcatcggaaacagttaggatcacgagtatcttcaatggacattggaacgagactcaaaactatctaggtcttgattcacttgaagatgatagctttagagaattgcttaaaagctatttcgtcgaagagaccggtgtaccggacgtgatgatcgttaactcgggtctacacgacggtattcactggtctaaccttagagcatttacgaaaggagcagaaaccgcggctgcgttctggaggaacgttttcgactcggtgaaagcccggggattgcgacctccgaaagtgattttcaggaacacgatagcgacgggcggttacgcgaggaagcttgcgtttaacccgagcaagatggaagtgtacaatggggtgtttttagagaaaatgaaggggttaggattggtctcaagtgtgattgataactttgacatgacgtatccgtggcattttgataaccggtgtaacgatggcgttcactatggaagacctccggcgaaagtgcggtggatagacggcgagattgggcatcagtactttgttgatctcatgcttgttcatgtcttgttaaatgcagtttgtctacgttagagtagaggctagagagagctgctttaaatttaagtttggtttaggacttaggaagattcttttatttgtctcgtgtagacttttcttgattatgttagccttaaaattcggtatttagtcacaagctgaagacaaataaatcgtcatctttctttcattgacaaatcatccgattacgcattgttttctcttttcaaaacttggtcattcaaataaaaaaaattataattccatttgtatataatgaagaatcagtactttgagtaattaaatatttggatcatgaaatattcatgtcatatacttatgtcattgttttttattattatttttttggtcaaacttattttgttctttttataatgtcattattttatacatatccaaatataaaaaacatagttaattcatacaaggcggatacaaatgtgattattaattgttcattctcttcttatttttagtaaatcgaataaaaaattatgtatggttctaaataataaaatctcatccaatttaatttaaaacaaaaggaattagataatattgaaatcgattaaggacggcaaggaagtcggtacgcgccacgcggtttaatgaaaccagtcacagttctaatgcttacgctaaacatggagtctccaaaccaaatcaacgacaattgaatccacaccttcacgaaaccccccaaagtttttgtctttttcggtttcggattacatcatctccaagacaagcaccagcatcagattttctgcatccttaaagatctcgttgcggtttttgtcggaattgtttcgatttgttgtggttctcaataagctctcgcttgtcagagaaacaccggcaacgccgttgaaatagtcaccggagaccattttgcatcgtagagttcgccttttatggcgttcacgtggggatctgctctccggatttctgttctccttatccttgtagctgcaattgtcttagcttgttattttctccctgttgagaaggttcgtaattggcctaattagggttctcaatgtggttattctgacatgggtttttgatgatctctggaaattgacatgcttttctttgaatttctcgtaaatgtcgctcttttgtgttagcaatgaaaaaggattgatctttactatcattgattaactaattgtcagaaagcaaatgccctttttgaattcgtttcatttgatgttgtgatttgtagtattagctagtttatgatctgaaacttactaatttcctttgtattatttttcagctattgaaggattttttgttatgggttgaacaagatctagggccttggggaccttttgccctgtaagtctcttttcttcttgtttcttgagctatggagctagttagattcttgcgtgagtaatatagcaatgagctacactaacggtggtagctgaatcactgtttcattgctaatgttaatccatagatataggaacatgagattaccttggtactgaacttctcttttttttttgcgatgtctgcagagctgttgcgtacattcctctaacagttttggctgttcctgcctcggttctcacggtatatatacatatttcttttgtgtgtgatatatttaccgctatcatccactctcaactttctttgttagagtgactggtttatctataaaattgagaaatcttatttggttgaagctgtgatatattcagctcggtggtggctacctttttgggctgccaattggttttgtggcggactcagtcggtgctacacttggctcaggagctgcatttctactaggccgtacggtaagccactcaaattcttattgatttgcagacacaaccattagattaatgaagtgacatgcataaaccactgacgctatccttttttgatattttggtacttacatgaaaatgctcttatgcagattggaaaaccttttgtagttgcaaaattaaaggattatcctcagtttcaatcagtggcactcgcgatagagaaatccggcttcaaggtttgcactgagaacccattacaagttttgtgctgacactcttcttttgaaacttatgaatatgcaaaactgaatatagatatgcttgttgctccggcttgctcctcttcttccgttcagcatgttgaactacctcttatctgtcacgccaattcggctaggtccatacttgctttcttcgtggttagggatgatggtaatctattctaatccaccacttcataacgactgcaaaatgtttaaattgtaagatggaaataatacagcttgatacattgttaatttgcagccaataacacttgcgttagtgtatgttggaacaactctaaaagacctttctgatgtaactcacaagtggagcgagttctcgccaggtcgctgggtaagatctacacaaattttaattacattctcagcttcttgtttcaatctctattctgacctgttttccgcaatctgcaggcgttcttgatttcgagccttgtaatatccggttagttcggcataactaatgttactagttccttcgattgcggcagaatcactaatgttacaagttccttcttctatctgtttctttgcagtgatattaatggtgtgtgttacaaaggtggcgaaggacgctctaagaaaagctttagcagagcacggaggagacatgaacgaagcggttgcagccttgccggagctgaccgttactgatgatgcttcgacggatttaaatgagcctctcttgataaagatagatgcacaacaacctcaagaccaagtaaaccatagtcattaaaattaagatgatgaatacttactttgtataatctttattttaacatacaaagcttagttttcttggtttgtataataataacatagattaaaaattatttttaaaaagttatttttcttagtaactttgagatgtaattattagttcacagagatttaaaatattggatgaataaaaagaaactaaatggattttggtttgagtttctaattgctccagctaatcagatattttgttgacattcacaagcattctaaacatatctatgacctaaaaatgttacaggtatcttaaaaatctcctaaaccaatattcaatgaagattgttgaatacgactaaaggtatatttattatacacagaatctgttatgcataaattgaacccatcaattgaatatatgggtatattcataaccaaaattagcttttatgatattggctcaactattttggactatttaaaatctcatcttaataacataattggaagaaaaccaaaattaagatgaaaacttgtaaacttttataaatgatctgaatataatttactaacataatattcaaagttaagaacttgttgatatatgtggtcaactataaaacaccacgtttgaaattcataaggtattagttgatttttcatagtttttctctatcaataatgctattcgaaaaacgtcatgtatgtgtgttttctagatttgaacaagaagaaacggtcttgtctctttcgttagacggtcatgtcttcgggaacatccgattaaaaaaaaagttacacgcgttgacttttattacaaaaattgcagtaaatctggcagtaactgcgtaaagtaaaaataatgtaaataataatcttcaccggaagacaaatcttttgatctgactttcgtctctctgtctctcttgtctcgtttcttcagaggctatggggatctccttaagcaagcgtcgacgagacaacaacaacaaccaccaccatccccaccacaatccgccgtactattactccgatcctccaccacaacaaccgccgcctcaaaacgggtatagctactctcacaattaccccgtttcaactccacagctctctcttcctccaccaccggctcagccaccgtcttcttctcagcctcctccgtcgcagattagttaccgaccgtacggtcaaaactaccatcaaaaccaatactacccgcaacaagctcctccgtatttcaccggttatcatcacaatgggtttaatccgatgatgaggccggtttatttcggtccgactccggttgcggttatggaaccgcctgcaccttatgtggagcatcagaccgctaagaaggttaagaacgatgtcaatgtgaataaagctacggtgaggctcgtagctgacgatcttaaccctggtcattatcttgtttccttcgtcttcgatgccttattcgatggcaggtataacttcttcactccaaaatttgagtcaagtttccgactttagaaccagaatttgaatgagattggctaattagcgtagaggggtcttgtagattatactgaatctcaaatttggatcgtaaaggttcaaactttacatgatatgactcatttattcagtgaaagttagggtttttgctgggacgagattgattaaaaggaaacatctttactcatgtttcagttctgaattatgtgttgccacaatttgggatgaaaaaggttaaaatttgacatgatctaggtgatgaatatgtgattggttcagaaaccaaacaatacaggcttcagttacataactgattgattttaggagttattgtagttcatttaatggttcggaactactaagctagttagcaactgaatcaaccttattactctcctgtgttgcataccaagtttaggtattaagattatctgacgaggagtctcattatgttacttgtctcattttcagtttcactatcatattttttggagaagaggaatcaaagtgcacaatcgtccctcatttaccagaagctttcccaccaatcaaagtccctttccaaaaaggtgccgggcagaagtttctacaagctccagggacaggaatcgacctaggcttcttttcactggatgatctatcgaaaccatcaccagaagaggtgtacccacttgtaatatcagccgagacagtaatatcaccaagctcggtttcagaggaaccattagttcataagcagatcactcaagcggttttggagaagactaatgatggatctttcaaagtgaaagtcatgaaacagattctatggattgaaggagaacgatatgaactacaagagttgtatggaatcgataattcaatcacacaaggtactgctgcatcggggttagaggatactggtggcaaagaatgtgtcatttgcttgactgaacctaaggacacagccgtcatgccttgtagacatttggtacaaacttctagcaattctctttgctttcttcaattcttctaaacgcaatttttttcatttactcggtaaacctataaatcgttggtagcgtttcagttatggaacaagcaaattctgtcattttagacttgcttcatattgctgttgattgtctctaaagcaaatctacatcaagtctttcacaagaccataactttttggttgaattgtcatcaagactaaatcatgttgtgttgtctgttgcagtgtttgtgcagtgattgcgcagaagaactgaggtttcagacaaacaaatgtcccatttgtagacaacctatccatgagcttgtaaagattaaagtggaaagtagtgatgaacaacactgaaaaagaggtttcttcccttcacttaaacaccatgtttgattctttcttcttcttctttttgaaaaccgtcaaatcgaattcttttgcccttttttcttatacaaatgtgttttctcatgtcatactcttgcacatatttgttggtcttagttttgggaaactcaaagaaaaaaaagtcagtaatgtatatatagctccaatggttcttgagaaactttctctttgtatctttctacttgaaacactcattctgtaactgaatactttttggtttgggcattgctcaaatataacttgcaatcatatgttgtttatcgtaacgtttcgggtttataatctagaaaccgaacctcctagtaaccacaattctatatcaaaaatagacaggaaaaatctgcaagagtcttggatagctctatgtgtccctaatttggctttcttttaactctttctttttgagaaagtaaaagtttgtgtagatgagaaaatggggaccttgataattacaaagattcaaaagaaaataaagagagatgggaactgaagttgatgagaacattcaaagaagtaatctttttttcttctctcctttttgctttttgtctgtaaaaaaggctcaaataaaaggaaaagctggtaggagatggagaatgtttcctattgaagttaagcctgagaaagaaaaaagttttaaaaaaaaagtgaagcttgagttcattctttttgacagaatgctcaaacttttgaaatgaggaataaaaaaaagtctttgtttgatagtagtgaagtgactctctttacaagcaatattatttctccatacacattatgattccatgtggtatcatatctatgaactatgaaacccctagggtctatgtgtgattgtctttgtcttgttttggactatataatgaatttgaagtgatacttttccctttctgcctatgacaatgtttactagtcataccatgatgtttaatcaaaattccttaccgaatctcggcattgatcacctatttctatgtatgtgtcactgtatcaatatatttttcaatttcctatattctattttagaccaaccttcttttcttagatttgacattacagtggatatatatggttcagaaagaagttttaagttttaactaactccacaattgcattcaattagccactaggaaaaatgattgatgttgctcaatggaatatttagcaattaaaagcaagattacttttcatagggtaattgtggctgaggtttaaactcaaaatgaagataatgacgattgaaagactaaaagattattggaattgaattgacacagctcaacgcacaacataatgtgacttgaaggggaaaaaaaggaagtacctatttttgcagaaatacttatggagtttttgtagacatctagatctttagggagttatgttattggttatatacttatataaaggtcaaggctcacaacttttcatgtacgtgttagggattcaatatgagagtcacataggtgtatatggcctcgtcacatggcttagtaaacgatctatttgtggtgtttagtggagatgggaagcgtcgttgtaagatggtggtgcgccgcagttactgatataataggtgttgcaatattgaagtctataatatttggtaaagttcagttcatggctagcttagctctgaacttgatttatgcgttttggatgttatcttgaagatgtaggttgaaaagaatatatttcgttgataattttgtatcttattatttgcacactcgagtactatttattttctcgtaatgtaagtatgtaacctagctccaaatttcttcacttgcaagtttaggattgcaaataactagtcatgatggcttccttgtgtgtgtggtgtatacagatatgctacatggatttttaaaatttacagtatgttaaaactaatacgaatctagtaccaccggcaaatataatgtcattatttccgtcagttcatagttcatatatactgtcaattctcaaccatatataatttaccaaaaaaataatagaaacctctattattctgtcagattctcagccatatatatacttaccaaataaatataaacctcttgtatcattcacactatcaagatttaactaaatacggactaatagccaataagtttaacattttccaagctaaaatatagcaattcaagtccgagacgtattatgataagattcgtataagaaaaaaaaaaaaaaaaaaacgaatctataaggaaaagatggtaacaaaaggagagaatagagacaaaacccccaattaatgtcattttgtcaataagaagaagatgaccccatgtgaacattggagactcatgtgactcaattctatcattttaggcaaatattcagctacaaattttatcgcaataaacccaaaattattcaaatgttggtagttagctgataagtaagttgtttttatgttgtcgaattcaagtcttgtgactttctatagatcaaagtctttttgttttcactaagaaaaaaatgtacaaatcaaaaattcagcatttatacaaaaaaacactgaattgttttcccttaagacatatacagcatatataaatatatattgagtccttgtatcaaactttttaaattaatttagaacatcatgaaaattttagggatcatcgtgcataatcgatttataacttttgactggcaagataaaatcgttttgatcattcaacacaaatttgctagcatatacccaatataacttcaaataatccaataatgcagcaagttttcgacaaataattccccagccatcgtaaaactttatcataaatgtcaaaattgtaccatgtcctttcgttctaaaagacttggcctatagtatacgagttaacgttactttttgtcctatccaattatatggtacaaaaaactacaaactactgatatatggcgatgaaatatctactagctagatttttttacgagtaacactttttgttgttcacttaattaacaccccctaatattactaggatgtaacatgcttgtatctcgttcgttgctttttttttcttcatttctaaacttctccatatataaacatttatggtatatatatatattccataaaaacgatagtttacgtgtataaaaatcgtcggatataactaaaaagcgtgagccaccaaacaatattagggtttattatgatcgatctcatcatgtacaatgcatttaatttcagctaatggtacgatcatattaactacatgctaacaagtagtactaattaattaacatcttacattttgttctctttttccatataatttcgcaggcgtaattataatcttatgattcttataattttcgactttaattaagtaagtgctcagattccatgcattagtagcttagtggttagttagagttgagttaggatatacggtcaagttcatacatcacacatgttcagtgacgattatggtactacgaacaaatccgttgtgcatgaaccacttaattggttgtttaggatttggtctagacaataaattcgtggtggacttacgaattttttttgaccaaggaacatgctcacatttgatattaattacttggtgcttcggcaaagttagaatgaaatcaagatttatatatttttctatgcatgtgtgttcataacttctttttttggttttattcgctttactaatcgacaattacatcagtgaaatttccttttttcattaaacagttatatctttaaaaaagagtttaattatagtattatttaaatttaaagcaaaaaggaaaactaaaataagggaagaatgtctcatgccatgtttacattatttaggcttttgaaaaaaaaaacaataatgataaatgcgtagaaaaaaagtgtctaaatttagagagaaaaaaatgcttaccagctaagagcatcttcatcagtgaaataccttcttagtttctaaaaaaaaaagatattagtattttaataaatattagttatataattaaattttaataataaaataatatttaatcaatagatgatatacaagtgtttttatgggtttctcagagttctactctctctcatactttttgattatattttattttcatattgaacagtttctggatgagaaactatcgatggaaatgttctaaaatattacttataagaaaattaagagaaactgatgcggccgaaaacgtgattatgttcactcgtaagagtgaggctttcatcatttacccaaccccaccctttttttcccttcattttttttttgttttctcttttaaactaatcttttaaagttacaattagttgtttaacattcttgtagtagtatttcttatgtaaggttaaatctctttttcccattaagacaaaataataataatttcaaactcatattcgtatgccatattttcacataaggcgtctctttctttaaccaattttgtcattttttcatctagttggtcccactgtttcagttttaacttttactatatacatatcattcaattattgaagtaatttggacaaaaagtcaaaaataaaaagaaaagatagttggatataacttgtgaactctaaaaatctgtttttttttagtaacgcaataaaaaatttaagctttaaaaaacattaactaaattttaagctttcaaaatcttaggttgatagatactatcagaatcctgcggtagtgtgtagtagatactagataaaccatttattaaatttctggtttacaatttcttttcaatattccttcaaaacttgtttctcttaaaaataaattgtttaatatgcttaatgtaaaaacattatcggtctagttaaagaccaaaaaattaaagtttccacaccatgattcaatttgtagcgaaaaaagcatagtttccatgtaagaatggttaggttattaatccactataaattatttgtttgcgaatcgttttaaaacattctttctgtataattttgtaagttttataagaagcttgtgtctgcttcatattattttatatttgtttaatattttacggccattcaagttttgcagtatttttttcttggttgaattaattttgactatatagaattacatttttttgtgttttaagtaaaaaaattttatacaactatacaaaaaggaaaacaaaactggataagcattagagtgcccctccaattatgggtgtggtttagatagaataaatgcattgtttagttgttattaccaaacctgatccgtggtgatttttatatgaaacgaaataaatacatatatcgagtatagtcgttaatgatggaaaaaacgagccatgcgtgatatgatataattgggacaaattattacgtgtatgtgaatcgatatggtcaatagttctttgaatcgtaaaattaaatcaatcatgattgggtattacaatcataaaaactcttaggtttgtgtttatttgctttattcattttactttctctgctataatttatttaacactccatgttttgagccggtctgaaaagtccatgcgatatttaattttatcctagatatagtaatttactgttttgaatttcttgaccataataaatcaaatgctattaattaagataccaaccaaactctaaaatctatatcggatcgaaaccaaataaaattacaaaaatgtcaaagtccttcatgattcttacacaataaaggttagtattttttttagaggaaaatgaactacttgcagcccaattaattattatttgtataaatcatactatatttttattatacatcaatacattttctatttataaataaataatacatctgtaaaccggccagaccagattgtggaccgtgcgtgatccaattcaacacccactctgtttttaaaaaacattgttacaaaattgtttcatcccctacattttaggtgtacattccaaaaccacaaatatatttattttaaatggataattgaaatgttctgtttgattattccaagcctatatagagttaccatatgaaagaacaaaaaaaaaaatacatatacttttcttataatattgttgtaggtattaatgtatatttaatatcgatgaatgttggtgttgtgatttactgatatttttcttataatttaaaagttacaagtaaatttatcatttatgcgactccatgcatatgtcatccaatttttttgttgtttgttcataatttttttttgccttgcttctaaatgatcagtaatcagatcaaactaaaactctttaagataattagataattagttagaccgttaagattgatttggatttactagaatttcgaaattaatttattggggtaagaaagaatgaaagatcattccaaaatttaatgtagcaaaattcctaggaccggtttatacggaaggaataaagagagaacagcttcacgtttttcatcacatagtaacgtcaaattaaccagctcatttgtcgtaattaagaaacaaaattaatctaaatactttaatgaattcccattaaacaattgtttgtttagttgatgccaagccgagccacaataagccgagctaataattagtactaaaagtgcaaattaaaatagttagcacattcttttttatatataacaataaatagcacattcttagataggggatgttatgaatattcatagtccccatttccaacgtttactttgttgtactaatagattattttcacacttaaaatgtattattatattttatatccacttactatttttctttaaaagggaaagtatttaaatctcaacaatgcacaaattaaaatcataaaccatattataagaattttgactctatactatattcgaaaattaaattatttttgtatgttaaaaagaagatataatcctctctatattcaaatttatagattttagaacattaaaaacggtaataccattagtactcctatctttaatgacacatcatactcctaatctagtttgacaatttacatttcacatctaaccattaaattataaccaaaaaaagattaaaattaatattaaaatataaaaacccaaaataagagtacactgcactcacttcatttctcctaataaattaaagcccatcttaaaaaagataacgaagtagcaactttgcatcatcatcgtcatctctctctctctctctccctctcattctgaaatagatgaagtagagaagttaatgttcaccaaacttactgtaaagcctgaaactttcttccttcttcttctttgcttcattcaagtaagtctctgatttgcattctctgtttctcttttgcatatttgtcttccatggcaaatacccaataactaaagagacttctttcttctgttttctcagataatgtatgatatgtctgtgttcacagttatgtttgcttctgacttctaaatctatttctttaataatagtttttgggtttgatgttgcagattaatctttcaagaaccagcggagttgtctcagatctagtgataaaagtgagatagatttgaatttcgtcaccaattcaagaaaagatgagtaaagaagagtttatgaagatccaggtttgttcatcacttttttatatttcttacataacatgaaaaatttgctctgtttttatttactctgtttcttttgttgttgttgtgtagacttgtgttctcaaagtgaatattcattgtgatggttgtaagcagaaagtgaagaaaatcttgcagaaaattgaaggtaaaatacaaaaattttgactttaaattcaaagccaatcttatgtcatcaagctttgactaacactccaaagtctttttgatgatctttaggtgttttcacgacaaagatagacgcagagctagggaaagtgactgtatctggaaacgtcgacccatcagttcttatcaagaagctcttgaaatctggtaaacatgccgaaatctggggagctcccaagggaggatctaacaacaatcagaaccaacccaacttggccaatcagttcaaagccatgcagattgatcatggcggcaaaggcggtggcggtggtggtggaggccctgctaacaataacaaaggccaaaagatcggtggaggcggtggtggaggaggaggcggcggcggaggtggtggtggcggaccaccgaagatggttattccacagttaacaccacaacagatgcagcagttgaatcctcaacagcttcagcagctacaacaacttcagcagatgaaagggtttcaagatctgaagcttcctcctcagttaaagggtggtccaggtccgggacctggctctgttcctatgaacaagaatcctcagatgcctaataatcctaatcagaaggctgtgaagttcaatgttcctgatgatgatgatgaggaagattttagtgatgaattcgatgatgagtttgatgaagatgacgacgagtttgatgatgatttggaagatgatgagtttgacgaccacccacctccgcctaacaaaatgaagcctatgatgggtggtggtaacatgatcatgcctaataacatgatgcctaacatgatgatgcctaacgctcaacaaatgttaaacgctcataagaatggtggtggtcctggacccgccggaggtaaaattgagggtaaaggtatgccttttccggttcaaatgggcggcggtggtggaggtcccggtggtaagaagggaggtcccggtggaggcgggggtaatatggggaatcagaaccaaggaggaggaggcaagaacggtggaaaaggcggtggtggacatccgttagatggaaaaatgggcggcggaggtggcggtcccaacggtaataaaggaggtggcggagtccagatgaacggaggtcccaacggtgggaaaaagggtggtggtggaggcggcggcggaggaggaggacccatgagtggaggcctcccgccaggtttccggccaatgggaggcggtggtggtggagggggaggacctcagagcatgagtatgccaatgggcggtgcaatgggtggtccaatgggaagtctaccacaaatgggtggtggtcccggtccaatgagtaataatatgcaggcggttcaaggattacccgcaatgggtccaggaggtggtggtggcggtggcccatccgcagaagcaccaccaggatatttccaaggccaagtctccggaaacggcggaggcggacaagactcaatgccgggaaacccctacttacaacagcagcaacagcaacaacaacaacaatacttagcggcggttatgaaccagcaacgatccatgggaaacgaacggttccagccgatgatgtacgctagaccaccgccagctgtcaactatatgccaccacaaccgcaaccgcaccaacaacatccatacccgtatccatatccgtatccaccccagtatccgcctcacaatggtgaccagtattctgattacttcaatgacgagaacacatcaagctgcaatattatgtgaacaacaacaacaaaactttccatagtttgtgtccggtctgtgattatacatggaaatgttttttttttcataattattgggggttcttagaatccttttttttcctccaacggatcaaatcctaaattatattaggatttttttttataatttgtgatagttcttaagtaattttatagaatcataatatataaaatcaaacgaatattttatattcagtacttgttttttacctctgggttcttactttcttaatgagatctcagtgttcatatgttgtttatatgttccagaaaaaatgaaataaaataagccattatggaatgagttttcttttagagttttgtgactcatgttttttcttattgtaaagaatatacgaatttgcaatgaacaagtttggtagatactagatagtatataccaaaccctccagaaaaataatcggactgcgatagtgtgataatgactcttctgattcaataaaactccttttaatttaagaaaaaaaaactaattaattctttactttatttttcaaactgagcaaaaataatggaattggacttgtgtcccacccactattattttagatcattttgtccaattggttttggctttaatctttcacttttattattaggtttgaatagattttctaaaaggaaaaagattacaacgacaaaagtaaacagatcagttgtattaaaataaaaatataaataaaggagacaataagaaacgctgattgtgaggatggcaacatttgcttttcaagactacttgttaagtaaaaactttaaatgtaccaatacattttgccattttagcccccctcacatttacaagcattttatagtttacaccatgatcgattgatataagttcatcgatactatatcgcaaaggacgggtttgattttggtcgcggcacagcggtttgcaaagtagtcttattagagaggttgtttgattagtacaatttgtgtttaggccggtttaatatcttaacttgtgagtgaaaaaaaacaataggtgatcatggtatgatgatgtatgactgaatgatcaacatgatgatgaagtatgaatgggacctaaagaagtgaaattaaatgtgcttgcggcagctattagtatatcgcgtcacatagacacaggactcagcacacgtttcttcttcattcttatgattttttgtgcctttttatgtttaaataacacacaaacttatttaagaagcgctttggattcgtccagattttgcttctttcatacgtattctgctttatttttttctttctttctaaagctattttattgttttccccaaaaactcttgtacaacacaattccatatctagaacgggaaaacaaatttactcagagatcccttaattgtttatggaccaaaaaaaaagaacagagatgaaatgagaatacaagtttaaggcatcatcagaacagggctgctcgaggtccgacacttgtgtcatctctcttgtttgtttgcagttccaatgctatcctcacggcgaatttacttatttaccttactccgtaaaactgtgttacttgccacttttaccaaccaaagaatccgttacggatattgacaaatcaacccatctttttcccttgttttctctttgggtcccattgttttaattttgtcccttcatattatttcatttcattatttagttatggccaaaagcgaacaaaagtgaatttctagtgttcacatattacaaaaagaatgtttagttaacccgatctttaagaaactttaattacacttacctagtcatgggatttttacggaaacaaatattgctttaacataactttcaaaatatcacaaaatgttagaatttataataacttcaactttttgttgttcaaaggaaaaaaaaaactttaactttcaaaatatcataaaatgttagaattttgaataacttaaatttgtcacaaaaaggtagttttgcataattagcttatcaaccttttttgtcatcaattaacttattaattaagttagtggcaaaattttgataaacagagaaaatgaaaccaaagctgatctagtcagttgatgatccaataagaaagtgccaagtcatcatcattgaattattgtgagttttaacgtctgcatcacagccgtccgattgagagacctctaagatggcgccagagagagagaagctcagctgtcgaggagacgcgtgggttccacattttggctcctccctcactcactgtttttgctcgccggttacgaaaccgctcgaaccacggatgatgacgtgatgtgttggttaacgccgttaaaatgccataattgtcatgtcacatgtaaagtatcaataaagacacttagattattaaatgtgaatatatactacaataggggccacgtaatttataaagttggtatacacttcataattacaatcagagaaaagcaagaaaaagggctttataaattaacgcaaatgttccctattcgtaccatgaaaacctgcagaccaatcgaattgcgggcaatagccgattcaaatatcgttaatttcacgtaaatatagagtctattattacatagtcatttctaaccaattaaattatcagaatcctaagcgaataaaccctatagataacttgtatatatgatgtatgtattttgagataataggaaatatacatgcaataagtttttttttggtggagacattaaaaaatagggatggatgtgacagaaacagaaagagcgtgtgtgatattgagagccccgaaaagagattattggagaaggaagtgagcacatggagaggcttgtttgtgtttccgatgttgtaagaaggaatattacaaaccaacaaaagtcaaatctgtcttatttggaattcaaggatctcaatcgtttggacaacaaatcaatcgggacactcagaatatatatagaaagaaaatgagaaatatttcacttacttagaaagaaatgtttcatgacattctaaaaagattttaaatgaaacgataataacaaaacaaaaaacgatccaattcacatattcatttatacatatcgattataacataaaacaaaggtagatacgtattggatttggattcgatttgccataattatataaattgtgcgaaagttttaaaccttctttctatctcagctaacttcttctccgtgatatctactcacattcgtcaatattctcatcccaaaaatggtcagtgcatggttctgttttcataaacgcattatcacaaacgtcttcgtatcaaacctaacagataaatcaattactcactgaaaaaaaaactacatttagtgcactctccaccttctgcttttatttttcttcttctcatatttggaaaagcttttacttacttaccctcccattataaaagttattaatctgttgactttcttcggacaggaaaagaatagaggaaaattaaatgggtcacgtgaagctgatataagaagcaaagcagagaccactttgacaaacaactaagcaagtatgcaaaaagtctttgactactactaataattgaaccacacgctttcttacagtttttatagtaaactcgattaaattattttgttagtgtactacttcttgactgtttcaattaccagttttagtatctgtatagttttctctttatgctctctgctatttccacaaaaataattgctttatatagtgtttgattatgcaaatggacactgacactaaaagtctaaaagccgagtacaatttctactcccgagttttcgcttaacatggactcacaatttgtgaagtgcaaaccaatagctggaaaaaagaatctacaacggcaaggaaacaatacacgaattaatggctagtattcaattgttatgaaaacaaaagaatataattaaatcaatattatcaaaaatatatatgtttttttggtttaatgttaagagaatatatatataatatatgtgacatttatatcatttataatactgacctaaaaaattatatcatttacaatattatcatttatatatatataaaaaaatccaccaaatagaagaaaacctatgacatttataatactgacctaaatcttgtagcaggttcggtccagagtatacatgaaagaagtcatgactttctgctcgaatatatttggccaaaactttaaggagatattttttttaacatcaacttattacaggtataataataaaacaattgaaatgggcacagtttttttcattaattctacatcagaaaacgttggaccgacaatgtcatgtaatagccaaagatgtgtccacctaaaatcgatgtttgatatcgacaacaaaataataactacagaactagcactttttgtttaaagaccatttacaaacttaaatctcttttgaaaacttaggatttttaatattattcacgttcaagattcttaaaccgtttgttgctggggtttattcgactccaactaggttattttcaagtcttttgatgaaagagatagatcatcactgagtctttatcagttgttgcaaatcagataaaagcaaaaccgaatttatatagaaaaaaacacacacaaaaaaagcagaaatatgaactgatcatctagacattatataggtacaaaactgtattatagtttgttcaagctcgatctatgtcagtctcatcaattcatgttggtattgaatcaatgtgaaaatagatggactcaagattgtacttcaatatctgcatacatgtactacaagtctacaatattattactcgttaacgtgcattcgtaattgtcgactttaagcatgcatgtataagtaagagagctgaaggaatcaaagcaacaggacacgaacgggtcacgggcaaaaggaaaaattaaaatactagaaaacaatttagatagaaaatgcatggaatataataatgagaggcagtgagattttttggtgggtcaatatggcgatgtagataatgcttacttcatggcccagaatgttgcaacagcctttttctcataaaaatcataatttgatatttatatactgtaattctataaagaagcattatacaagtaaaattgtatgtaaaattaatgtatagtgcaaacattattaattatcatatgatccaaaaaaaaaggtcatcagaaaagacttgtccttgtaatgcatatgattgattcaacttagtgagtgggctttaatgggtcgaccccaatcctttcatttcctttactgcttctgttttttgttttctcatataaatatattacttttgcatacattgttacatgtatatgaattgatattgtcataatcgaaccccggacatatttctggtagcaccacgtgaaagataggataacatttattcaactaaacaaaacaggtcagaattcacttcacccaattcccctcaaatatcttgcatttttttttcattagtaattattttgtttaatattctatcaccccactcctggctcctgccttttaacttttaagccattcattatgaggagagtataacttatttataaatgtctagtttctaccaagtaaccttcaaaaacctcaaacaataaatcttcaaagccagtttatttaagtaaccattcttttataaatttattctattataaacttaaacctacatgtaattttatttaagtaactattcttttcagataaaaatacaattattccttgtctgcacggagaagcgagggaaatattgtctgtaacatattaattcttttttttttttgttatataaaaataaaatagatttgcatccactttatgaattcttgatatatattttaatattaaaatacaatttgtattccatagtatacacgaaaaattgttttttaatatgtgatgaatgacatagaatagtttcttaataatcccataaattggccaaaatgctgaaaaatggtcaactaaaattgcggtctaatcttctttaaattgaatatcctctccttttagccttttgtgtggaattagaaagaccaaagtaaaatcacatgtcggtaattcaattgcaagaatatttaaacgtacgacaaagattaaacatatacttactgtataatataatctagaaaattgtcttaagtacaggttagactcttagggtgtagggaaaattatatataaacaaaagaagaagaagaaattagtgaaggtgtttaaagtatttaaaggataaagagagttaaaagaagagttagacttgtacgagtcaaagtgaggagttcgaagtagagatggttcaagacccaacacggtctagtgtcagtaatgttcacatggcaatgtccattcaccggctgcttccggttttatcttttctccaatcttcaacggctaaacatttttcctctacccatcaaatgaccggcaaaagttaaacaaaattacgcaatttaatgtcatgtgtttggacataattgtgattgtttattttccgatgtcgtttgtgtatttcaccgttaaaattttcatgtttagaacttacaagttgacattctgtttttttctttaaactctggttttataatttgcttgatccctttttttttggtaaactgcgttatccagttttgaatattttcttgaattgcagccaaatgtttccaattgctatcaattttcgacatagagttggtttgttttcatgatgaaaataactaaataagtacaaatgaaaaaatcttgatttattcaaataagttggaattgtatcaacttcaagaatatttattttgcatttgaaacagagttattagcaaactcatatcataatgatttatcttatttgttgttgttgttgtgctactatccaaatttcaatttggtaacatgtattttactgataagaaaacaaagaagcaaatgtattttcggttcaaaattgtggtttgtattttatttacatagacttatatgtgaaactctattcaagacttttagacgaggtttatcaaatattgtacacaactaagattacctagtacttcatttcgtgctcttgaagttttgtaaataccactgtaggtgtattcgttttttttttttataaaagatgttcttcaaaatcgtaagttggtcctcgaagatgtaaaattagtcgaatccacctctagtgaagtttttatttgctgaacgtaaaagtctttttcaccgtcaatgaaatttagtggttgaacaaaattcagaataaaacactattatgatacaaatatattaaataccacacaataataatatatattgggatggttgagcacttacttaatgtattaagttgttacttcagccctataaaagagaggaattggcctaatatatgtccgaccaaacccttcaattatggtctgctacaaattattttcttaaattttgtttgctaattcccaagttcgaacccaactttatatttgactaataagattattcccttaaattttgttcttattttgttttttctataatataattcatcaccgaatagttcttcactgatttctaaggtatattgttacacattcgttttctcatggtaaaacctaaaattaaataccatacacaatctatgatcagtcgtccagtggcaatctataaatagtattttaaaatagtacaaaccataaattgcagaataaaattatctacataggaaagatttataattaattaaagataaatgtttcttataagaaaaagaaaacttgtaatagtagagaagaaaacgaatagtaaatttgtttagtagagaataaagctaatatgataaattaatgtattttaggttgtaattgtttgtttctaatttttgatagacactatcatagaatatttttcttttgtcaactagatcataacatcatgctaaataaaactcccatgtgggagatcgatcttttttctttttggaggtcgatctcttgtaggctagataacaacatatggcatattggcatgccactactacacaccccaacggcccaacccacaaaatacagctctagagaccctagtctcacccttagaacttggtggcatgtatcatccgttcaaaatttcaagatttttaggttttggactcttttaacttataaatgataatattattagggacaatgtcccacatcggaagttgagtacgattttaagtgatatatataagatataggtcttttcacctattgccaattggttttaggttggaagcccacactctaatatggtatcagagcccgatccgcacatactcaacccgatccacatcggtccggcccaatacttggcccgccgatctatgcccaaacatatcgagatcaatggctagaagagccatcatctcgaggaggcgtattagggacaatgtcccacatcggaagttgagtaggattttaaatggtatatataagatatgggcctctctacctattgccaattggttttaggttggaagcgctcactctaataaatattacctgcataaactttatatagaactgtcaaacaatataaaaaactatccagagacaagtctggccatgctagacacgttttttccatacgtgacataaaccaaccaagagccgtcacgccgtaattatcaatgtcacgtcttatccactaaataagtaaatacacaacgatcgattagtaatttctataactgaagcaacctcatcgaatcacataattttttgatatcaaactagttctatctaatcaggttaaatagccttttaaaaattcaaatttctacaaattagtgacatgaaaattttgatattatataaatactgtcgtattaagtgggtaatgagttaaaaacaaaataacatcgaataaaaccataataatacgtgtagaccattagtaattagttacactaaagattataaaaagggataagccgtaataatattatggtaaataaatcaacagattcttgatttgcttgttatgttttcagttaaaaatattctaatctacgaatgagaacggtcaaaaagggaagctaagagcatcattaatggtagtttcttaggataatcttcatatagtttttatcttatgaatattcttataattgattttgaaaattttgaaattaagaatttggttaagagattgaaattttggcaatatgcaatggtggactcttaatttggagttcttaaaaaaaaattgaaaaaaaaaattagaaacagtataattttaaaaaacttaataattattacaactcataaaatttgaaacatacataacataaaattttaaacaaatatgacaaacaattaaatttaatacttaatttatttaagaattaagattacttaaattaaaatattatatttaatacctaatttatataagaattaacctaagaatcattagatttggctcttatataagaactatgcttaacaattaattgaattataatattaaatttaagaccgattttatctaaaaactaatctaaaaaactatcaataatgatggtttaatggctatctccaaaacaacaagtactaagaaaaaaaaaccggaaaatccgaacgctccatgagccgagccgggtcctagccaatgagtgataatccggtgaaacgcatattcaaaaaccctcgatatagcaaaaagacaacggaaacaaattaacggtcaggattgtcagttcggtaaaagttatgggacccacgtatctaataggggaatctttctgatgtacggttggattttcatgctcgtgggccccacttttcctccatacctcactacaccccacgcctcattattactctctctctctttattaattagtttataatatattaactcgttttttccttacttcgggtaattaaagagaaagtacgttacgaaaccaaataaaaacaatcaattaatcagaagaaaaatctcggagaagaagagttgaaaaaattgagtgggtacatatgtttgaaaagtagtgtagtagtgtaaataggagttagaaaaagtgattggtacgaaatgttttaacttaaagaagagaagatcacagagaatctgaggactgtaattgcacaaaatcgcccccgatgactttgtatgaaaaggacacaaccatacaaagagacaggaacagcaagtggaacatgtgagtgattgcacaacttcatctaatgggtcgtttttatattgttggatggccaagtttttttctattagatacgttttagttgtgtacacactgttctttttttattggagttttaggctattgagtttgtgtactgaaatgcagactaatcatgatagatttactgtgtgtgcatgtttatttttgtaatgttgtacttgtttggaattgagtcctatatgtattggtttactaccaagtcactcaagactgaattttaccttgccgagaatgtttatagactcatagtagggctttttatagtaaacataataaggccacatcgaatcgaatattttagaaatgaaatatgaatgacgtactgtatacagtttaatagtttatgcaaattagttctggtttcattatttctggctttataattgagtgtttttacgatgtttttttttttgtcaacatgtcctaatcttttaatgatatatttttatgatgaagaattcaaatttttttatataaacctttaacacaaaaggatattggttaaaccttctattatttctggcaaacaaaaagaaaaaccttctctgtttttctaaatacgcaatcaaatgcatagtacataaatcataggattctctctataataaatagttgatttggacaacttgatttaccaattaccatgatcggaacttgactggcaatttgaaatgaaatgcgcgtatgtaagacatctgtgtgtgaatgtataacaattaggccgaaactttattcatgcatagcagatgaaataatatcattgtctggtataattgggcttggattgattttaaatttttaatgcacatatgctgcaagaaataggtaccaaccttttacaaacccattagcccattgagccaaaataatatataatgctaacgccttagttttcttcttcgtttcttcttttcttcttgacttgtttatgaacagaaagatttatatcttcacctgttttttacttcatccgaaaaaaaaaaaaaccatttggcatcttacaaacactaagataacaaaacttggaaaataatggaactgatgtgaggaactgaaatcgaatattctaatatttacaaatccaaattcttaatgaacactgcactagcatgaaagcaccagtggtctagtggtagaatagtaccctgccacggtacagacccgggttcgattcccggctggtgcatttatttttttaaatctgtaattatggattggtggcgtaataaaacaattcatgattataggttatcattttccatttgatcttttgctccacatgtaatgaaactaattcatctgttaagcgtagagatttttttaccaattcttgttgaataggcccgggaagacaagcacaagtgaagttaatggactttgtacatctaatacaagcccaaaaggaacataaaaattgggtgaaactgtgaaagtgaccaagaggtgcaacttgttgattgattcaaaattacaaatggatgatggaaaacaaataataattaatggggctgtttttcttctttctgcacttttctaaaataagattgggatgtcaaaaaaaaaaaaaaaagaatgtatacttaagagatttttcattttttctttctcttgccatatttttgcctaatataaatactgaagaattaaatgaaattagttgaatttcagcaaaacacatccgttatatcttttttttttggctttttttttggttttatgaaaaactagaaccgtcttaatcctagttaggactttttgatgatgataagactagactttaaattttgaacatcggcgataaaaaagtatttcatgtgcagagtggtactctctactcttcggatgaaaatacagtatatttaattgttttattaaattataatatactgacgaaaaaagaattataatatactgtatttattttagtaagggaaatccatatcagattttctgtcgagacactagtattaaaaagcacgtgttatatgcaatgatatctggaccaaatcagcatgctgtgatcttttccttgaactcttggaagcacacaaattcatagtacatttccatattttcgtgtaacttgtggaataattaaacaacttcgttctacattttcgtacttacacaatttagcacttacacttaactttttaatttttaataagccattcgtattttatgttttttaaaataaattattataaatataaaaaatcataagccattcgagtgttacgtcattttgtcaactattctactttaacactggttttattggtctacaaaaactagcgtacattacaaaaactagattgtttcataaatgaaagtaaattgttttgcacaaaaaaatataatattatacattgattcatttattactccaaaagttatctttactccaacaataatgaattactactttcataggttttatggtggtcactgctatatatttttgtatgactaaagcttgctcggctaatcaaacagaaattcaaaaccacctccctcatggtactgaaaagagataataccactctacgtctctatgactctatcattgtgaaaagttataaacatggtaaaccttttcttaattatggcctcaacttacatagggatgctaaaatgtatagataaagaattaaagataccttatgtgtctttatttcgaggcactagtaataaaagatacagaaaagcatgtgtttatgtatttaaattgaacacatttaatttgtatcttatccttttgtttctttaattttatttttctggtcctagtaaaaaacaagcatagtgttttatcgaaccaggttaaataccgtcggtgttcgaatgcaatatctggttatcaaacagttcaacaaattgaaaacaacacagctgcatctcgttgacattaatttattaaaaaggaaactattagtgaaacacgaacagaattgatgaaagaagaaggatggatgaagaagatgatgttgagagaaagaagatgagaggcgatgaaaatagattctgttctttacatttaatgaatgatacatgagttatatacaaagagactaatccggtacaaaccggttatgtacataaccaaactctatttacactaaccaaactctatacatctaatattccccttcaagatggagtgtatatgttaataacacccatcttgcgaatgagtctcaaaaataaagtaggatatagaggtttagttaacgcatctgccaattgatgttcagtctgcacatgaagagtcttgatctgccccattagaaccctttccctgacaagatgacaagcaaggtccaaatacttagttctctcatgaaagactgaattgttagctatatgtatagcagccgtgttgtcacagtaaagcacagaagcttctgaagcatcaatccacaaatcattcatgagctttcgaagccacaacatttccttgactgcagttgacatagctttgtactcggattctgcagatgacatggagactgtttcctgcttattggacttccatgaaaccaaagatggaccaaggaacatacagaagccagtaaccgagattcttgaatcagtacaagtcccccagtctgcatctgaaaaactcttcaacttaagatcagaattggcagaatagaacataccctgaccaatggtgcctttcaagtagtgtaacactttgtagacagctgtgaggtgtggttgtcgcggcgcagaggtgaactgacacagcttatgaactgcaaaggtgatgtctggccgagtaaaagtcagatacataagcttcccaacgagccgtctatacatctccacatctgtcaaaagatctccagtttctagattcagtttctgacttggatccatgggtatagaagatggtttacatcctagaagacctgtctcatccaaaagatctaacacatacttgcgttgacaaatagaaatgccagcagaagtccttgcaacctcaagacctaggaagtatttgagaggtcctaaatctctcagtttaaaagattctttcaaagcggctgtaaaagacgcagtggctgtagaagagctgcttgcaatgattatatcgtcaacataaaccaatatagccatgtaagtatcatctgttctcctgagaaataaagtatcatctcctgttccatttctaaaacccatagacatcaagcagtgagagagcttcaaaaaccactgtcgtgaagcttgtttcaacccgtacagagacttctgaagcttgcaaactgaatttggtggaaatggcttcccatccttatcaacataaccaggaagcaaggccatgaaaatctcttcatgaagatctccattgagaaaagcattggatatatccagttggtctaaaaaccattttctaggagctgcaacagagagtaagaacttgacagttgccatccttgccactggtgagaacgtttccacataatcaagtccttctttctgagtgtaaccctttgccactagacgagctttataacgttcaagactgccatctgcattcaacttgatagtataaatccatttacatccaaccacagtcttaccaggaggaatagcacaaacaatccaagtattagttcgctctaaagcccctatctcatcctttatagcatcacaaaattccttgactttactagcttgagtataactagttggagtaggatatttggtgagagcattaatgtatgcacaataagaagaagagagattatcagtagaaaagacctgtgatattggatgttctgtagactctttcacagattctttcactgaatagcattgatagtcttgcaaataaccaggaggtctcgaaactcgtcgccgtgatgtatcttctgtattaggtattactgactcagagttagattccccctgtctcattgtagacgaatattccccctcagttctagtccctgaagattctcctggatcagcaacacgagtacttatctgaggaaagaaccctgtgacatcaacttcgtcactagcttgggaattctgaaaaagaaatatgtcttcaaagaatttaacatttctggaaatgaacacaacattactttcaatgtccatcagtttatatcctttgtaacctgctggataacccaagaagacacaagctttagccctatcttcaaatttagttcgttgcttaggagaagtactcgcataacacaagcagccaaaagttctcaaatcagtgtactctggtgttgtattagtgagcttctcaaaaggagtcttattttccaacaatggtgatggcgtgcgattgatcaagaacacagctgtaagaatacaatccccccacagagacaacggtaggttggactgaaaaagaagagctcgtgcaacattcagtatatgctggtgtttcctctcaaccacggagttctgctctggtgtttcaggacaggagtggtaaggaatgatgcccagccgtcgataaagctcagtaaacttcaactccggagcattatctgatctcacacaacgaactcgcttatcaaactgagtctctaccatttgcagaaattctggaaacacagtcaaaacatcactcttcaatctcagcaaataaacccaggtgacacgagtatgatcatccactattgtcaagaagtatctgaatccctctactgttggctctgagaatggaccccaaacatcaatgtgtaacaagtcaaaagatgcagaacaaagattgtttctattaggatatgaaagtttcttttgtttagctctttgacaaatgtcacaatgtataactcctttattcctttgtttagaaattccaagaacatctgtaagcatatcaatccgagaaaaagaggtatgtcctaatctcttatgccaaacagcagagtctattacatcattcaaactataagaagatagttgtcttgaatctgcaggttcttcaacatccaacaagtaaagattagcaatccgtctacctcttccaatcgtcaatcccttggtaggatcctatatgaggcaagaagcaggatcaaaaataactcgagaaccaagatctgtagtcaacgagcttatactgagaagattcattctgaaatctggtatgtagagaacattcttcaaactgatagaagtgtttataatcactgttcccacaccagctaccataacaacactaccatttggaaggttaacatgctgactaacagaagcatctagatcactgaataagctcttatcatgacttacatgatgagtagcaccagaatcaattatccatgatctcttatttgtaacactctgagtaacagttaaaatcccaataaaactataggtagatggtgagaaagatataccagaagtagaagcctcatttaaaggaactgaagcaggaaactgagtagtgagatgagaactgaagtaagcaatgaagtgttgtaactgctctttactgagattcccaatcaaactatccagaccaccatcctgtttatcacctgatccaacagtagcagacacttgtgctgtgattgcaggagaagacgattgaggagtcggagaagcattgacttgttgttttctaggtttccacccaggaggatagccatgcttcttgtagcatctatccacaacatgtccagtgaaaccacaataggaacatgttggtttgtctttcttaaaagactggtaagcagcaatcaaagaaccagcagaaggcgaggatgcatcagcgttcaccactccaggatgagaccctgcaatccctacttgaaaagcagctggaacaatgctgttaccaaatttcctttgactgtcatcttgatctaagatgtgataaacttcagcaatgtcaggaagaggcttcttcatgattatctgacctctgatgatggaataggtttcattcaaaccagcaagaaatttgatgatgcgacctctatccaccttaccccgataatgccttttgctaacacagttaaaagaatgacaacataaacacgactcagtgggttcactgccatcaagttgatcccagagagttttcaaagctgtgtaatagcttgatagatccatggaaccttgacgcagatcctgaatttgctggatgggatgaaatgttctcggcaaattcgtcatgtgaaaacgatcatgtaaatcattccagatcatagtagcatcatccaagttcaaaatactaccatagatctgctttgaaacagcattcaacaaccaggacttaaccatactgttacatctagaccagatccgagagagaggagtaccttctgcaggacgaggaagagatccatcgatgaaagcgattttgttcttcgcatcaagagaaatcttcatcgcagagctccattgagtgtagtttgtaccatctagacgatcagcaaccaaagtcagacccggatgatcagcactgtgaagaaagaacggcgagtgtggactatccacggcatcgatctcagagatggagcgaatcggaacaacaggagctggatcgggcgagtttgagctcatcggagctttcaacttagtccccgagctaccagcaccaacagatctacccagacgacgagtagatttacgaaccggaactcccatatcgatctaaacaaccacacaaaacacgccaaagaaatagaatcagaggaggaaaacgaaatcggagctaagcgtatagctctgataccatattagtgaaacacgaacagaatcgatgaaggaagaaggatggatgaagaagatgatgttgagaggaagaagatgagaggcgatgaaaatagattttgttctttacatttaatgaatgatacatgagttatatacaaaaagactaatccagtacaaaccggttatgtacataaccaaactctatttacactaaccaaactctatacatctaatattttgtatataactcatgtatcattcattaaatgtaaagaatagaatctattttcatcgcctctcatcttcttcctctcaacatcatcttcttcatccatcctttttccttcatcgtttctgttcgtgtttcactaatagaaattgatgatatgtcttgataacatgaataatcgatcacatgcattagaaaggagacaacctttgcactgagcaagaagtgttgtgaagcaaaagagaagaggagaaagaaaatttggaagcttcaagatcgaactccaccaaattatcctccatctgaaatcctccgatcactatagggtacttcggcttcacacctccgtccacaaaccctaaacaaaccacatttttattcaccttcaccaaggaattagacccgtagatcctccacttagcccctccgctcagcaccaggtcgatcacgggaactccacgtcctccattggagtagaagcacgcaccgaaaggcttcaccgcgggagctttagctatcttgatgttttcggtgaaagctgtgagcagagccttgtaaagggaagtttggaatacggtgtaaggagccaaagtgctgatctttgtggctccatagggtataggaacggtctttgcaccgatttggatggacttcacatcgattaagtactcgccggacttgccattaccgatcagaggcgtggaggcaaagatcttagagacatctttatcgtaaggcagataataatattcccctttaccgatccaaaggtcaccattatgagactgacttcgttcggtggaaggcaaacaaagagctatcttatgaggaagctggtacatggagatgagctgcgagggaatcgacaagtgggtgttagcgagaccgatggttctttgttttaaggcaggagcaccgtcagtgcaagtcaaagtcaatgaagaactcatttcactgtccctagtgtaaactccattaaatgtgtataacaaggggacggtgtctcggaataggcgggaattgtcggaggagagacacacggtcctcttcttggcaatgacattgttgggacaggggaagttggggtttgcgtatttgcatcttgtggagccacatctgattgggtggtaggtggtggatttggcggcggttggacagttttgcaataacggtgcggctccgttgaggtcaaggacgaatttttcgctggaagttgagccgatggacaaagggatggtgtatatatttttggccgtgtctttataaatagggtgtagaaatgattgaaactttctcaaagagtgtgatgtgtttgcgaggtagagaaaaacaagcgagagaagtaagaagatcacacgaggagccatttgtgtgtgtgttgtttagctactttggggatgtgatatatatcatgtacatttatagaatgatgtgggtcctcttcgtttctttttgtaatttagaatttaacattttggtaagtttttttgttacttggtaattggtatgacagtcagaatcatcttaccacggggtctcattaactatctaaacaacaaatttcttctttactttttaagatatcaactagctaaattatacagtattaagagattttcttaccgactatataagtaagggaaatattttttttccgtgtcttctgtaattaagaatcttactggcaagccattactcattagccatgtgatggggatctgaaaatcctcgatatgcgtattcgtcacaatttgtttaaatggattataatatttcatatacacttaaatcccacgtgggctaaagcattgccgacactagagttttatattattacataacttttctttacgtaatctagagttttaaatttgtgatatttctgctttgggtatatggataccagctagaagcatcttacctcatgaatcatgatttactttcaaatatgtaaaatgataagattagtaccgtgctatataaatatttattaaaataacacaaatacattaaatttaatttcataaaagtgtaccataattttaattattctttctgtaatggagattttttttatgtgggatactagccagaagcatcttactacgtgatttagctttcaaatattactatgggtacgtacccgactacccgtgctacattaatgtttacaacaaattaaaaaaaaaaacattatatttatttttatataaaaaaatgtcccataattaaatttctaataccaaatcaaggagaaaatgtttggctcttttgagctgtagttagaaaaaggtaagcaaaaaaaaaaaatcaaggaaaaaataataaagatataaattaaaccaatataatgtaagccatccagttgtttaacataacttcaaaagaatttatttaagtttaaaatttgaatacttagttaataatgcagaaaaatatttgaagactggaatctcatggttgcgcgagttctacgtaggacagactgtggatctgaattactaaaattaatcgtagttattaaaaaaaaaaactaagcaaaattttatgttttataggttgagatggtttcatttttaatgtaagggggttattgcttctatgaatttagtttcatttgaaatagttcaattctacaattaatctactatgtaaaaatattgcaagtgtttgtcgccttacaatgaaaagaggaggagattggggaccaaagagtgaagtcgatctcaaaaagtagaatccattcaagaatcgtaacatatcattctgacatttcctccgcatggttcaagggaatggagacgacttctaaaccgtttctttgagtctttctttttctcgcatctagatccctcatgatccaaattggttctcaaagagttcttaccacattccatgagacacccttgtagctctttcaccagatagcatattggatcttaaataatttcaactaattagtatcaaaactactatctccattaatttctgtcggaaatcatcggagaaattaagggcatacaagtccatatttttccttctttgagactatcatgaacgtgttgttgtgacaagtatatgtcttcttctttatttactttaaaaattcctaaaaaggtgaatttgcatcaatcacttaaattcgtaattttattaccattattttctgaaataatttaacctttctatcatttgaacaattgatgctagtttttattttgtatcttttttcaatgatgcaaattaagatagattagtatcaatttaatttagttgatgtcaaataattagttatggcattacttattgtaattgacgttaaatcaaattttgtatctgttataaataagtaactcaaattaacatcatttatttttgatataatttattttatgcaatacattttttgtagtaacttttgaatttcaaatctaaattgcaatttctaataagaaatacagaatactttagataattattaatgtgcaaaatcctcagacaatattttttatcaaaacaagcgaatatcaaatttgaataaaataacatagacgatatttatgagaaacgggtgataatttcttaaaatttcgattagaacacatgtgtcgctgaaaacgtgtcatacaagaccaaaaactgtgatactatcatgagtgactgatgattctatttttgggaaggccaagtggagcagcttgtgttatggagcaagagtgactcactaaaagcgagaaccgtcccgctgaaatcgaactcgagcatatgatcttgaagctgatgtgtcccaatcaccatcaaatccttcggtgtctttccaccgtcgataaacgccaaacacatcaccgtttccttcactttcaccaccgtattcgcaccgtagaacccccactttacctcccctatcctccccggcagaccaatctctatcacgggcacgttaggccccgccgtcaaattctttccagcggtgcgtgaatcaaaacaatgtttaaacggcgccaccgatggaaccttagctattcccatagcctgtatatatagttcacaccaaaacaaacaagacagaaaagaggttatatcagcttatctatatacaacaaaaaaataacattagcaacgttataatttaaaggaacacatttctaataatcgtttaataagatattttattttaaaaatctcaaatcatggttcactccacaggaactccaataaagagataagaaattttatacatgaataatatattttgttttgaataccttagccttgagtgtaaaagactgagcaagagcattgtagatatcggtttgaagtacggtgtagtgaaccaccgtactgagtttggctccgccggttagcaaatcagggttcaacttcaaagcagttccaccaacgtagatagattttacagtgattagataatctcctgagtcagtgcctttaatgggagttaaagtccttggaatcggattatcgctactattgaatggtgggataaagtagtgaatgccggcgatatagaaatgaccggtaccggaagaaggcaagcagagagagaatttagggatgacgttaaacgctgacgtcacttgtttcgtgaacgacgaagatccgggagaaagagccagaactccgtcgactggaggaggaaggccttggagggctttctcaccggcgcatgagaatgtgaagtggcggacggagacttgagagaggaacttgccgccgtctgtggtgtagagggaagctctgtcttggacgacacggccggttacaacggggttttgtccgagtgggtttggttgcttgtaaagacaagatttgccagcgcatccattaccggggatagacttgcatgtggagctctggcaagtgactaggcggagagatgataaagatttaagtttgcggcagtcgagccacgtgaggtttgttccgaggtcgaggaggaggtttacaggagattttgcggcggatccgacgttgaaagtggtgtagaatagattggtgggttcgtgcttggtgatcggaagaaggtattgagagtttgatttcagagctatggctgcgaaaatggaaaggaagactagtaggcgcgtgaggctactacccatctctattatattcaggttataattttttttggtaaatgaaatgatgaatgtgattgtttgtgatggagatggactacgatgtatgttatttatagatgtaaaatacattttggatctaagaattaaaatggtgattagtacattttttaacacaaaagtgatggtattcttgaatgtttgagattcgcgttgagatttgttttcctaaaagttgaattacgcggaatcttaaaaaatgagagtatttttgcatgtgttacacatgacaacaattaattatatgaaaaaatgaagattagtcggtgcatctgaagtcgtataatgttatgcaaaatgaggtctgatcaagtatactcgcgtggtgggtatatgtcacaattcatattcttttcttttcaaatagttttcgagttcttctttatgcatgatcttaatccttaatatagcagcaatacatactagaaagtcttgaaagatcttataatttaaatcaaatcatttgtattttcaattttataggaatagaaacgattttcgctaaaataatccattaacgactctattttttcatcgacaaggacttaatttacaattttacataacgaatccaaacatattgggccatattgccaggcccacgtataaatgagctcaatattaatcttcataacaccacattgcttatattgcaacaattaatttttatttgaaaacaatggagaaagatgggtcggtgtatcttagtatgctagtttaagtatcatttaacattaattggtacgtaatgtatgcaaaatgagtgttgaattcttttatacctgatcataaaaagtcttgcaggatcgtaaagttcatatgctgtatgaagaaaaatgatttttcattcaaataaaccattaacggctctcgttatttcgttattaaagaccgttgatttgttttatatataacgccatgcaaaccattgggccatataagtttctgaagacgcccatatataaacgagcccaatcttaatttcataatacatgttaacatcacaaaatttacaagtaccaagccaactactccaactggcatagggtataaactttatggatattcctataaaacatcctttcacacgtgccaaaaatcatcaaatcgtctcctttttcttttgagcttttaataaaatggataaacattgaccaaaacaaaataaaaagaaaagaaaaagtccccaccaaagagcgaaacgacacaacaagtctactcagcacttaccttaaaatgaaccaatccttatcgtttcagttttttcacattcacaataaaccagcgtcggcccaccgcatcccaaaccataacgcttaatccttaaaaaccgtccagatccatttccttcctctaaaactcatcacacacacttctaatggcttcttcttcttgtttgaatctcttcttcttctcttttctctccgctctaatcatttctaaatctcagatctctgattccgttaacggggtcgttttccctgttgttaaagaccttccaaccggtcaatacctcgcacagattcgactcggtgactcaccggatccagtcaagctcgtagtcgatctggccggctcaattctctggtttgattgttcctcaagacatgtttcctcgtcaaggaacctaatatccggtagctctagcggctgcttaaaggcaaaagttggaaatgaacgagtatcatcatcatcatcatcgcgtaaagaccaaaacgccgattgcgaattacttgttaaaaacgacgcctttgggattacggcgagaggagagcttttcagtgacgtcatgtcggttggctctgttacttctccgggaaccgttgatctacttttcgcttgtactccaccgtggctgttacgtgggctcgctagtggagcccaaggagtaatgggcttaggaagggcccaaatctcactcccttcacaactcgccgcggaaactaacgaacgtcgtcggttaactgtttacctgtcgccgttgaacggtgtcgtatcaacgagttcggtggaggaggtttttggagtggctgcgtctagatcgctggtttacacgcctttgttaaccggttcgagtggcaactacgtaattaacgtgaaatcgattagagtcaacggggaaaagctctccgtggaaggtccgttggcggtggagctgagcacggtggttccttacacgattttagagagctcgatctacaaggtgttcgcggaagctt

SEQ ID NO: 1449 - DNA, 86208 bp, Arabidopsis thaliana
gggagctttagctatcttgatgttttcggtgaaagctgtgagcagagccttgtaaagggaagtttggaatacggtgtaaggagccaaagtgctgatctttgtggctccatagggtataggaacggtctttgcaccgatttggatggacttcacatcgattaagtactcgccggacttgccattaccgatcagaggcgtggaggcaaagatcttagagacatctttatcgtaaggcagataataatattcccctttaccgatccaaaggtcaccattatgagactgacttcgttcggtggaaggcaaacaaagagctatcttatgaggaagctggtacatggagatgagctgcgagggaatcgacaagtgggtgttagcgagaccgatggttctttgttttaaggcaggagcaccgtcagtgcaagtcaaagtcaatgaagaactcatttcactgtccctagtgtaaactccattaaatgtgtataacaaggggacggtgtctcggaataggcgggaattgtcggaggagagacacacggtcctcttcttggcaatgacattgttgggacaggggaagttggggtttgcgtatttgcatcttgtggagccacatctgattgggtggtaggtggtggatttggcggcggttggacagttttgcaataacggtgcggctccgttgaggtcaaggacgaatttttcgctggaagttgagccgatggacaaagggatggtgtatatatttttggccgtgtctttataaatagggtgtagaaatgattgaaactttctcaaagagtgtgatgtgtttgcgaggtagagaaaaacaagcgagagaagtaagaagatcacacgaggagccatttgtgtgtgtgttgtttagctactttggggatgtgatatatatcatgtacatttatagaatgatgtgggtcctcttcgtttctttttgtaatttagaatttaacattttggtaagtttttttgttacttggtaattggtatgacagtcagaatcatcttaccacggggtctcattaactatctaaacaacaaatttcttctttactttttaagatatcaactagctaaattatacagtattaagagattttcttaccgactatataagtaagggaaatattttttttccgtgtcttctgtaattaagaatcttactggcaagccattactcattagccatgtgatggggatctgaaaatcctcgatatgcgtattcgtcacaatttgtttaaatggattataatatttcatatacacttaaatcccacgtgggctaaagcattgccgacactagagttttatattattacataacttttctttacgtaatctagagttttaaatttgtgatatttctgctttgggtatatggataccagctagaagcatcttacctcatgaatcatgatttactttcaaatatgtaaaatgataagattagtaccgtgctatataaatatttattaaaataacacaaatacattaaatttaatttcataaaagtgtaccataattttaattattctttctgtaatggagattttttttatgtgggatactagccagaagcatcttactacgtgatttagctttcaaatattactatgggtacgtacccgactacccgtgctacattaatgtttacaacaaattaaaaaaaaaaacattatatttatttttatataaaaaaatgtcccataattaaatttctaataccaaatcaaggagaaaatgtttggctcttttgagctgtagttagaaaaaggtaagcaaaaaaaaaaaatcaaggaaaaaataataaagatataaattaaaccaatataatgtaagccatccagttgtttaacataacttcaaaagaatttatttaagtttaaaatttgaatacttagttaataatgcagaaaaatatttgaagactggaatctcatggttgcgcgagttctacgtaggacagactgtggatctgaattactaaaattaatcgtagttattaaaaaaaaaaactaagcaaaattttatgttttataggttgagatggtttcatttttaatgtaagggggttattgcttctatgaatttagtttcatttgaaatagttcaattctacaattaatctactatgtaaaaatattgcaagtgtttgtcgccttacaatgaaaagaggaggagattggggaccaaagagtgaagtcgatctcaaaaagtagaatccattcaagaatcgtaacatatcattctgacatttcctccgcatggttcaagggaatggagacgacttctaaaccgtttctttgagtctttctttttctcgcatctagatccctcatgatccaaattggttctcaaagagttcttaccacattccatgagacacccttgtagctctttcaccagatagcatattggatcttaaataatttcaactaattagtatcaaaactactatctccattaatttctgtcggaaatcatcggagaaattaagggcatacaagtccatatttttccttctttgagactatcatgaacgtgttgttgtgacaagtatatgtcttcttctttatttactttaaaaattcctaaaaaggtgaatttgcatcaatcacttaaattcgtaattttattaccattattttctgaaataatttaacctttctatcatttgaacaattgatgctagtttttattttgtatcttttttcaatgatgcaaattaagatagattagtatcaatttaatttagttgatgtcaaataattagttatggcattacttattgtaattgacgttaaatcaaattttgtatctgttataaataagtaactcaaattaacatcatttatttttgatataatttattttatgcaatacattttttgtagtaacttttgaatttcaaatctaaattgcaatttctaataagaaatacagaatactttagataattattaatgtgcaaaatcctcagacaatattttttatcaaaacaagcgaatatcaaatttgaataaaataacatagacgatatttatgagaaacgggtgataatttcttaaaatttcgattagaacacatgtgtcgctgaaaacgtgtcatacaagaccaaaaactgtgatactatcatgagtgactgatgattctatttttgggaaggccaagtggagcagcttgtgttatggagcaagagtgactcactaaaagcgagaaccgtcccgctgaaatcgaactcgagcatatgatcttgaagctgatgtgtcccaatcaccatcaaatccttcggtgtctttccaccgtcgataaacgccaaacacatcaccgtttccttcactttcaccaccgtattcgcaccgtagaacccccactttacctcccctatcctccccggcagaccaatctctatcacgggcacgttaggccccgccgtcaaattctttccagcggtgcgtgaatcaaaacaatgtttaaacggcgccaccgatggaaccttagctattcccatagcctgtatatatagttcacaccaaaacaaacaagacagaaaagaggttatatcagcttatctatatacaacaaaaaaataacattagcaacgttataatttaaaggaacacatttctaataatcgtttaataagatattttattttaaaaatctcaaatcatggttcactccacaggaactccaataaagagataagaaattttatacatgaataatatattttgttttgaataccttagccttgagtgtaaaagactgagcaagagcattgtagatatcggtttgaagtacggtgtagtgaaccaccgtactgagtttggctccgccggttagcaaatcagggttcaacttcaaagcagttccaccaacgtagatagattttacagtgattagataatctcctgagtcagtgcctttaatgggagttaaagtccttggaatcggattatcgctactattgaatggtgggataaagtagtgaatgccggcgatatagaaatgaccggtaccggaagaaggcaagcagagagagaatttagggatgacgttaaacgctgacgtcacttgtttcgtgaacgacgaagatccgggagaaagagccagaactccgtcgactggaggaggaaggccttggagggctttctcaccggcgcatgagaatgtgaagtggcggacggagacttgagagaggaacttgccgccgtctgtggtgtagagggaagctctgtcttggacgacacggccggttacaacggggttttgtccgagtgggtttggttgcttgtaaagacaagatttgccagcgcatccattaccggggatagacttgcatgtggagctctggcaagtgactaggcggagagatgataaagatttaagtttgcggcagtcgagccacgtgaggtttgttccgaggtcgaggaggaggtttacaggagattttgcggcggatccgacgttgaaagtggtgtagaatagattggtgggttcgtgcttggtgatcggaagaaggtattgagagtttgatttcagagctatggctgcgaaaatggaaaggaagactagtaggcgcgtgaggctactacccatctctattatattcaggttataattttttttggtaaatgaaatgatgaatgtgattgtttgtgatggagatggactacgatgtatgttatttatagatgtaaaatacattttggatctaagaattaaaatggtgattagtacattttttaacacaaaagtgatggtattcttgaatgtttgagattcgcgttgagatttgttttcctaaaagttgaattacgcggaatcttaaaaaatgagagtatttttgcatgtgttacacatgacaacaattaattatatgaaaaaatgaagattagtcggtgcatctgaagtcgtataatgttatgcaaaatgaggtctgatcaagtatactcgcgtggtgggtatatgtcacaattcatattcttttcttttcaaatagttttcgagttcttctttatgcatgatcttaatccttaatatagcagcaatacatactagaaagtcttgaaagatcttataatttaaatcaaatcatttgtattttcaattttataggaatagaaacgattttcgctaaaataatccattaacgactctattttttcatcgacaaggacttaatttacaattttacataacgaatccaaacatattgggccatattgccaggcccacgtataaatgagctcaatattaatcttcataacaccacattgcttatattgcaacaattaatttttatttgaaaacaatggagaaagatgggtcggtgtatcttagtatgctagtttaagtatcatttaacattaattggtacgtaatgtatgcaaaatgagtgttgaattcttttatacctgatcataaaaagtcttgcaggatcgtaaagttcatatgctgtatgaagaaaaatgatttttcattcaaataaaccattaacggctctcgttatttcgttattaaagaccgttgatttgttttatatataacgccatgcaaaccattgggccatataagtttctgaagacgcccatatataaacgagcccaatcttaatttcataatacatgttaacatcacaaaatttacaagtaccaagccaactactccaactggcatagggtataaactttatggatattcctataaaacatcctttcacacgtgccaaaaatcatcaaatcgtctcctttttcttttgagcttttaataaaatggataaacattgaccaaaacaaaataaaaagaaaagaaaaagtccccaccaaagagcgaaacgacacaacaagtctactcagcacttaccttaaaatgaaccaatccttatcgtttcagttttttcacattcacaataaaccagcgtcggcccaccgcatcccaaaccataacgcttaatccttaaaaaccgtccagatccatttccttcctctaaaactcatcacacacacttctaatggcttcttcttcttgtttgaatctcttcttcttctcttttctctccgctctaatcatttctaaatctcagatctctgattccgttaacggggtcgttttccctgttgttaaagaccttccaaccggtcaatacctcgcacagattcgactcggtgactcaccggatccagtcaagctcgtagtcgatctggccggctcaattctctggtttgattgttcctcaagacatgtttcctcgtcaaggaacctaatatccggtagctctagcggctgcttaaaggcaaaagttggaaatgaacgagtatcatcatcatcatcatcgcgtaaagaccaaaacgccgattgcgaattacttgttaaaaacgacgcctttgggattacggcgagaggagagcttttcagtgacgtcatgtcggttggctctgttacttctccgggaaccgttgatctacttttcgcttgtactccaccgtggctgttacgtgggctcgctagtggagcccaaggagtaatgggcttaggaagggcccaaatctcactcccttcacaactcgccgcggaaactaacgaacgtcgtcggttaactgtttacctgtcgccgttgaacggtgtcgtatcaacgagttcggtggaggaggtttttggagtggctgcgtctagatcgctggtttacacgcctttgttaaccggttcgagtggcaactacgtaattaacgtgaaatcgattagagtcaacggggaaaagctctccgtggaaggtccgttggcggtggagctgagcacggtggttccttacacgattttagagagctcgatctacaaggtgttcgcggaagcttacgccaaagctgcgggtgaagctacatcggtgcctcctgtcgcaccgtttgggctctgcttcactagtgacgtagattttccggcggtagatctagcgttgcagagtgagatggtgcggtggaggattcatgggaagaatctgatggtggatgttggtggtggagtccgatgctcggggattgttgacggcgggtcaagtcgagtcaacccgattgtaatgggtgggctacaattagaaggctttatattggactttgatttgggtaactcaatgatgggctttggacaaagaacacgctctgattcaacttcgttgtaatacagaaacctttgtaattgtaaccttctaattatctggtagatatcctcaattttgatctcttttgagtgtactcttttcttacaatacctgctacaagcaatcatgcatttgtacaactaatagatctaatttaagaaacagctattacttaaatgaagtaaaaatacagtgcttaaaactaaaaatcaatacaaaaaacagaaacttcactcattcatcgcatttttagttttctaacgatacatcagacctctaactgctaattaccatgcgacaactagaacatatgacaaattccaacaagtgtggacaactgtcaccgaagtaaaggaaataactgtgaccttccttgtatggagattgggacgtaaaataagaattaagaaggatgaaacaagatgcagaggcaaaggagccagcaaggaagatgaaccatacctatgtatagatatgttgcactcttccacgcccaaagcgactctaaccatgtccaaaactctcctccaagactcaaccctacgaggccttctccaagcaaccctttagagattgcaaaaaacatgaccgggaacccgattgtcagcaatacaatactgcaaaacgcacccaacaggctcttaaggcgtctggatctcaaagcgggttttataggctgagccataagacacgttggcactagtagcaacgctccaatctctgcggtggcaaaattgattatggacatgaggcataggccgatgaaggcagctgagatggtcactgatttcaagatggcccagttggttccatggagtcgagaggagaacggagagcaaccaggcattgtgacaaaggttataaggagaagcgacgaagaggtagtgccccacatgatggagcggtttgttggagaatgttggcccggtacttgacagatgaaataaggtagcagcgtgacaatgaaacccaacaagtgcaaagtaaagacctgtttcgctgcatctagccatttccaagacttgaagttttcggttgggttatgagtggaattggtaagagatttacagccatcgatgtataaagaggctgcgaccattggaagaggggcaacaagaagagcaaaggcaatcatgtagactcctacagagataaatttgcttggcgaagttaacatgtaaaggaaaaacgattgatggaacttctcaaggaggttgttcactgatcttatagttccttccagtaacctgcgtttaaagagaaagcacagagttatcatcgaacactcatacagagtcaatgagtagaaaacattaaaactcttaaattccactgtagcataaatgatatattgtagtactttagcattacaaaatgcacatacactagcagaggtaggtaaacggtataaaatgggaacgaatgaaaatataaaaacaaaaactcaccgggcacctcgtagaaagaaatcgtgttgtcttgtcttactgtcaggaggaaatctaggtgaaactttcaaagttatagcatcaacttgataatcgcggaaagctccatggggaccagttgggataccaagggcctgatgagaatgaataacaaaagaaagaaacattttctgtcagctttcaaggtctttcctagttaaaatgtatcagtgtgactgcaaccacaagatgccaagaacttaattaaggacagatcagttgtacattttacctgggagtacagtgaacttgcaagggtagcactgccttcaagatagtctgcagctgggataccaaaattccagtccggatttaacatatgcgccaatttcccaacagcttcaaatatttccccaaaaatctttagccaactagaggaaagtaaagatacaaccttctcaaccttgacataaaacccctgcctgtgcaccgctaagtaatttacaacattgatgaggtcgagatttggcatctgcccattagatgcctctgcatagatacttagtgtgtcctcaaacttttcacttctaccatcaaccttcaaaaccaaagcagcagccattgttccagctcgtctgaagttatcagctgtattttgctcgtcacacttcagaagatccgagaccttaaatgaaggtgagtggtattcagttaaccacgcagcaacaggcctatagtctccataacgagaatcagcgacaagccatattatgtctttggaaagccaggtaactctagagagcaaggaaaaaagagaactgacaattcctaaagacaaatcctcatagtctccaccatttataaaatcatagggagtaaccagcacaatagactcttttccatcaccacgaggggctcttataatccccgcaacattgaccccataagaagcacaactgacattctccagcaatgtatatgaatctggaccggagaaaaagtgcagggggtgaaattgattcccttcaggatggaacttttgataagaaacttctgcacccatatctgacatgtattttccaatgagcttttggacttcactagaaagaaaaatcacacaaatggagaaacattaagttacttgggctaggaccaaaacagaaggacaagtaaaattcttcataacgtaggagaaagctctatttcatgcgaaaactgagggaagaaaagacatacacaccctggccttcatgattcaacctaaagttctttatgtccttcaccagtttgcttccatcagaaacatctcgattagagagcatagaccgtgcagagcctgaggattagagtcaaaatagaaagtgtaaaacaccaaacaacaacgcattcaaagttggcaagccataaactcacatgactcaacagttttaaacccttctacagattccaatcgtatagaacactaattccaggttaacatgtacagtatccaaatgtggactttaattgaattctaaggtatgtaacaaaacctggcattagagcattctcggagatgtaagtgttctttgccagtagaggcaaaagcagcagcgccaaaaccccagcagcagagaaaaccacactacaaacacaatcagatcatcaatgaaccaaaagagaaagaatcaaaacatagaaactagtggagtagaagagaaaattatggttgaagatttacctgaaaacaggactgtgagcgatgaggaagattccgagccgaacgattggtctcggtttgattttaggagatccatcatcggtcttcacttcctcttcattatcccggttcaccgctgccatgattcacagatcttcgatcaatttcggcagattcgaacctacgacgaactgtgatctccgtggcttgggaattgtagacgacggtcaagtcgggtcagcccgaatagggtgggtgggcttaaatttagaaggctttgtaatggacttttatttgggtgatgggcttaaagtcagattaagatggtgcagaattttcttacataccaaatataattgttattttgattacaaaagtatatttatatttgttcttaattttaaaaataaaatggataatatcagtgttcttaatttgtatcttattttaaaatgaagaaacacttttacaattatgttattatccattgactgttatagatttttttaaatatttattattataaatgaccagtatatggtatttttgctattacatcatagcaagatgggaacatgaaatagtgggctatacagtgcagtccatattatcgcatcaaagaaaagcaaaaaagaagagaaactgccaaaagaaataatgaaaagtcatgatatgatccgaaaccaaaaaagaatatcaagaaaaaagaaaaaaaaagatatatacagctgcataggaagtgtttgtggggatgcatagagattagagatgatcgaagcttaggtgattgagatggtccaataacaaatttgttcatttgaatgatactgaagcctctagatcgaccacatatacatcatattgcttttaaaacgcgagaatatcatagttttgatatgaagaaatcatttttcaacaaacattttctagaggattctttcttagagaaatatatgaaatatagatatataacgtaactagatttttacccgcggtataccgtgaaaacaatttatttttttaaattaatatatatataaaagtttgtaaattgtatctatttataaaatgtttttattgtatagtttacaatttttattaagtaacgtcctgccaaacccgtctcgccaacccgtcctctaaaaaaaactcatttattttattaatgttgatcttatttatgatatgtttatgaattattgtctaaatattttgtaattttatagtaattaaatgctatcaaatatctatacggtttgatgattataatcatggagaaaaaatatcaaaaatgataattttgtagtaattaaatgatattaaatattttagaagttttattttagtaattaatcgtgtagttaaggtagagagattttgggaagattgttaaatgtcaaatatttaattagaagattttctttctaattatcaaaaacaattattaaatgccagtgacagccgctgtaaataaatcccaactttaaaatttatttcataaagtggctgcaaaaatgtatatataaatagttaataccattcattatgtttggataatggtatgtggcaacaaaaaaatcttctatatgtcatgttcaaatgagataattttctttgaaataatatttgtaaaagataataagcaaaacaatatcaaagtcgttttcagcttttgtagttcccactcccaggcccatggttggctttgctcggtctttctttctgttttctacgattgtattttgaataaataagtaaataatacaaactagtggctgtattttattttacaatttaataaaatgataatgacgtttataatatcaatacaaatatgccattcactgttttgctattcaatttacgttatattattgatcaatattgcgttttatttttttgtgtatatgattttaatatagtttaaattctatagaaaagtcaaaaacataatatatacatgataatcaaaatctaaaatcatccatagacgtggttcaatagctaaagcagttaagttatggtatttaatatatgcagtttaatctacagtaaccgcgaaaaaggaattttttttgttctgtttgattcgaccgataaaaacgattttacatgggtcggataaaacataaatcagttattttgtttaacaaagttttaaaaacaattttctcaaagtgtgcatgttaaaatttacatctattataaaaaaaaacataaaatcaatttattcattatcaaattgttttgaataagaaatccaattaactcaacaacctcaaactatacatttttaacatttatgttggtctaccttgtggtctctgatatttggcacgaaatagtataggtcttttttatcttatacatttctaggttgttgtcaccaaaccatttatgtattattttatggttttccctttttgtgtgtgtgtgatatttttcttaacaaatggtcgaaaatcttcagcaactcaaccatctttctgttcaaataaaggcttactttcttccttggaattcaatagtttatttaggttatgtaattcggaacaaacaatatgaacagtctaaagttggctgatatgaaatatgaagaccgtgggccaaaccccgaaacataaacaacgggcgtcgactgttcgtctagtattctttctttacatttccagttgaaaatattattacaaaaacttcaaattattgattaaattacgtaggacatggttttgaatctctagtttcacaaatgggcaaacgaaattgaataagttcttctcaaggacgaaaattttgattttaaattttttaattatgatcagcatgcagccaattattacatatagatacccaagatggcaagatccaacaatcatcgtactaattcgtttttaattatatactgatatacacagaaatatttggatcacgttgctgttgtattttatttttctaaaagaggtttattgtttatctgacaaatcttattctctggatgaagttaatttatgtaagaaaagaaagattcataaagttgatgatactacaaaccaatcgttgatgataaatgtccatttaaattaggttcaagttgctttcagatcacaatctctccctccctcctagttcattggctcataaaaaacacatatgatatttttttcaaactataataatactattttaaagcatgggataataattatacaaatagttagagagtatgcttttgttagaaaaaactagaaaaacaaatatgtatactggttttgaaacactcttaagatcgattgtcaaaaaaaaaaaaaaaacactctaagacaaatataatttctctagtaatggttggtgatttaaatgagaaaatagaaagaaagtggtgacacatccgcttgatttaattgacagatttgtttctcttttcgaaaaaaattatcaccaattaaatttttgtcaacgttttatttatgtttaaatagacagatttttttcaaagaaaatatcgatggattaagaaaaatcataacttgtataaatagatttttcaatggataaaaaaaaaatcatatttgccccaaaaagaaaaaaatcatatactgtaccctttattcacaccctacaagttatgtttcccacctgttaattacatatttagtttcagttatgattttttgctggttttcttataaagggtaaacaatcaggggcagagatacatgcatagcaagggggttaattgacccttatgaatttataaaaactatttatttatttgtatttttaaaagcaaaatttataaaaaaatagtttaaaatatgcttattgacctccataaaaattattttgaaatagattttagtcattagttaaaattgatcccaataaaataatgactagctcggccactgcaaacaatattacaatagggcgaagtaattggttaaaaagtaaatacaataagttgtagagtgttaataaactaaagttgatgttattctttctttttcatttttacgaaaagtggatgttaccttaaaaatggttacgttaaatttcaaatataaatacattttaggattcggtttaaataattataattagaataatttttcaaataaaacattttgatttttgagaattattaaaaaggaggatggataagacaagagaccacaaatggcaagattggtcccacaatgttagaatctaacgctccagaatgattccatctcttccgtgtgagacccacgtatttgtgctgcgtcactgcccatacgatgacgtatcgacgttaatttcagtgtaataagaagaagaatcaagagagaagaagattcacaaagacgaaatgacgtaaataccctccatatcatctccttcccttcctatatttaaacaccatcatacatctctctctcctttgtctcgtcttccatgtccgatatatcgttaccagagaaagagagctcagagatttagttagcttaatttttcttttcgttttgaaattaaggaagtgattgttatcaccggaggagagagagaaaatgttgggaattttcagtggagctatagtatcgccgccggaagagttagtggctgccggaagcagaactccgtcgccgaaaacaaccggatcaactttagtaaaccggttcgtcgagaaaaatccatccgctgtttctgtacaagtcggcgactatgttcagcttgcttacagccatcacaacgagagtcctctccggcctaggtaagtctcgccggcgatttttcttatgttcatatctattaaaacttggccttttacgatggtcccaaagtttctaccgtcggttcgctatgatcggacggtgatgagatcatcgtcgagcctttaaatttcgctgacaaataaaagtcaattgcatatttgcatgtatggaccatatttcatttgatttcgtccgattttcttatctaatttgttttaagaagatagggtattagtgaaaattatctaattagatactaaattttgtagataatttttctactagattccgaattacataattgtggtattcttttcttcaaagcactccacttaacttagggtgatgtatgtttgtgttatggtgtgtggacccaaacaataatttatagagtaagtccgaataaaattttctcaaatcatatatatctttttagaaatatgcatatacaaggtacatcataggtagctttattgaaatgtaccgatccaaatttgtatggataattcttattggaaattaaaaatgataaatatttatccaagtaaagttagctcattggttaaaaaggatttctttcaatcttcatggaaacaagatttgagtgagatgatgtgaataaactagagataatttacattaattgttacctagcaaactttggactgaagatccaaaatttctttgatacctcaaaatataaatttagtagttgactctgtcggtgacggtggtggcacaaggacacgtctcagaagttgtgttagtcaccaaaagattcacaagcctctcatgactcattactgaattggtcatgtacttatgtcacttagaatccgatcacaaagaaaatattagcataagaataatcaatattaaaattatacagtcaaatttataaaatataaccacaaccaatcaaacaccaagattccgtatgttggccatattaagtcccaaccaacattttttaaaacataacttcaacaatcacaacaatgaccgatcactcaatcaaacaataaatcgtggctaaatattacatttacaaatttctatatggttacaactatagggactgtatgtattttggtttttggatatgaccaaactacaaagacaactttggttggtccaccaaaccctgcaataaaatcccacgaccattaatagccttatgcacaacactctatctttagcttttacccatatcaagcataccaatacattcataattgcatgtctatttaaagatttgctgctgactgatcggtctgactattcgcatttataacttcagtcaattatttgcaatactattctctatattttgctcaagttcagttaatttggactttgttgatatacatataggcttgtcttaagatgtttttctgaaatgatacagatcatttggagctaaggatgaaatattctgcttgttccaaggctcacttgacaacctaggaagcttgaaacagcagtacgggcttgcaaaaaacgcaaacgaggttctcttggtcatcgaggcttataagactctccgtgacagagctccttacccggctaaccacgttgttgctcacctaagtggcgatttcgcctttgtggtctttgataaatcaacctccactctgtttgtagcctctgtaagttcttttaaccccctgataaacactttttaaactgtgaagtagattgaatctaatggtaacaaaaaacggtgtttgatttgctgcaggaccaagttggcaaggttccattgtattggggaataacagctgatggctatgtggcatttgctgatgatgttgacttactaaaaggtgcttgtggcaagtctcttgcgtctttccctcaaggttcgtttttcagttttgtttgttcactcctaaattcaagatttttggggcatcacccgctcaatggttttgtatgcgtgttttgcaggctgttattactcgacggcattaggtgggcttaggagcttcgagaaccctaagaacaagatcactgcagttcctgctaatgagggagaaatttggggagctaccttcaaggtgattgattcttcaaaactaaatcatattttagtatttttgtttagcaacatctaaaaagcttatataacacaaactttggtggtgggaacaggtggaaggagcaacagttcttgcagattgaaaatgaaagagaaacacaaaagaagtttcatgtctcttaaagctctcgaactgtaacagcacaaacaaaaaaaaatatgtaggaaaaacaaaaagctgttctatgagtacttgaagctatcaatggttggtgataatgtgtgtagtgttgtatctctcttatgtcttatgcttctttgtacagcacgtgtgtgtcttctggtgttattagtgtcttcttcctaataagttaatgtctctgaaacaaaaatctaccttctcttgatccttttgcctctgtttctatagtaaatctcacaatggtaatgaggaagaacaggcgatatctctgtttctatcgtaatctttacttggtaatcacagcattcaagttttattattcagaaaaaacaattgtgaggtaaatagacacaagagaacagacacttctaaagtttcccacagacaataagatgttgtagaaggcaagacaactctacttcatgtgttctgagattaagatgcagggcagatatcctccaaactgtcgaaaaaagtcgataaaacattatgattgagacgaaatgtttttgtggattctctaatgcagcagtttcagtaagaaagaaatccatacctctcccctaaacattcgataatgtcgcttgtgagagttgatctcttatgttttgtaaaggccagagatgcagcctttctgagaaggccagatgcagctatgcatcccaagatagctggattctcagagggactgaaattttgttgggtttcagagattgtcaaaaccactttgcacagtcaataattgagttagaaatgaaagtttgcgcagagccaatataggatgtatctaacctttcaggatcggatttaagctgttgtgcccatgacaaaaacactgcaacactatatgaaaccaaatccattaggcagactatcagtggctacaaaagttgaacttttaaccgtggtaacccgagcaatctaatgatactggatcaaagagtggtgagctcaccctccagagagaatatcgccttgtccaccacagcgccttggtgaaccatatatgcttactgattttactacaaaaatagagataatcacacctcacggtctcaacgtcctctaacggaaagatacaatagctaaaaagttactcacctgtctccccattgcttataagatcagatttccctttcctgagaatcgtgacaccaccaatcctgaatgacacagacgaataacattattatcaccagagtttttggttccaaatcaccagatgagcctggtgatgtgtgtgtgagatacttccatagtgccctctagatgacctatgaagtcatttttgtacttactgtttggccaaagaacgtaactgatcttcagcattttgttcatctacttcacaattcagtactttttgaaccaggcgcttatactcattcacatttggggttaagacagcaagcggatagctgtggacaagatcaatggaatttgttacaagaaacagcccgtcctgcggaatcgccatagtcagaagattatacaatcaaaacttggaaaaagacaagagcctatcaaatccttacttaatgctatgtatcattgcttaccccatctataacaaaaggaacattggactttttggcaagaagcatgataatactcacacattcctggaaatacagagtcacataactcgtaagtccaccaccaaagtaatgacaaatcaaattctgtaatgtgattaagcaagggtagatgaatctttaccaggagaaatggatctcttcccaaaccaggaccaataacaagacaatcaaatctttccatccatttaccgacttctccaagcactttatcttgaacttctcttttatcttcttcactgagttgactatatacagatatgaaaccgggtattgtaataaaaacatacggaacaaaaccacatagttagaagtagcacacactgtggaatggagtattcacctgatgctatatgattcctcaagaacagggtgaactataagctcaggactatagctctttataacaggagctgcatctttcgtgcagaatacatgagacaaatcagcaccctacagttttacagatatgaaaccactcttcacttttatgtagacagaagcagtgatggctaatagaaaacgaaactactaacgattttcaaagctgaaatggcagcgaagtatggagctcctgtgtattcacgacatcctccaatcacagctatcttccctgacacaagatcaattccaacacatgagctaaaacatcaaagtaacctgaaaaaactcaaactttaaaatcctaaagtttcgaatttgataaatttctgatgacacaattgaatagagcaagcactaaccagcttggcctttgtgtcgtttgagatcgagcgatggcgtcacggttctaagaacactctcagcgtcggcctctgatgtggaactcattgctctgatgattggtgacccacaaagcgttcgtaccaagaactcttgccttctgagcacacttgaagaagaagaaggtgaatgagaagtcaatcgtaccaagccagagatgatactgggcttcaccaacatcagattctctcgttgagggccgagaaagccaccgcttccgatacagcaccgagaagtgaactctctgtttggttaagaaggtttcgtttttatttaattattttataggaaagaggaaaaaaaaagcaaactttttcagagtcggaggtttcagacagagaggaagaagatgaagcggacggtgatggacaacgcgattcgatcatcggtggtggtgttgggatcattggcctttggttacttgtcactggagcttggttacaagcctttccttgaaaaggctgaacaatacgaaagatctcttcagtcttctcaacaacatcaacaacaaggtcttgtgttatctctctctctctcaatcgcttgctcttaattgttctgcttctgtttcatttcagaagagatagatttatgctgtgagcgattgatggattatctatttgactttggaagttaccaatgtgtctcgaccaatatcatgatgcgttagagatttttgtgaagatgctaatctggttttaccgttttagtaattcaaaacctgtctttgttcggattcaagttaaagttttcgagaattggcactagtacaatagaaagtttcaatctttttactctacagtcctgagatcttgcttcaggttccgattggttacaatgtatgattgcagaaataaatttatggagtggattggtaggaatcatttatggagaaaaatcgcataatgctagaacataaattgtgattcacgtaaatgtgtgattagtgaaaacatgagttgcagggtgctgatacgagaagatgattggccgtttagagtttctctgaactgaaaactctttctctttcagtttgttactaaatagtgtgttttcttggatcaatgagcattgagccctttatgttcttagtcattgcataatccatgatagaactttgagtgttcgctatgtttttcttactctctatcttgtggatgaacccttatgttcttagtcgttgcggaatccatagtcttaaaagttctaacttacagaactttgagtgtttattaatgttgttcttactatctgatcttgtagatgaacaagaagaagcgaggtgggacaatagcaatgtcgaggggtgggaggagaaaaggtagtcttataatcggtttcaatacagacatatcaaagtgtgtaaggaagaagaaccttatcaaaattttcttcttaatcaaccgtaagttcaatctgttaactatcaaccatggcctgtttttatcaatcactcaaaatcatatctcagtatagtaccgattgccttaatcagtttgaagttacaaaacactagtgtttaagaaccatcctttataaacaacctaaaacaatctctggtctgtaagaaaatggcttcactgatgcaaaccttgaacaatcgtgagctccattaccagatgcaaatcacaaacaaaggccattgtgactgctctctcaatcaaagttcattggctgaagttgaactgtggctggaagcacaagaggaagcaacaacgtatctgagatccatcctctcttacactgctactagtacttggttttagagtcggaccaaatcattaaacaaatttctcttgacattatttaaacaaagcgttttaacgaccttgggagtctaatatgacaattaaaggtactaatttgatcttgaccggtacgcaaccttttctcggttctcactctctgactttcattgaatcttgtccctagacaaataacatgtgatgtgttcatgctaatctccgccatggacggctttaagtcggactctcgtccttcattaatctaattactcttctttactcattagaatattcctccatctaattactcatcagtcacatatacacatttttggactaaaacgctattttcggtgcatgaaccaaacgccttaaccgttttaatgcgcactaaaaagtaactaaaagctacgccgtctttagccccactaattttgtcacgcgccatgatcgcgcgtgtgacaagtttggatctacgggacccgccacttaaaaggaccccacgattcacactctccaagtctctccctttacgaaacaagacggtcaagaaaaaagttgagactcttctcttttagattttgaaaccgaaaatcttaagctaattacacctttggatttgtatttgttcgctaatacatatactagtttgacgaatctaatataccaagtaaagctgtctctttcagcttacttttttctactcagatattaataaagttagcaacttctgaagcttcttcttaaaacctcaaagatgtcgaagaacccatctcaggaagaagatgaagccatgccaatctctgaagtagtaataaagagattcaagcgtttaaggctcgtgttcgagccatcactaggagtcttgggttttttcttggtgggtttgtgtttagtcttcagcttcttctacctcgattacagaaccgtggctaaaactaaaagtcatgacttttcggatcaatcggagagattcctttggctcaaggagctcgatgggtttgaagttaacaacaccaaagttgggtttcttgaagagagtgggaatggttgtgatttgttcaatgggaaatgggtttgggacgaatcgtatcccttgtatcagtctaaagattgtacctttattgatgaaggattcagatgcactgagtttgggagacctgatttgttctatactaagtggagatggcaacctaaccattgtgatttgcccaggtaaatgtttcattttctctctttgtttgatgttctgggattagaaatgttatgtttaggaaatattgtatggcatgagtagagtaagttaggaggaagaactttagaaccatatgtgttacttttgaattcagttacttaaagcttactcatttttgttatggaatgtatcagatttgatgctaagttgatgttggagaagctaaggaacaagcggctagtgtttgtaggagactcaattggaagaaaccaatgggagtctcttctttgtatgctagcttctgcaatcagtaacaagaatttggtttatgaagtgaacaatagacccatcacaaagcacatgggcttctttgtgttcaggtttcatgactacaattgcactgttgaatactatagagcaccgtttttggttcttcaaagccggccacctgaaggatcaccagagaaggtaaagaccactcttaagctagagacgatggaatggactgctgataagtggagagatgcggatatattagtgtttaacacgggtcattggtggaactatgagaaaactattcgcgggttagcttctttcttcttgttaacattctaaatattaatcagattggtttggttccttgactgaacttgaatttgttactgcagaggttgttactttcaagaaggagaaaaagtaagaatgagaatgaagatagagcatgcgtatagacgagctatgaagactgtaatgaaatggatacaagaagaggttgatgcaaacaagacacaggttttctttcggacatttgcccctgtgcatttcaggttggtcacacatatctccaaaacaagaatcttcgatgaatcttaaagctccttttaattgatgttttcttgtattcaggggaggagattggagaactggaggaacatgtcatatggagacactgcctgattttggagcttctctggttccagcagagacatgggatcatataaagctccttcaagatgtcttgtcttcgtctctttactactcgaacatatcagagacggttaaactgaaagtgttgaacataacagccatggctgctcaaagaaacgatggtcacccatcactgtactacctgggcttggctggtcctgcgccattccacaggcaagactgcagccattggtgtctccctggagttcctgattcgtggaatgagcttctttatgcattgtttctaaagcatgaaggctattcaagtccaagatcaaacaatagcgatacagacaactttacataacatcttttggtaaagtagatggttcttgctctctagaggctgggctcaagattttgattgagtgattaggttaattgggtggggaatatgtaattacttgttaggttaagcaacttttgttgtaaagatattagttttggatctctgttctcaagaaatattggaaatttaaaagtgttttggtatacaatgattatgtaacacttccagaactttattttgcttttgattataagaaacaaatccatatatgataataatcgaagtttggtactttgtttggtcttcaacgtgaaaaaccggcactgtgatgatgatgatgatgatggtaaggaatagaggctatgggaggacgatgatgatgaagaagaagaaaagtgccataattggcgccggcgacatgagacttcttcgactctaaaacatcttgtgtgacggttatacccttttccacgtcaactagtttggtctgcatctcatcgtgatcggtgcaaccgttgacggcgtagacgacacaacatgcgagaagcgcaacaacacaagggatggttataagaagaacataaatattttccattatgatactgtttctgtgtttttcttttggcgtctaagaaaaagtaggtctaaagaaaattagagaatgttaatacttaatagagttactaaacaaacgctagcttataattaaattcgagttttttcattaccatttttggacagtaaataagatgaaatttaattggaaatgtgtttagctaatccaaagaatcttagattggtcaaagtaatttaataatatttaaatagttttgattgcgtgattagattaatttggtagggggatacgtaaattactaattaggatgtaaagataaaatatcatcaaagatttgagtgaccacatcaagaggatgagaaggcggtgggatgatgatgataattaggacgagaggctatgggatgacgatgatgatgaagaggaagaaaagtggcataagtagaaacataagatgttgattccactacaaacaacaaagatcctcgtgttgcagcaacacaacttgttataattagttactagcttcttaattctttttctccatttgcatcctttctttggtttatttttattatttctgtgtcatatactttataaacatcgtttgcttcaattaacaaagtgattttctcattaaagtaaaatgaatcatacaatagagtatatatagtatcaagctaaaggagacttaatactataactaactcaacaacatatataactatacattatatgttaatatcccccctcaagccgaatcatctgaaggattaaagaggcttgaaaccgatagtcgactaaggagagaatagaatggaccaggatgaagaggctttgtcatgatgtctgctaattgattttctgtagctacatgtagaaccttcaagaagccattcttcacttgatctcgtgtgatgtgacaatcaatttcgacatgtttcgttctctcgtgaaatacaggattaatcgcaatataagttgcagacttattgtcacaaaacagtttagctgatgaatcaacctgtatatgaagatccttaagcatctgactcaaccatagaagttcttttgtagtcacagccatggatcgatactcagcttctgtactactgctgcttacaatgtcctgcttctttgacttccatgtaatcagtgaatgtccaagaaaaacacacataccagaagtagatcgtcttgtatcaaggcaggtaccccagtctgcatcagcgaagccatttaagcatatatctggttgagaagaataaaacaaaccctgacccggattgttcttaagatacttcagaatctgatacgctgcttgtaggtgaacatcagtgggacaagataaaaactggctcagccgattcactgcataggtgatatcaggcctagtaatgcacaaatacaataacctcccaattatctcacggtaaggccttgcattctccaaaagagtaccagtttccttggttaaagggactttaggatccacaggtacagattttggtttgcaacccaatagtcctgaatcagctagcatatccaaacaatacttcctttgactaacagagataccatctgcatttctagcaatctcaagtcctaagaagaattttgcctcacctaaatccttggttttaaagtgtttccctagaacagctttaacggatctcacagcctcatcatcattgctcactatcaaaatgtcatctacataaacaagtagagcaacaatagacgtaccagtgactttgacgaatagcatattatcagcataggactgaatgaatccatcatcaagaagaacagctgataaacatttataccactggcgtgaagcttgttttaatccataaatggatttgtgcagtctgcaaacagcattaggaggcaatggaactccatctggtggcgtgtacccctctggtaaactcatatagatctcttcctccaagtcactgtgtaaaaaagcactagagatatccatctgagaagtactccaacctttcttagctgttagatcaagcaaaagtttaacactggccaattttgccacaggagagaaagtatcaaaataatcaactccttcttgttgtataaacccctttgctactaatctggccttatatctttctatagagccatcagcattatacttaatagtaaaaactcatttgcagcctactacattcttaccctgaggtaaagaaacaacactccatgttttgttaagttccatagacccaagttccacacccatagcagcagtccatttctcagagataatagcttgcttaaaaattttcggttctgtctctatcgaaatattgcatatgaaggattgatagtctggtgaaaattggtcatatgaaagaaaagaggaaatatgataaggagtagttgtgaccttttctggtggtgatgatgtttgtatgagagcacagtgatagtcagataagtagcctggagctttagaagttcgctttggtctgactgtaggcaatgaaactgtggtcgtgtctgaagttacagcttcctgtgaatgatctgtgacactagagtgtggtgttgtgtgtaatgcaggtgtatgaatgtcagatgcatcatgatgaatgtgagatggcgaatcaatgtcaaaaggagtagaagcaggaagaacacatttatcaaatatatcagatgcagggatggaatgtgttgcagttttgaatggaaaatctttttcatggaaaatgacattcctagagacagatacaatgttcgagtctaaatgtaaaactttgtaacctttatatccagatgagtagcctaaaaagacacatttatctgctctaggactgaacttatgcctatctttctgtaaagtagacacataacacaaacaaccaaacgattttagaaaagagtaatcaggtgctttctttgttaacatctcataaggagttaaattgttcaaaacttttgatggaattctatttatcaggaagacagatgttaatatgcaatcactccaatatgctaaaggaagattagattgaaacatcaaagacctagctacattcaacaaatgctgatgtttgcgttccacaacagaattctgttgtggagtataagggcaagaaaattaatgtgtaattccagattgttcaagaatatcagtaaaagctagttctggtgcattatcagttcttattcttttcaaaatggcattatactgagtactaacatatttaagaaaaacaggaaaacattttgaaacatcacttttattccttaacatgtaaatccaggttacacgagtatgatcattaacaatggtaaggaagtatttatacccttctacagactctcgtttaaatggaccccagacatctaaatgaatcaaatcaaatggagacgaagacatgtgattatgagactcgaaacttaaccgtttttgtttagctagaggacacacaggacaatgagactcgactaaagaactattcttaggcatagaaagtgtaccagacaacaactttaacttgtcagaagatgggtgtccgaggcgctggtgccatagatgtccatctaccatcaaggatccagagaaatgaggtgcagacaatgatgaatgagtagcaggatgtggtgaatcaagctctagaatgtaaagattatgcagaagaactcctttaccaatcatcaagttctgaatagactcgtggatatagcaaaaatcaggaaagaaatgagctgatgcattactatgttttaatagactactaacaaatataagattgaatttgaatgatggaacatgtaaaacatcgtgcaatataagagatgatgataaatgtatagtgccagtgtgtgcaatttccactctagtggcattaggcaaagaaactgtaacaccagtcactgtgacaatgtcattgaatagagtcaaatcagagcaaacatgacttgttgctccagtgtcaattatccaactaccctgaggaatttggttagaaagagatgatagacactgatgttgaaatgtgagtttattattttcaaaacgtagtgaagtagatggaaaagagacactacccgaaaaagattgagaatccattacaccattctgtgtaacagacgctactaatggaataggaacttgattctctgaaagctgaacttgagaatttagctgttgtaacaatgactgcatttgttccttgttcatctggcttacatccacatttggtgctgatatagcctgttgatttccattcatcatgtttgcagcatgttgagttgtaggtctagagttagagaactgcgctcttggatctagattctgattgaaaaatggagtaaatggtcttgtaggttgattctgatatcctccattactcttaaaccctgggatataacccggagggtatccatgtttcttgaaacacttctggattacatgaccagtctgaccacagtaagtacaaactggccttggtgctcttggtatatattgattctgcattgcagcatagacattattgtcaagaggaccttgatagacattctgattctgattctgtacactaccatcatagtaactcaactgattgttatctgaagtattaaacaccacattgtcaatcttagacactggtttgatattcttctgacgctcgtcctgagtcaccatattgaacgcatcttcaatggttggaatttgcttcaacattaggatatgtctgcgagtagcttcataggattcattgagacccatcaagaacttagtgactctgcttctctgttgcaatttctcccaaagagcagctgcattacactcgcatttaccacaagtacacacaggaagttccacatgattacgatattcttcccataaggttaccaattctgtataatatgcactaacatccatagaaccttgttgtataacactcaaacgttgctcaatctcatacacccgaggagcatcatcttgtttaaatcttgacatcagattcttccaaatgccttcagcagtggaaatgaataacaagctttgtccaatcttcttggaaacagaattcatgagccatgtggctaccatatcattgcaacgggaccacgatccaaaatctttatgagtttcattgggtttaagaattgtaccatctatgaacccaagcttattgcggacattgagtgccattcgcaccgatcatcgccaagagtgaaagtcagctccagtcgtaagtcgatctgacacaagaactaagcctgcgtgatcggagttgtgaagaaagtaatggttatcgtattgatcagtagtcatcatagaatcaaagaatcgaaagaatcagagaaaacgaagaagatcttgagtagcggaagaagattcccaaagaaagtgactttgattttggcggaaatgaatgaaacaacgaatcgattttgatgagttcgttgatctgagaaatggatgaatttgtgaaagaaaatggatgtaatcgatgaagatggtgattaatcgaagatatgtgaagatcaatcggagaatttgtggaagaagatgataggatttgtgaattttcttggtcactttcccgggaaggaatgagaaaacaaagagcttatttttgctctgataccatattaacaaagtgattttctcattaaagtaaaatgaatcatacaatagagtatatatagtatcaagctaaaggagacttaatactataactaactcaacaacatatataactatacattatatgttaatagcttcggttagttgatctctttttttttttgttccaaaagctttaactttccgaaccagctgttacaaaaacaatatagaagattgttgaaatttttaggaggtgattagcataggtttttaaaattttagaaagatttaaaattctctaaagttttttttttgccaatcaagattttttggctttaaaatcttctaaagttttcacagccgttttttcagttttttttttaagtcacgtatgtgactgtaaaaccaaaatctctgtaatcaaagcttctagccttctatagtcaaagtcgttgtagccaaaacctctacaaccattaataacagtcgtttccaatcggtcccttaatatacattattcgtttgctatgtttaggcccaaccggatggtgcatactttatgaaaatgcgtttccacagtagcttcgagtacaacgtcttttacatctttttatctctgcattaatatagtcaagtggtgcgaccatattacaagaaaatcaatttttgaaaaacataatttttggtggtattactatataaagccttaaaaacttttttgagttatcaaattttctcaacttaattgaagtttgataacaaaccgaatccaatgatctctttatgtttttttaatcgactgacctagtcaacttcagtagaaatacaccgaagtattttagagtatacttctcttcgaatgaccactacattgtttgttccgagtttggaatactttccgactaatatcagagagtagtcataccgcgtgtatttctaactaccaaataaaccaattggaataactgccagacttcccaaacaaatgttgttattccattcttgaaattcttatttggatcataatgatagtttaagttctggttagttagtattgaagtttccctttacatagaaatatctttaccaataaaacttaaattttacgaaaaaactcatattcctaagctattcgaactccaaaatttatttgtgtcgttcttatttatcctaaaacaaagtcttttactcgttttgaacgtttaaaagtgacagttaacaaaaagattataatcaaaaaaatttacagctaaatctccaaccaattttacgctgtacgaatatacacgtactgaacatttgcaatggtcgtacatagtttcatattctttttataaaattacgatcaaaagaaactttaggccattgaatcgatggattgtagtcttgtagatggaatctatatctttatccctaaatatttctgaattactttaacctcttttaatcaatttaggctgtcgtgactcgtgaaagagccacttgatttcctaaacaccgtccgtattatcatgtaacaataatttgaatgactataaaataaggaaaagaaacaaaaaattgaatgacttaattgttaacttggtaaaaatataaaaggcttttggagtttagtgtgattaacaaaggaaattataaaaagaaaacttacttaagatcgaaggagcaaataaaatagaaactaggataaaaaaatgaagaacacaccaaccacgtcaaaatcctccctcttttgtaagataatcaatttgcgtgtcaatttcaaacactacgaattataaggcaaataatcgaattaaattaaatcaacagttagaaattttaacctgctagagagttcgaatctttttattctttacgaagacaacgagctccttcgacctctgcctctgttaacacagttgagtttatttttcttccatttaactctctccatcattcaacttttcattatctgttttagatatcactttactaaaaaattaatacatacctacatagctacatgcatttacgtggaagtatttttttatttttttaatgaaaatttacgtggaactgtggaagttacgtatagacatttaaaacatttaagtattctatttttttcaatattttatataattactatgcaaatgataaacctacctaatgtttgtgtctatttgtttagaatctcaacttgaatatgtgaatattttagtctgtttttaaatattttacttatgttttgcttaatttttgcttatttgatcaatttttgttcttttgattatttaaattatttcaataatcgtaacatattgctagttgtgtagtcactacattttcttttgcatccaattggtgatttagaacaaggtcaatggattagttactctattttgtttttgctttgtttcaattcaatttgaaaaatttaactaggttgtgataatgcaaaagacttcataaattctattacccaaaaattaaaaactcacatttcaacactaaaaattagggttttcaaggcatggacttatggttataggtcttatttttttttatgttcaagagttattatagatcattcatttttttaaaaaaaaaagttcaatgttttcgcctaattctctcttcatgtaggcacaaacctgtttagtggggagaggaagtactatattgtaatctctcgggggcgaacatatattaaaaattgacgataatatatattatcataatattgtggtgaaatataatggaccataaacgtgaatgaaaatctatatttttggaaatcaagtaaaccatcgccatcgtaaccactgtcttaattaaggaagagttcagtgtcgaacatgcactacacttacgtccgtcagtttaattttaaaggtgtttaaaggtgttagcaaccaaagttaaaaaccttttttggtcactctttatctctgtagatttttgttttctttttccatttcttaatatcaataattatcgtcaatattttttttttatgcttaactaaatcttctaaacttaaggtcagagagatttcctttctgtctacaattggttcgagcgattaattcccactcgtcaattgctgaagttttttttttggtgagtgtcaattgctgaagttcatggtgtcgtttctgatagtggcatttgtatcaaatcttttatcaacttttcatgtcgttttatcccaaggtcagaaaatcttttggctgactctgtaggcatatatatttggtgttaaaaaaaaaaaaaaagtcagagagaattcacatatggttttttcgacgacttgatcagcatttctttaaaacgttagcaaccggaatttaaacttttatgatgttaatcttagtgatgtctcctcttctatgatcaccaaggccttgaacggagctaccattgttgatataaaagttactgcaacaaacaacattctcgtaagtcgtaagtaatctttgatttcaaaagtttgatactttgttcacgtagtgtattcatgtgtaggttccatctggaaattacattagcagcatcattaatctttgtataactttcgatttactctgttatgcacttgcttgtaggttccatctaaggaatatatatatgtcactgaattgcaaccaataatggatgaatatagtggctgtgaatgtgttgtgatcgtggcattgtattgacttgtagagttgtgaattgaatgatttgttgacgacagaaacaaacataacaagctcatcggtccagaggtaaacaaagcttgttttggtttcttgatgttgttttatttgttgtgaatcaatcagatgtaaatcatcagcttttggtttctttttggtttaaacttcaatgttcaaatacttttgatttatgtaggtatactagttcaattcttctatgtacaattattaagaaactcacttgggactaccattggacaaagaaaaattgaaggactctaacacaaactctaaactctgaaattatcaaaatttagtattaaaaaatttaaagggccccttctaaggagtccaccattggacatctcgattagagtttttctgctggtaaggtgcgaatacgtgtcagttgggtagtggtcgcataaaaagacaaaagaaaaaatttctctctgcgtgttttctctgtcactcgtatatgtctttgtactttgttttcttcgacggcgaaagcggaatcgatttgtgtcgatcttcatcatccgacgtctccatcgtctcgatcatcaaatcggaagatacatcaacacatcaaattattctgggttcgaattttgtggattacctgttgattggattcgatctgaattggggtgatctcttaggtttgttgatttctctcgcttctagatttcattgttctgtagttacttgaaattgaattgtgaagtgatgatttctctcgcttcacgctttgctctcaatgaatgaatacgactttgagttactttggctttgaattttgtgaatggcaaaacacaatcagtatatggctttcagtttaactttgctagctttgagttagcttcattgtgaaagctttgtgttgagtaattggcaaaacagattcagtcatattacaattaaaaaattcttaaggattctttaaggatctaaccaatggggcgtagtccagattctacactaatattaaaaaaaaagatatattaatacatacctacatatctgcatgcatttacgcggaaatattttttttttgtcaagtaactttacgtggaagttacgtataaatgtaagaaaaatgttttttcagtaaaaggctagcttagtaatataaatcacatgcctcaaatacactgataattaacaaatgagtggtgcatggtacagtaacgaacgaactatgaagggttcatagttactttttttagtctatgatatagggttcaagttgatcgttatatctagctattcattattatagctcttcattggcccctacaaacacattattttagcaaaaagaaaaaaaacaaaacatgcaaatttataaatacttagtttaaattattgtttttctcctggataattgatgtattagtttaatcaagtataggtgaaaatagttgtaagaaaatatatcattgtttttcttacctctaccaaatgaatttttaccattttggaggttattaatcagcaaatcatatattaaaaaatgacgagaatacaatatcgtaatattgcggtaaaatataatggaccataaacgtgaatcgaaatctatatttttggaaatcaagtaacccatcgccatcgtaaccactgtcttaattaaggaagagttcagtgtcgaacatgcggtacacttacgtccgtcaatttaaatttttaaaggtgtttaaaatgttagcaaccaaagttagaaactttgtttggtcactctttatctccgtagatttttgttttatttttccatttcttaatatcaataattatcgttaaattttttttatgcttaactaaatcttctaaacttaaagtcagagagatttcctttctgtctacaattggtttttttttttttgataagaatgtgaatttcattagaatgaagtgttgggttttacaaaagaagaacctaaagcttgtagactttgccaaagaatgtaaaaaacaaagattacaaaagaggagttgagtgtcaatcaacccattagcggatccaaagagccattaaatcccgaaaacgttttctggactttcttgcagtaatggtattcctcacttccctgtcaatgattttgaatatagttgctggtgggattgtgatgccattgtgaatcatgttattcctctgtctccaaatttgatagatagctgcttgggcagccactttccgaagcagagaaggagaagcgtctgcttttagacctgtccaagcaataagagcagtccaagtgtagaagatacacggagttagcctcagcctagcctggatggagttccaaatatgaatgctaaaggcgcatcgcaggaggagatgatccctattctcgacgtaatcgttacatatctattaattcgagctattaattccgacacgtcaatcgctgaagttgtttttttggtgagtgtcaattgctgaagttcttgttgtcgtttctgatattggcatttggatcaaatcttttatcaacttttcatgtcgttttatcctaaggtcagcaatttttttggctgactccttagctaagcaagtcttatcgttgtatgggtcaagtttctattgagtatatatatatttgatgttaagaaaaaaaagaaaaaagtcagagagaattcacatatggttttttcgacgacttgatcagcatttcttttaaaacgttagcaaccggaatttaaacttttgttgggactctctacttctaaagacttttgtttacttatatgttaagcctatttccaccatttcgtataatatcaactattgtcgtcaataatagatagcttagatctttagaattgattagtaatataatatttttccattttattggcctgtctattatttttgtgttatgacagtttgattaatttttttttgtgtgtattaaatcataggaaaatggagagcttgacgatgctccttatcatgggacacttcatacaactgggagtttcagttattccagtttctaccatttatgtaagtaataataaactttcgcttttatttattttaatctctattttttttgttacatagacaaatgcgattctgaaaaatataatttaattgttttaatttgctatttgtctgaaaaagagtcctgacggcgatttgattgattgtatctaccggacggatcaacgagccttcgaccacccactcttacgaaaccatattattcaggtttttattaattaagataagtttcttttatatgtatacttttgacaatatgtatatttttacaaacttaatcatttattgttttaaacaatttatgcaggaatatcctaccaacatgccacaaatagaaaaaagcgtacaagaaaattggcaaatttggcacgacaccggagaaaagtgtccggcagagacgattcctatgcgtcgggaattgaatccagtttctcaccaaaagcagcatgtacatgttccaaaagagtatgaggtcgccaacagagcaacttcagggcacaaggtaattgagggtatattattattttttgtgtttttatttaggcaatattttgaaaaccacattaaaactaacatcacacatgcctttttccacttcgactacataaatgttataaaaatttatttttgaaatgttagaaagtagagttattataataatttcataatactgacatcatatgtttggtaaacagtatgcaattgcatacatgattaaccggacaaatgtgtacggaacaagggcaacgtttaatgtctggacaccaaaggtagaatcggcttacgattttagcctcgctcagatttggctggcatctgggtcatacgagactgcggatctcaatactgttgaagccggttggcaggtatgatttagacataaaaacttttgtattatttttactattatttttcaatacatttatataattagtctgcaaatatgataaacctactttaatttttgtaggtttctcggtcgaggtataatgacagccaggccagattgtttacatattggacggtaaattctccaccctatccatttgctctttagaagtattaatacgaaaacttattattatcatgaaattacgaagttgattaatcttagattgatagtataacttggccatattaaattggttcggccatagcatatattaaaaggcccagcccagtataaaccagcatattaaattatagtttgggccatagcctatattttgctttcactgttacggtaaaggttaaatcatagtgaatataatgtagtttaacagacctattattacatgtttattagactaagttatccttgcaggcggatggatataacaagaccgggtgttatggcctcgaccttcctggatttgtgcagactagcagtaccatcgccatcggagctgccattggtcgcacctcgacatatggaggcacccagtttgacatgacacttcagatctggaaggtataaaacacttatttaatttgttcttattttccatatgtttgctaacaaataactaaaaattgcaggatctgttttcaggacattggtggctggctctgggcccaaatttagtgcccattggatactggccggccgtaattttcacgaccttatccgattatgcgacggcagttgaatggggaggcgaagtattataccgaaacctgtcgagcgtgaatacggtggctcaaatgggttcaggagaatatgccgacaaaggctatgggaaagcggcatatttctgcaatctgaaggtggcagagaacaaccacacccttctcccggttcaagatttcggcgttcaagccgattatccagaatattataccgttaagaagtcatctaaccggaactgcggaaaccatttttatttcggcggaccaggacctcaacgttcagaagcagttcggggaacaacggtttttggtttttgctttttattttatttgagtgtgttttgtttttaaagttaagaaactcgtgaaagaacgtaaacctaatctttgtatttattatctttgaatccaattacaataaattagaaccctaaacacataaatatgaattttcaaaattttaatggtatgtgtgaactaagaatttgtgttaccatgttaaactatttaaatattgatgtattttttgtatatgtgttttgggctatattcaattggctgcttgtaaatccatattttgccaaagtaatctaaacaaaataatggcaaagagaaaactctaatatcactaaacatattatctatagttggccaatgtagaacttgtaaattgttttgtaagtatgactcgattgcaaagatgaagtaagtcctgttttctatcattgtatgttgaatttttttactgttaatttgttattaaattatattgttgtttcgaaaaatatctaataaattagtaccaaaataaataagtttacatataaacgatttcgaattaaatagcatgatttgttatggaaactttattaaacaatttataaaaatattgggtagtttgtttgttttttaattgtagtatttgttaatttactaaattacccatgcaaaaattcatttacttagttttaaactaccctcacaatgttgtagtttacaaaatgtttcctaattaatagtatatatatatatatatatatatatagacagaaaatgagaaaagattctcgtttgaaatactatgagatatccgtgatagacttttaagaaacttgttttgttttgattgattcaattttcttttctttataatcaaactattatttaattttatttttattttttgtttgtgaacctcattagcattataaggactaatagctgttttcagttataacaacaacaatgaataggatctttggcagtagttttgtttgcacaaactccatgccaaaatcccttttgagtacaatccacgaaacattcacgagatccgtattcgccctccacacataaatggaagcaatgatcatatgagaattttgtagtttccgcacctacacaaacccacaaaaaaaaaaattctatattaacaaaaaaacttgtatataacatatctaaacaaaaggttttgttgaaagcttttaatacatgtttatgatatatacatgtacgtacggccggtatacatgtttagttattttattcaaaattgatcaatactaataacaggcctgaaaagtcctgttatctatgctttatcttgctcggctcaaggacaacccgactaataggcctcttataagcacacaattttaaatatacctgaagttaaaatgatattgttggacaacgaaactgctaataggacaatgtgaaaaaaaatcatcaaagattttgtgatacccatgatgataaaaaatttgtataaatttaattgaaaaagatgatataatttttctggatctcttagagagactccacttatataattctcttagtcttggggaatctcatattacccaatttgtttaattttcctataaaaagttcttttccatttatgcaaaaaatattattttggtaaaaatatttattgacatttattttctattttgaagatatcgtttgactttatctataatgatttggtatgcaaatgaaagtaaactagtagtatttaaaaaagaaagaaagatatgacacttgtaagtttggtcaagagtaatttattgcatatctattctaaagtaaatttctcaagatttgttgaaatttacatatttaagatttttgagagatttgagtaagcttttagaagagttagttatttgttagagtttttatatttaaaaacaaaatatgattggtgatttgcgaagatttataataaaatttaagattaataatcttatgaagtccaaaaaaattctttaaatcacatatttttgcaacttaccatctacgtccaaaaaatgtaaaaataaactattgcatattattttgaacttcataagattattggtaaagttgcaaaaatatgtaactttaaaagttttttttgcacaaaccctttttcataactaaaaacgtataaaacatctcctagaaattagaatcagtttcattaactttttaaaatcaaaatttgtgatattttgaataacaaataatttgatatgagttttagaattgttaatatagataagtaaatatttgaactcttttacataaatttcaagttcaataacatagtaggatttgacgagagattcaaaaatcatcctttgaataacatgtaaatttaggaataatccaaaatcttctaaaaatacgatgaatacacacgtaattttggtaaagagtaattattgcatctctattcaaaagtcaactttgcaagattttttaatgatattcagtaaggtataatattttgttgatatttaataaggaaacattgattcatttcagctaatagagaaaacttttatatctaagttttattttagttataacaacaacatcgaataggatctttttcagttcggtttgcacaatctccatgccaaaatcccttttgagcacaatccacgaaacattcatttgatccgtattcgccagccacacataaatgaaagcaatgatcatatgagaattttttgatctctgcacctacacaaacccacaacaaaaaattataacaaatccaaacaatagtttttgttgaaggttttaatacatgtctatatccatgtacatacgtgcccagttgacatgatcattatcaatactatatgtttagttatttttttcaaaatcgatcaatacgaatagtaggtatataacatgcacaattttaaatatacctgaagtcaaaatgatattgttggacgataaaactgctaatatgaaaatatgaaaaaagataatcaaagttttgatacccatgatgatagttttgtataaatttaattgaaaacgatgttgtgatatttctggatctcttagagagactccacttatatattgtaattcttttagtcctggggaatctcttttcacccactttgtttaagtttcctattaaatggtctttttccatttatgctaaaaatagtatttcgggtaaaaacattattgacattttttttttttgaacatatcgtttgacttcatctatagatgatttagtttgcaaatgaaagtaaactagtactttttaaaagatctgatacttgtaaatttgttatatgttatatattttttagtttttacctttaaaaagtctcaaaatataataaatattataaaaaatcaaaaattataaatattttcaacattttatgaactttaaataattataatatctaccttttaataagtataaataattataatatttgcattttgaattttttaaaaacatttattatattttgaaactttttaaaggtaaaaaatacatagtatcatatttacaaataacaaataactcgtctgagaaaaacttaacccgacaccactacaaccatcactttgccgcttgtatggttcaccaccataacctttcgaagttgtgataaaataattaagccatcaaacagatcaaatgtttttttttggtataacgctaattattcaacagtagattaaaatgactcatcttatatattttgattaacattcgagataatctataccttaattttatagaacataatttttaacaaattaaaaaaaaaatgctcaacgacaaagaatcgattacatgttacaacttacacaacttaggttgcgcatcactaccaccagtgcaccatggctactccgctgcttttaaagctatattttaccatataaaaaaaataaatacaaattgatatacttacataaataataccaaaattgtaatgagataaataaataatactataccaaatgttttcaaacatgtaataattcagttttttttgttgtcataaattcgtcatatttttcggggcttttacaaaaataaggacattttagctcaaatatttgaaaatgggcattttcatgtgggcttatgtaaatgggcattttttttttatcactagacgattttactctgattcagcttcttcttctttttcatcgatctatttctgtttttatttccagatgcttcatagatcttcttctcatctattaactcaacaaatccaattaattacgttttaaaaaaaaaaaaatataccctaaagggatgatgtttagggaacctaagaatttcaaaatacaaatgaaatcaattttagatttggacatatattagtaggtggattttgatttcggaccgagacttgtcaccagtttatgagtcgaggaaagagctgaaggagttgcgattatggtgaattgtagagacgaaagaactggagattggtgaattgcagagaccattctcgttggggtaaattgcagaactggagattgggataaaaacatcaatgcagctgagaaaagtacctaattgtagtaccatattgaaaaatactgttttgaacaaagacacagagaaaaaaggcctgatctcgtaattgatcccatatttttcacccatatcaaaaaaatattacaaaaaatgagtctatgtaatttaacatattatgttttagacaatatgtactataataggataaataattcttttttcgtgagaatgtaaatataaatatatgaaatatgtatataattcttctttaacaaacttttttttttgttttttttgtcaaggtatagtcatggtgagccacacaacgtatgaagttgggcatatgatgagctttgtcattcttttgcttctttatgctatggttcaataccgtgccgatcggttattagccaccaacgattttcacggtcttatcttatcatccatcaacgattaattggagtggagaagttttatatagaaatctcccgggcccttaacgcgaaggaccaaattttccaaagtactatactattaataagaagtccaacaacaattgcgacaaccattttactacgggggaccagggcttcggtgttcaagagcttttcggggagcattatctggtgtaatcgaagaaaaaaaaagaagggattagtaaatgtaacactcagaaaactttatttacttttgcttatatatagatccatatataatcaactaattaataccaacctaattgaaaagaaatcgaaagttgacttgagagcttacatagcagtaacttattcaaaataaatccatcactcggttggtctcatcgtgaaaccttgggaccgtgataatgatgatgatgatgataaggatacgactgcagccgttagcagaccaagagcaattgcagccgacacaaaatatatatacgactgctataagcaactaacacaccaacggtgcttatcagagaatcaaagatagattccatcttgaatctcttgatatgtgtctgtctttcttttcttcttcgcgtctaggagagattgattgggtaaccgaattaattaattaaaaagaaatatagataaccaaacttgggacaatggaacatttgctaaaataatacaaaaaggttataagtagtcagaataatccacaaaatttcattaaaaatctaataagataagatttgctaaaacaattgtaagggactggtaacagagttaattaataagaaaatgaatataaccaaatttgggacaataattaaaacaatataatggaaaatttgctaaaattatataaaaaggtgataaatagtcagaataatccacaaattttttctaataagatagatttgctaaaacaaaccttttataaaaaaaacttttaataaatgtccaaattaaaccaaggaatataatcaagatctaataaaatattgttttgggcctagcccagtattgacccaataactataagggtcggctcaaagagagaagccaatacaagtttcggagctctgtggcagtgtatcggctttgcgtcttttgagctctctccgccgtgatcaatctccgtgaatcgccgccactctctcggtttcaatggctgatctcgatgttcctcctcaagttcctcaaagtaaaactagagaccttgacaagcttcttctccgtcatgggaatctcgttgaccccggcttcgtacccggacccggcgtaaacgccttttatccctcaattcgcttcttcggttatattccgtatcgtttttgtgggttttctgagctaagtttgtttctgtatacagctgagggatgacataagggattatgtgagaatcttggtgattggtgcgggtgggttgggttgtgagcttctcaaggatttagctctttctggttttcgtaatctcgaagtgattgatatggaccgtattgaggttactaatctcaatcgccagttcctgttcaggtttttttctccttcttttgtctctttggttttaccactataaaccctatccattatgttccctgtgtgtgtggtatgtttgtgaaattgttagctatctttgtgggaattgaaatttggttgattgttgttttaggattgaagatgtaggaaagcctaaggcagaggtagcagcaaagcgtgtaatggagagagtgagtggagtagagattgtgccgcatttttcacgtatagaagacaaagagattgagttttataacgattttaatatcattgctcttggtcttgattctatcgaagctcgcaaatacatcaatggggtagcttgtgggtttcttggtatgcaaattctttaacctttaatactttatccctcggctttttgaagttctctgtctgataatgtgcttgtgaaatgtagagtataatgaagatgatactccgaaaagagaaacgatcaagccaatggtagatgggggaactgaaggtttcaagggtcatgctagagttatcttgcctggagttacaccctgttttgagtgcactatttatcttttcccacctcaagtgaagtttccgttgtgcactcttgcagaaacccctaggaatgcagctcattgcattgaatatgctcatcttattcagtgggaaacggtatgtcaatgaattctttctgtagtctctctgaaatagactcttctttcctagtgaatacgtatttggtttattcatggtaaactcgattcttacttctgcaggttcatcgtgggaaaacctttgatcctgatgaaccagaacatatgaagtgggtttatgatgaggttagttattcttttacttgtttatgctatagttttttaatttgggtttgggtttattttatatttaccattacttcacaggctatcaggagagctgagctttttggaattccaggtgtcacatactctctcacacaagtatgtaaccgttctctcttattctttgtgttcactttcgtaaatttccagtcctcggctgaagtaccggtgactgtttaagcatggacgatgaaatccgtatgctatttgtattcatgaagaagtaatgagaggacgattgttttattgtgtagggtgtggttaaaaacataataccggcgattgcttccaccaatgcgataatatctgcagcttgtgcacttgaaaccttgaagattgtgtctgcatgcagcaaaacacttgtaaattatttgacgtatggtttatttctttctttccaccttacttactagtgttcggagtacagctagactactaaaagttaaatatatgaatttacaaataattcaatgttgcaatttggttggttttcattttcgcaaggtataacggtggagagggtctttacactgaagtgacaaagttcgagagggacaccgaatgtcttgtatgtggtccgggcattctgattgagctggacacctcagtcactttatcaaaggtccttcctctcgcattatcatctcattgtcttttttataccacgattatcttgattttcatactcacgtattgcttcattcatgctaaattatcttctctattactatctcctcgcttttccaggcttggttttagctaaatctcaatttactcgtgctttgtttgtccatgtaaatctgcgtctcaattctttaccatttatttgttcatgttttgtttttctttgtcctagttcattgagatgcttgaagatcacccgaagcttctattgtcaaaagcaagtgttaaacagggggaaaacactctctacatgcaggcacctccggttctagaagagtttcacagaccaaagctaagcaagccgctttatgacctcatgggaagagtccagaaggacactatccacgtgtttggacaaagagccctcaagaacaatgagaaagagtcgtgcacaacgaaggtaagagttgtattcaaaggagccgatggtgttgcagacatggatacagccattggagcatgaaaaccgacagagaaaccctttgattgcagcttttagatccattgagataattgggcagcttgactagtccagttcttattttttgtaccttttttgtttgtatgtcgtttaatagctgtgactgcagaattttactgcttggggaacaaaaaatgactccaaacagtgagtttatatgattattcttaatctcggattgttcttaatctcaaagatgtgtcttgagattgttttcttaacagttcatatgatcaggattctacctgcgatttcagatacaagcaactctgattatgtcctaaacgtaacatagagttaacataaaacaataatgagaaagtacatacataactaatattgtaataactttttgaatttagcattaaccaaaatgtgtttattaaaccagccgttacaaacgtcaattgcaacagtaagacaaacaatagattgtttcatccgttggtgtagtagacgccaacaccaccaaaatgaaacaaagactcttcttatattctttttaatgttggtttaaacttatcttgttatatttttgttgttgtttatcttcttctgtttgtggctatacttgcttgcacttttcttttcactagatcttagagactttaaaactagtcttttgaaacgtagtatgggtaaagagataaggtagttctacgacttctttcttcattatcaccattaaaaggtcaagagttgggaacatgcaatcagaaatcaaagaccaacaaaaatgagtaaacatcaaaagttcataaagaaaaatagtgatatgtaaaaagaaaatagataattgtttatgtataataataatatagagaccatcaagctttcacttgggaaatcgattttatgaagtaggattggtgtgtgaccctacttcactcaaacactatcctcaaaccatatcatatcaatgagttatatagattttctctctttctctctcccaaatccaaattgatcattgtccatttcctcaattgccaaccacaaactgtcttcggatgtggctgttcgaggatcttatagccataacaaagatttcccttggccctatcaaagatagttttatttttttgccatgatagtttttgcatgtaaataagtgttgttggttctctagttctcttcaattctattggtaaaagctatatcaaaagttttttggttaatatgtgacataagttatgttaaatgtaacgaaaacagagtggatatgggttgtgtgtgaactttgattctatcttttaaaaaatgtaacaactggataacatcaatgcacaacctccttctgtccttcatgttgtgttgagtggggacttagccagattagatttacaattgttaaaaaaagtctctttcttttctctggccctactctcccacccacatgctcttctctccctctctctctgagtctctatctctctctaaatgcccaatctcttgcctatttatttgactctttcaacattccctcgaactccacttgaagcaaacccaaaagaaaaacacacacaagacttggcttacaaaacaaacaagtcttcaagaaacttggaaagctaagagctatggctatggagttagagcttgatgatgatgtcttctttgcagacataagcaaacagatctctcttctcatcatggatgaagatgaacacttaaaccctgtttctctctcttcctcctcctcctctctctcattccaggtttgttcctctgtccacacacttcctctctatctctctctgtatgcctatttatctctcgacctccatgtctaacagtgtttcttgaatcttttgtggaaacagggtttgttcagaggaggttaccaaacggctccatatatgtatcaacaagaacagagcaaagggactggtgtgttcatccctaaatcgtctcagcctagaagaagacctcatcatcatcagaagcaaggtaggtatagttccttcaacgccaagcaacaacactctcttcatcaaaacagacaagagtatcagcaaaatcatgagaactcaagaagtactctcaccactcacaacaataacaacaacaagagcaacatgaacagcactagtgttcatgcttctatcccaagaagaagctacagagatgcatcatctatctacacttgattaattttaacaaatattcttctgtgtgatcaattcatataatttaaattagatgcataagatttatttgtttgtaaattcagcgaacaataaaagggttgtataaggaaggtattggagatgtgttccaacttccaagtttgttcttgcttttatgtaactctttcttgtcattttagagatgcactaactttttcctccatttgtaatcttttaaggattgaatgaaaatcaaatttgttggttgatgacaacaagattgatagaggaatgtgtaaagacaagccccatgtgagattagcaaatgttccatgtctctctctctctctccaatcaatcaatatctttgggacatcacagaagagtttgccacactgtctgaatatataaaaaaaagtcagatctaaagagggtccaaaagactgtcacaagctcacacaccttctgtcctcccactcacatgccgatccctctctctttttctttgccattattatgaaatctcctcattcttttagtatttctaattatagcaaaagtgcaaaactatatgatgacactttccattaaaatcacttatttttcataatatatcacttattcacatatattctttcttgcttaaataaatttaaagaaaaacaagaatgcaaatccataacataatcataacataagtaaagattaatcaaacttctaacaaacaaagataatataaggttaatttatacacaatcaagaatcaacaaagcatgagagcaccaaattttttattttactatccaaacttgaaagcaccaaagttcaaaatttcaaaatacatagagactataaaaataaaaataaaacagtattgatgaagattcctctacaacattttgttgtttattgctctaattattcattttgattcatacgtcatataatttatgttataaatggcggtggattcaatacgagattatttaatatttcggttatttaattaatgttaatttgtttgttatggtcttcattttcttcgatgagccaataagcaaatccgagagcttagtgtgaagtgaagaagagtttcaatggcggcaattttttctctcttccttttcttcattctcttcatcgtctctcttctcatcatcttatctttcatcgtacggccaagatccgtcacgatccccatcaagtttcgccacgtcttcatcaccggtggatcaagcggaatcggtctcgctctcgctcaccgtgccgtctccgaaggcgctaaagtctccatcctcgctcgttcaactgaaaagctcgccgaagccaaacgatccatccagctagctaccggtgtcgaggtcgccacgttctctgcggacgttcgcgattacgacgccgtttcgaaagcgattgatgaatcgggaccgatcgatgtgttgattgttaatcaaggcgtgtttattgggaaagagcttgagaaacagagtcctgaggaggttaagtttatgattgatgtgaatctgactgggagcttcaatgtgattaaggcggctttacctgctatgaaagctagggaaggtcgtggtcctgcttccatttctcttgtgtcctctcaagctggtcaggttcgtatctctatcactcttaacgccgtatcatagaatcataactcgcagattagattaagaatttaaagcagtttggtaattgttgaattgagtttgtaaaaatggaagcacttgtggaagtcgagagcactttgtgatgtatcgtgtgtttttacgttttcaggcaggtatatatggttacactgcatattcagcgagcaagtttgggcttcagggtttagcgcaagcattgcagcaagaagttatttctgatggcattcatgtgactctcttgtttcctcctgacactgatacacccgggtttgaacaaggtaaacaatgaatcttttacattttttttaagataaattttatgacaaactataccacatgaaagctaggatcgtggattgacacttaggcgcctcattatactgagcggataacgcttattaacctccagaatagttgccagttctggttcagtaagagttgtagacagactatataaaggagtaaatggtcctgagttacaaaacacattactgtataattctactatgttactgaaagcttgtatcatgaggtgaaagctagcaagaatatgttcctctaggaagagctagtgtctattgttgcatcagttaccaccagttagtatgtgaaactaaagtgatatttaaaacaaaagtggatcatgttctgcttctgcttaaattttgaatcttgtgatactattttgaagaaaatatagatggagacaacaaatgcattaattcagcaagcaatgtaaaatatatagatgtttgatgtttcagattcatggtgagaggttaattgatttttcttgtttgcgatcttattagaactgaagaagaggccagagctaacttcaatcatagccgcatcatctggctcaatgaaaaccaatgaagtagccaaaatatgttttgatggtatcaaagcaggaaaattcacagtgacatgccattttattggcttcttactatctattgctagcaccggcatgtcccctcagggatctttttggcttgcactcactgaagttatgtttggtggtctaataagactcgccagcttggttttccaatggcaatggtacaaaaccatagaaaagtggagccaaagaaataaaaaagaagtaaatagtaagttagcttaggttatcaaagtaattgtttttggtatgaaccattatctctttggaacaggtttatgattttgtagaggttgataagaaaagattcatgacatctactatgatcagtcttttgtatagtgtacactgaacaggttcatattttctagttccaacttcggattttgttgacaatttaaatagggaaaaatgttatttaatacctgaactttcaaaaagtggccaaattaaccgtgaactcttaaaataaccgttttatacctcaacaaaaagttgacttctaatttaatctataagttatcgttgacctaaccaaatcgactcaccattaacagtcatgaacaactttcctaactgcgtaactaacagctgttttcgtccttaaaccaacgataacgactgttagcccatgttttgtaatggctgttaggagcgttgttaagaagtgttaacggtgaatcgatttgccctgatcaacgataacttataggttaaattagaagtcaactttttgttaaggtataaaacggctatttcaagagttcacggttaatttgaccactttttaaaagttcaggtattaaataacatttttctcaatttaaatatcaataaatttggctcctccaataaaaaagaaagcactaaaatttgacaaagtaaaaacagagttttttatctgtaagtaagaaaaaacaaattcattatccttcgtttccgatttccacttcactccggaggtgctcaaactcaaaaatggcgtcgcagcttcttaatgttcctcatctcgctttcttccctaaaatctcatatgcttccgtcttctcaacactaaagcccagtttcttccactctacttccactagaagagctctcaaatcatcccccagttcccggattatcaacctccaagccgtcgccgaaactagctctgaaatcgaaagcaatagtgtcactgaaacaactgtgccattgactctacgtcaaatctgccaaggttttgtgcccgagcatatcttgcacaggcaagcttcgtttctctccttttatttctgtagaattttgaattttgaattttgacaagtactaaaaattcgaattttgtgaattgatgcagaatggaggagattggatttgtcttccccacggatattcaaagagaagctcttcctactttgtttacaggccgtgattgcatcctccatgctcaagtcctttttctaatccatatcttctatttttatgtctctctctttcgattatctgttttggttaaatattggtgtgttgtttggtaatcttagacaggttcaggaaagacattgacttacctcttactcatattctctcttataaaccctcaacgatcttctgtgcaagctgttattgttgttcccactcgagagctcggtatgcaagtaagtgtagcaggcattgcttttgattattattgacttgatcatacttgaaattgttggctctttgggtttaggttacaaaagttgctcgaatgttggctgcaaaatcggagattgatgtgaaaggatgtactgtgatggctctcttagatggagggacgctaagaaggcacaaaagctggctaaaggttggattttgatagttcggtttcttattaagttagatagattaggttgtgacttagtcagcaagtttaacttttctttcaggctgagccaccagcaattttggttgctacggtagcaagtttgtgtcacatgctagaaaagcacatatttagaattgactcggtgagagttcttgttgtagatgaggtaaaaactttctcaactatgtattgtacttttcagcttattctccttgggaaatgattgaggctgttctggatattgaacatcattctcggaacattttctcacccaggaatatatttgaatggtcactttgataggttgatttcttattctactcatcaaagcaagttggttctgtgcggaagcttttgacatcattttcttcatgcgataaacgtcagacagtttttgcaagtgcttctattccccagcataaacattttgtgcatgactgtatacaacaaaagtggacaaaggttagcttatgaatgattcttttgctgtcaactatgttcgggatttggtctatataacaaaattacaattctgaaccaaatgattttcaagtcaattgtccctttttatatatttctgcagagggatgttgtccatgttcatgttagcgcaatcatgcccatgccgttgtgccttcttcacagatttgttgtaagacataacttgttccacttatttttccattatatgcatctgttagtacatctaatctctactttggcagatgtgtgagaagacaaacaagcatcaagtactacttgccttgttagagtctgatgcacctgaatcagctatcatttttgtcggcgagcaggtattggaaacctctatttccctttttacttcagttaatctaaccatttaacactattttctgattcttcttttcagtctgagaagtcaaaaaaggctggaaatgatccatctacaactctactaatggaattcctaaaaacttcatataaaggctcgctggagatcctcctactagagggggatatgaatttcaattcacgagcagcttcactaacagtacgtggttttattgtttgcggataattatcctagatgcttactttttgttactaaccttcatgatttgccataggaaatcaggcaaggaggagggtttcttcttgtttctactgatattgcagcaagagggattgatctaccagaaacaactcatatttttaactttgatctcccacaaacggttacagattatctgcaccgagctggaagagctggtcgaaaacccttttctgacaggaagtgcattgtcgctaatctgatcacctcggaggaaagatttgtcttgcaaagatacgaaaatgaacttatgttcagctgcgaggaaatgatgttgtaggtacagtcttaactatctcagtataaaaattttgcattattgcctttgttttctccttttttttttccgtgactaccattactggtgagtccagacaccacagcctaatgtaactagttaagtacatgggaagagtatatgtgaagtgtcatcactatcaaataaatttctttgtaatttattgttgacttttatgctctgcattttttagttctcagttcttacaattagatcttaaaagtatcatatcacaactccatctttaattactgagttcttcaagattacagtaatgccagatctgatgtaaaatccatcggatgacctatctgcttcttgtattccctgcaaatcatcacattagtggaaatgagataagcaaaagaagaattgtatgtctgatgggtccatttttttttcttaaacaaaagaaattttttacctccgagtttgcgatgattacattctttccaactctagcattcttgtctattatgcattctctgtagggaaaagaagaaggtaggaagaaatgaaggaaggaatgaggaaacttcacaaatgagaactgtttctaaggtaaaccatgtgaagttgatagttagtcttactgaatttttgtgttctctcctattccaatgggaacgtttccctcagcaagtagtgctgcaacttctgcttcagtttcgtagtaatctgccccaagcatcacagtgtcctagaatttccataattttagatcatcatacagtcttagagtctagtcctttcattatgatttagaaagatactcgttttgcctaccttcaactgaacattactgcctactcttgatctaattcccacaatgctatgctcaatcaagcagttggttaagaagcttccatgagaaatgattgaatcgatgagcttcacatgtaataaacttaagagttaatcctgaagaaaatggaccaacaccaaaatacatagaactaaaaggaaatatcatggctggttttacttaccttagagttgtctatttttgatggtggcaggtttctccttgatgtatatattggttttgccgcgtcgtagaaactaaatgccccaggctaaaaggtgtagacgtaagttatatttaatataacaactatatatgattgtgaacaatatcttggaaaagaaagttgtctgggagaatatttgtctttacatgctcagtgagtgcaagattcgcctcgaagaaagatcttattgttcctatatcttcccagtagtcattaaagagataagcctgctcaaaaaatcttgttatcccttgatataacgttagtcattggacttaaatgtgtgcttaatatgaatgttactgacattcacatagaattctttagctgagaagggtataatctctgaaccaaagtcgtttgctgtggggaaacgccatctgatttcaaaaacagttgcaagatatttgttctgcattgttcttagaatgcagtaacagaatatacagtagaactaacggtgttacctcaagagatttaacagtatttcttttttgaaaacataaactcccattgaagctatgtatggtttcttttcagcttcctccttggaaagtcctaaaatagttgtgtctactgcctaaggatgccccgaggttaaaacaatcttcaggttttgttccgagatgctattattgttcaaaaatgattttccgaagttttaaacataccattgctttcaggtcgtctcctttaggtttttcactgaatgagataactcttcctttgtcatctatcttcataagcccaaaatctgaggcacgtctaccatgtaaatagaaagagactataagaaatcatgatctttgattcagtatgataagttggggtaaaaatgaaaggatctatatactcttttgcattcacctgtcatctattggtatgcaggaaatgcttatatccgcgccactctgccgatgatcctgcagattgaagttcatggcatgagtctcggagagtaactacctcttgatgaaggacatgagctcaagtaattttgtctcacctgtataaaatccatgtaatccatcctgtagaggtgatctccagaaaggatcaatacatcctctatgtccttgcttcttgcatcctatgaaaagaatgttggaccgcttgtctattgatgtgatgataagctagtttaagtctgatttctacctcgaaaagccaatggaattgccgaaccgcatctgctgtaccttggaaccaccttttaccagattctcctggcgtttgagtggccgcaagaacctgaattttttcaaacaattgcctcagatgcatcaaaccagtttggctcgtaatggatgattaagacagaatatcaaacctcaacatagccatctccaaagccaagtccattggagttgtaagcacgggctaaatgcctgttcaatgatgctgagttatattgtgtgagtatgtagactttgttgattccgctgttaatacaattgctcattggtacatctatcaacctataggctcccccgataggaacctgcaatacatgcacagtaccgattaattatactttctgctgcaggttattcagcaatattggaaattttgcaacagagaagcaactaacggcaggcttggcgcggcgttttgtgagaggaaagagtcgagttcctgctccacctccaagaataatggaagcaactgtccttggatcccttttctcagtctcaagttcttgtacctggaggtggttgacataaacaaattaatgcagtgcagggcacttttgattagcttgaagaatcgaagaataagaagcagaaccagaaaaggttgaaacttgttaccttactctccccagctacactatttagagacattaaaattctcttctgagagaagttagtagaagatcgaagacgaatgtttggaagctgagacaagttgagcttcttccccatgagctcaccattgcagaagctgccaagcttaatgtgcctagtcaatcccgtggagctactacgtatgcagctaggggcagagagggagattctgcagtcagcagagaccaccattttcgcaggaaagattgtctcttgaagggtttgaagagaggggaagataaaagagaagagaagagagttgcatggaattgcattttagttgattttttggaaggatttggtccaccctatcttcatcaagtcacatacaccaccagtttttttattttgtattcagattttaagacattgctcttttgtcttgacctgtcttgcaaatggcatattctactggaaacttatgtcaagcaaattcaaaattgaaagagaaattgatttcttagaatatactttcgccattttagtttcctatctccatgcaaatataatcaatggagatggtgtaagaaaagaaaaaattcaagtttttttgctgaatcaattttgtatttctaaaaaatatataatctttttttttcactggaattttattaatcaaaccaaacatgtttacaaagcctgataaaccagaaacttagccaaagactttaacaggaaacagatcccgattttaacggaaagcaaagtcggcaaacaacaagatttccccggaaacaaaagttcaaacgaaggagacatagtcctaaggtaatgggaaaaataaatactcaaagaaaaattattgttaaattcaactaataatggtctatccataatttcccacttaaatatcatcaaaaaaacgagttcgttgaatgagttagttgttgttgactttttgtctgcagccatcaaatcgagccgataggaactacaccgaagcaacgactttttgaagtgtgaaagcgaagggaccaacttctcataaataagtgaagattcatcgccaaaaatcaacaaaccttaagcaaaaaaaaaaaacctctgcatcaatggcgatttccaaactccatctactctgtcttctctcagtctttctctcccttcatcgtcttgttctttccggcaccggtaactctctcatttccgtcaagatcttcttggttttgatcgttgtttactaaatctacacttccgattgctattcagtggtttgcttatccgtttttgtgtgtgtgttttgtttttttatgataaccatagatggagaagatgaccttcttcttacagtattcaacaaatacagaacaggactaaacctaaaaaccttaacaaagaacgaaaacgcagaatgtctcgcagacgaagtcgtagaccaactaaagaaccaaccctgcacaaacactaataactcagctccagtccctggaaataacctcctcgctaaatgcagtctcaacacaaccgtagtcagagacggtgtgatcatgcaagtctgttttcctaagcatgataagaaccctgacttgagcaatttcaacagtgtcgtactcaagaacttgaatgattctaagatcactggaattggtattggttctggtgatatttgggttgttgtcatcctcactacaaacacaccggaaggcggctattctcttttaacaactactaactcaggagcttatgcattcggagttaatggccttgtttcttcaagtttcttgtttcttctcttttgtttcttcatgttttgagtcccttttttggtgttttttatgtcacctcgttgtctttggttcttgaatatgttgtgattatggtgagcaaatcgcctttcttaaagtttcctcttactaattgtgattgagtaaatacgaaaaatccttttataagccccaaaatcaaatcccatacaaacaggaatgaacgtaactaagaatatggagcctagctagcagctatatatgcctaatcaagtcccgtggagccacgcagcacggggcagagagggagattctgcagtcagcagaagccaccattttcgcaagataagataagagagtttccatggagttgcattttagttgattcttggaaggatcatttgttctaccctatcttcatcaagtcatacaacatcagtttttgttttgtattcagattttaagacgttcctctattgtctatttgtcttgatctgtcttgcaatggcatattctgctggaggaaacctatgtcaaggaaagatacacaaaatttgccggatgaaatagtgttaacaatatttttcttagagcatactcattgctgaactatttttttgaatgtttcaaaaccaaaatattaaatattttaatatcaaaaacaaactaactattaaaaagaagacatacggagaaaagagtctttaaacaaacgttacaaggtcttaaatgtctctaggaagacacatatctcatatcgattctttaaattcttttatttttatgaccaatggggatggtcttaggaatataatatcgcaatgttgaccaataaccaataatattaatgtaatttcgcaatatagtctattatttttatttttatcttatattttattttatttttttggtcaaatttagtctcctatcttatgtcatgcaaataatggagatgatgatgtaagataagaaagaaaattcaagtttttgctgaatttattagtatttttgaaaaaataaataaactaagaataaatgtttggtggattcaactaattgtatatttattccaatgttcaaaaaatcgttaggcggtaactaggtgttcgatagagacttagcacccagagcgagtaatcggagtctaggcgatagcacattatttcttacttttaaatatttttttacaattttctatcaaaacattggttataaaatatgaaattttaaaaatgttatctatttaaaacttattatattttcacacttttatatataaaaataaaataatttagtcttaaaactaaaaaagttgagaataattaattcataatttagaattttagtacttaaatattttgtttatcttactttgatttaagtatttcacttattcaagatgatgttatatcgaaaagaaaaaaaaaaacaaatcaggcactaaatcggtcaatttgactgatttaaccgattaatactaattttgaacgcctaaaccagtaaaccaatgtttatttaccatctaaataaattttttaaacattgatttattatgtgagagagaaaaaaaacaaactgatagaaccttttttttttttgaacaaacttgtagtcttgtagaactcaatatcaagtattaaatggccataatttcgctcttaaatttgaatgaaggaaagaaacttcctacttggtgaaaaaaaaacaaaaggaaagaaataccccactaaaacgagtaacgacatcttaatggggtcgttatttttgtctacgcggcatcaaatcgagtggacaataagaactaaaccgaagcaacgactttgaatagtcaagcgaaaaggagccaaattctctaataaataagtgaagattcatcgccaagtatcatcagcaaacctaaagctaaaagtgcctctgcatcaatggcgatttccaagctccatctagtactctttcttctctcagtctttctctctcttcatcgtcctgttctttccaacaccggtaaactctctcattccgaccaagatcttctagatttttcaatttaggtttcttgatctagttctagtctgaaaatcgtcaaatcttgtttcattcaagcctagatcttgatcaatggcgattacgttgttaactaaactatactttcggtgttctgtttttgatatccacagatggagaaaaccttctatttacagtattcaaccaatacagagaatcagtaaacctcacaaacctaaaaaagaacaaaaacgcagaatgtctagcagacgaagtcgtagaccaattacagaaccaaccctgcacaaacaccactggctcagcttcagtccctggaacagatcctggaatcccaaatttccctaacctcctcgctaaatgccgcctcaacacaaacgtaaccagagacggtttgatattgcaagtttgtgctcctaagcatcattcgacccctgacttgagcagtttcgccaatgtcttaacaaagaacctgaatgattctaagttcactggagctggagttggtattgattctgatggtatttggcttgttaccgtcctcactacaaacacaccagggggtagctattctaactcaggagcttttgcattcggagttaatggccttgtttcttcaagtttgatgtttcttcatgttttgagtcacaactcgttgtctttgttttcttaatatgacgtgattatggtgaaatttttaataaattcgtgtggcaatcaattaaagagagaataacaatatattaattggagcaaatcgcctttcttataaagtttcctcttaccaagtgtgtgtgagttgagtaaataagaaaacccttttataagcccgcaaaacccatacaaacaggaatgaaccgccaatgtccctaagaatatggactcctagcagctaaacgtgcctagtcaagccccgtggagccgcgtaggcagagagggggagataaaagagaagaggagagtgttgcatggaattacattttagttgatttttggaaggatttggtccaccctgtcttcatcaagtcacatacaccaccagttatcattttgtattcataattttaagaaattgatcttttgtcttgatctgtcttgcaatgacatatcctactggagacttgtatcaggaaaattcaaaattgccggagaaaatagtgttaagctttttttatttatgatatatagatatactttcccaatttagaatcttcttgtcgtctcatgccatgcaagtataattgatgaatatggtgtaagaaaaaaaagagttaaaacttaaaagtctttgctgaatttatttgtatttctgaaaaaataaataaacgaggaataaatgttttgtatatggttgtgaaaaaaaaatgtggtaaaacttctatccatatattcatatcaatatcaagtataaatggtcataattacacacttaaatttaaatgaagaaaaatatatccaattaaaacgaccgcgtttggtaagttagttaattgtctacgtgtatcaaaacgagtggacaagaactaactaaagaagaaaaagaaaaaaacaaagcaaacgactttgaagagtcaaggcgaaacaactaaaaaatctcataaataatagagagaaaagattcatcatcaccaaaagatcataaaagaagtaaagaagaagaacttctctgcatcaatggcgatctccaagctccatctactcttccttctctcagtctttctctcccttcatcctcttgttctttccgacaccgccggtaattaactctctcatttcccgtcaatgtcttcttggttattcaatttaggttcttgaactctatcgatcgtaatttgtttacctagatctggtctgaaatcgttgaatcttcttaattcaagcttagttcggttcttgatttgtgtgtcattgtgtgttctgttctgtttcgaatctttttgaatcggatcttgatttttgtgtgtgttctgttttctttttgatatacacagatgaagaagatgttcttcttacaggcatcaacagttacagagcatcactaaacctaacaaccttaatacacaaccacaacgcagaatgtctagcagacgaaatcgcagaccaattcaagaaccaaccttgcacaaacaccactggctcagcctctgtccctggaaccacacctggattcccaaacttgcctaacctcctctcaaaatgccgcctcaaccctaccgtaactagagacggtgcgattttgccagcttgtgttcccaaccttgatcctagccttgtcttgaccaatttcacaatgtcacagtactccaaggacctgaatgattctaagttcactggtattggtattggttctgatgataattggattgttgttgtcctcactactagcacaccggagggtagctattctccggcctctaactcaggagctttcgcgttcggagttaatggccttgtttcttcaagtttgatgtttcttctcttttgcttcttcatgttttgagtcccttttttggtgtttatctaaactacctcgctgtctttgtttcttatttatgttgttattatggtgatttgtatgaattcgtaaggcattaaagagaataacaatattatcattaagtttctgcttcttataaactttgtttgttgacaaatgtaccatctaaagattctcaacaaattaattaggatttagttgaggtttctcttcttgaaacccaatattcttaaagaaatggttattaaggagttcatcatcaaaactagttcatgctcacgttgaagtgtacatgtataaacaaatatttttggtttataatgtacttgatttagctggttgatataatttatagcatttttaagaagaaaaaaaaacatgaaatatgtaacagttttgaaataaggcccagctgaggccgaaccagccgaggcgtgaaaggactcaaggagcatgtgattttgttgcagtagaccgacggcagaaatatcatgtgaaataggcccttatgttgtaaaaacgaagaaataggcccatactaattaggcccattaatgaagattaaaagtgtaagacattttgtcggcaaagtgtttaacttcacagacaaggtgatttgattggtagagtagcttttaacatttttgaatcatttacatttacagtggttagagatttttttttcttaatcatagtccaaattttcctttttattatgtggttttcattttgttacaaaatatatgcaatgtcttacaagagcacccatacacggttacatcctcaaccaatcagcttcttctactttttatgaaaatatatattatcgatttttcatagtttattgggctttatggtagacaaaaactaacatatataataaatgtaacattcatatatatgcgaaaatagtgttgatatattgttatttattgcatttatcaaactaccacaagatttttgtaattttattaagtgtaggttggtcaattattgtttttactatttaccggcccacattcatctatcagtagagtctttagtcaacattatgatacacatgtaagagtaaaaccatattgacacttatcatagtgcagtttggttggatggacgtgaaagaaagaaaaaacaaagctgtaaaatagaaacaagaatatctttctcacttttgaaatcttgattttgtctcgatttctataatctatcttttagattttgtgcctttcctttatatttgtgtgttctaagtgtgagggagcgttttgattgagggacttgactatttttcggacacgacgcttaaagaaaaaaagaagatcgacaagtgaattttgcgtttaggatacgtcttcgaaacgtcactttcttttcactaacaaacaatgaagttaatgatctctcgtatatataatgactgaaaatatcagagagattgggagagaatcgtatctactttcttaccctcactttttctttctcttccttttttagattttgtttttttaactgttttctctatctttagcaagaaactaaatcgacaagaaaattcttttatatgttgtaaatttcccatgattctctcgtttagtcaattaacacaagaaaccaaagcaaattaaagtaacatttatgtatcttaccatcgatttcacaacaatgctattaattttcttctatcgcatcaatcgtatataacacaatcatttaggacaaaccactactataggtataatgatcacttatttaaacctgaaatgtgaagtgtggtatactatagctagtattcaaagagcatgaaaggcttctaattctaagaactaacgaatgcagctgataagtaaaactattatggaccactcgttactcaatcttaatccactatagaaaagaaaacgctcgatctttaatctggctggctcctacaaacacggattttacagtacatgatatatccaaatattcccgaaactccaaagaataaacttcttttttctgtaaaaagaagaagaataaggctgtgaatgtgatgaatgactttgttatattcgtgtccaaaaattataattatttgaccttattgaacctcttcaattattatttatattcttctctctcgaattattttcaacaaataatatgtgtgtcagtgcatgtgtgtatccaaacgaagtcgatcgttactgtgatacacttatttttatagggcttattgtagcaactactagggtttgatcgtgtcaacaaagaaaaaaaatatgatatttaatacttcaaacctcaaaagcattatgaatatatccacgttacaattatgaacatccacgttaaaacgcataaatctcatcagagtgcgtctcccaccgacgtatttattcctaatcatttataccgcgctagtgtgatcagaagggtttcaaatggaaccctttacgggtcttgtctgtgcttgatcttgtaatcacagacactcttgtatatattcctaacccgacgtatttattcctaatcatttatatcggtcttgatgtcttttaagagtgtctgtgcttaatcttgtactatttgtttaaccctttacgggtcttgttacctcaattagttctacatttacttctgattgggttaatcaactttaatattttgaataatacgtacttctaagttggcagagaaaaagaatctagaatatatattttagggcagaagcaaatccaccaatagagtaccagctaggatttggttttgtcgccatgttgaccactactcacggttcacggatccatccacacccgccaaattatcatgtccaactgtacagatttttttttatgtttttcgattgaaaaaaccttttccgaacacaattagttgcaatctactagaaaataatattaattgtacatattactatttagtactatttaataagttaatatagaaggcttttttataacattttattttttatgacaataattaaaatattgctctattattgataactcaatctagaagtaatttttaaaataaatttcagattcaaaaattaataatctagaagttatcatatttatcagattacatgtttttatttattttaggtatacatgttcataaggcttttttctcatataatcttttatactcaacataattttggtgatgtaatcaaattcacaagtgaattggttaattattcggtcaaagagagcgacaacataaagaatcaaaaggaagcccacgttcaaagaacaaaaatttaattaaaataaataaatactttcaagtttcaattttttttgtttaataactaaaaatgaaaaaaaaaaaaactatgtctagctaataaaataagggcaaaagggtgacttcttgtgaggtgtgaccgttttgaggatagtatatcagacgtccacatacttgaaatcatcactcaccatgtctttttgctctgcttagccacaaataaacctacccaatataattgctctctcaacattttcagattaaacataaaagtataagcacaccaaaaagacattgcgtaactaatcatgtggaggtcaataggtcaaacaaatgatgtttaaagggacattttgattcatgaatatgaagcatcgacatgcatgtacagtttgaaacatcggatccaaaattttaaaagttgggttagtagtttggagatttcacgacattactttagccatgtaaaagtttgtgatacaaatatttaacgatgtactggaagtcgtgatgagccgttgtcattttaatttaattctcattttaaccaacaaaaagggggttggtgcacttatttctttcgtctcttgaacaatacttggttattaattataccaaaaatataaaaattcaatttccttagaaactagcaataaaccaaagtatatagcgtcaaaataattccaaagaacatgcaataataccgaaatggatagacgcggatcccatgcagactactttgcaagaaaaggaacgtgaaaaaggagcttttataataccaatcgccactcacaggctcacagtagtaattataattaataattaacaataaccaaaaagaagacaaaaacccttaaccataaagagtttcaaagatggagtttcacgtgtcgctcactacattttcttattattatattccatataaagagaaaccgagtagggaaaaaaccctacaaaaccgtggtttattttttatttggccgtttaatacctgtagttttaaaattggaataaaaataccaaaattattttttgttgccttttaaattcatggtcttttacattttggtaatttcgaacttgcgatttaacatctgttaatgggtgttacggaagtcgttaacgacgttaaatattgaccctacatgtttagatatatatatatataatatgtttacgaattattccgttgatattgctttggtctggtgagctaacacccaaatcattttattcttgatatctgggttcgagtccacctgcaacttattttttttcttttaacttggtccatttcatttggggttttgctcatagatctttgagacgcaatcccttcgatgattggtcctagaacccttcctttgacgcttgtttgataatctctataagtctctcctcatcttcagcctgaacacaatcccaatcttgttctggtttttacctcttttactgtaactgattttattttttcaattcaattctcatcgtttatgttattggtggtgatggagagatatgtgattgatgggaggttggatgaacagagagttagggattttggtttatggtggagatcgttgggggagtgaaggaattgagttggaaaaagtagtggcagaatcaattgcaagaaggtgaagaagatgaagtgaaattaaaaaagcaaaataaaaacaaaaaaaaactttaaaagttgcaagttgcgtcgaacccgttaacttagggttatacaaaacccaggttaccactagaccaagaaaatattttcataatgcactcataaccgattgtatatatataaaacttaaagtattaaatttaacaccgtaaacgactttcgtaacgcccagtaacagttgttaagtcgcaagttcgaaattaccaaaatttaaaagactacggatttaaaaggcaacaaaaaataattttggtatttttattccaattttaaaactacagattttaaacggccaaataaaaagaaaccgcagtttttaaagcttttttcccaaaccgagtggaaacttgcactattattgtaatttaatagtaatttaatttggagacatatttaggaaaactaccttcaaatttattatgtctcactatgtacaagttacaaaataaataaatactatctcaagttatcattataagcaaagatgggtttaaacaaaatatggggtttaaataaaaataattacgatgtattccagtatgtgttagtcatatgcaattaaagaaagtaaaagtataataattaaaaaagtttttaaccaaacgccgaacacattcgccgtccgtacaaggaaaagccttttgatttgggtttaaccaaacgcgggtttgtgatgacgtcgttattgtacggaccaacctagtttcttcttttttttttgataaaaaaatgttcatacttattacattataaaacaattgatcatcttcgagagaatattgacgtcaaatatgcttgctaaattttattatgttgtgtgtatatatatatgtatgcgtttttaatacaaacagattatatgctttctaatttatctttttcagtttttttttgttttttttcaattgtcttttgcctctctgcttttcgaattttcaaatatttaagcaatgaccaaacaattaattctgattttataactagtaaggaacttttgtataatttgatccgtgttccattatattattttttaacaagaaaatattacatatatagggataccggcctacaatgcatatgtgtttagcctattaattcttaactacagaaacttttgatttttaatactaaaaccgaaaaatctttttctggtgaagttttgggccatactatttgattgagatcattaattttctgttggagaagttggatttatatataattatatgtttgagagcttaattatgttttttaatttattgttgtttgttgccatcaaagagaaaatttcaatgtatattctgtattttttttttttatcatagaactttaattttttggaagattcttcttcaaatgtggaacttcctgtatcacaagttcttgaaatcgatcctactttttcatcatatgatatacatgcaattaatttgatttgatttggtggaaattgaattggcataataataaaaggaagcttctcgtcctaacaaagttgaggttgccactaatctcgaaccactgagggaatctttcttaccaaactagattaactgccgaccagaccacaagcatattccctctgcccatttctttccattattttatcatttttattttaagttaattgaatctacttttgagttttttctcgagttaggaaacgatgatttttctattaaaaacaatcaaacacatcggagaaaaattgtgaaattgtaaatacagagcaaaataagaagtttctctcttttaggaagtagcaacgcagaaagattcccaatttagcaatcccctgttttcccgatcgccttgaacacatcttcttgatacttgaacattctcaatgcccatcacttcatcttcatcttcatcttcttcctcttcctcctcctcctcgtattcttcggtttcttcaggctcaatagtctcttcttcgttctctacaaactcattggagtctttcaagatagagagacggagacgaccattgctacggtcagcttgaaagcatccgttacgaggaggcgcgtttgtggcggtcatgaccaatcttccgttttcacggtgtggtctcatttgaatgcattgaaatcctctcatagtggtcaaaggaggtgggagatcactagggctcacactccttttcctactttttaacgttcttgtctccgttgttgtttccccgagattcttggtttgcacgtcaagcgagaacaactcatcaatatctgtaacatcagaaccagattcgcttccgagattctcagtgcacaatgctaagctctggtcgcttagagctctacaagaagacggacgttgaacatagtaactactctctttctcagagcttgtcgtcgtctttgtggaggaggaggagccagaggatagggactggagagagctccagccactcgagtcagagaccggggaagcagcagctttgtcatcgttacggtttcgggtgtcctctgcatgagaggagtcaagtaaatgagatttgagagctaaaccaaatggttgagaaaagtgaggatttggtgaagatagcctaagccttaaagccctaggctcattaagctgagactgaaacccttgttgatacacaacagttcccatagtttaaagatgatagaagaaaaactgttaagagagagcaaagacttgtgtgagatgtgaaactaaagaagcagagagatgtttttggaaataagcatgaaggataatgagagggaggtgatgccaatttgtagtgtcacaaaaagtgaataaaataaataaagaaaataaagaaaaagagaagtgactgtgcaatgtgcagagactagagaggtgggtaagagagcttttccacaccaccacttgaataatgcaaaatcttttctatttatttattttattatgtcacacaaatgcagataagaatactattatgtaacaaagggagagtcgctgtagtattgtgcacatgaataacattgaaaaaaaaccttcatataatctttttactgttacaaaagaaaaaaatctgatttgtttgttagttaataggaaaagatttggaaagcatagactatacaggaaactttggttaatcatcgtttttgactcatttggcaaaaaaatataaagactgaattattcagcagccaaggaactttcgaccctcatgtgatctgggactgaaagagactacccataaaaaggaagaaaaaaaaaatcaatagagagaaagagaaagttccaaatgaaaaaatgaaaattagtgaaaagataattcaaatgaggttttactaagaagagtaaaattttgtatcttattaaggtacaataacaacagtttaacatctgaatgaaaaatagcaaaatcaaacgcatacgaaaaaaaacatacggccatttacagagagacacgtaatggaagtaacatgtcaaaaagttacagacaagttttgttctttcttttatattttaattttaccttccaaaaaaactaaaacaatccaacaaaagttatgaaagttctcaaatatggtttccccaatatagtagtgctatgattatgaaaacgattgtttgtttttctctctaatagtagtctccatttcacataatttaaagcaaaggagtcgtgtgtcacacagaggcatggatggtcaaaacctatgtcgggtaattcttagacccgatttaaacaacatgataacaacagcccactaattttgaaatctatatcccatctaccagaaagaaaaataaaaatgattattggcactaatcaaggaatcaacataagatgagtttccatgcaaattaatgtttagacaacaatggtcataaattgaggaaattctcatgtatcaagaaaccacgacatgaagcataaaacaaaaacaaagaaagtgagccgaaaatacactcacctcaattacactgtatttgaatgcaaggaagcaaaaaccaaattccgcccacttattatgacctaaaaatgaaagttttttttttagttttttaatgaatgtgaacagaaataattaaaagaaacatatcaaatcaaagtgaccaaggttttagttaactgaagtacaataaggtttagtgacaaataagaagaaaccacctatgtttcaacatctaaaacttttctctaactctgaaaaatattggcttaagttaacatcaaaccttgtcctttgaatctagccaacagtaaactttcaagatttgccctcttaagcccatgtgttaccctaaagaaaccgtacggaacagcttaagaagacagagtttaagaatcatttaagtcgtcagcaagaaccaagtgattccccactaaaacacttttctttcttctgtctctctgttaaatcagatgcttacgtacttaaccccattctaaacaacaaaagacacttttatttcttagtaattaaacaaatgccctagggtcactgacttttgcttaactctaaggcttgtggatttatttattatataaactaatgtaacctagtactcttctctctaaccaaaagaaagctagaatgcatgagctgttcctattccaaagagggtgggggagagatttgtaagatcttcttgggtttcctgtaacagaaaaagtcatctcagtttagtacttgtatcatagataaagaatgtgtagctactaccattgatgaactgtgagcataatgctagcttgtgtgctgtataactctatgatcaactttaataacctattccctgtcttttcgaggtttattgcgacatgaacaaagcaagtggattttagtttatgttttcaagagattctgtggtcactaagtcttaaaggatttggtacaaagatacctttgattatatattatacaacaacaaaagaaaaccattcttactgttatcagattgtgtccaatatcagtactcagcttctatagcaagtagcatcctacgatatattcccggtggttgatcacgtattacttagtcctctagaacataccaataacatgtacaaatgcagtagagaacagaaatgtggtcaaaatgtgttattaagaacctcatgtggtttatggatatagatctacccaagacacgtttcaatattcggtatataactcagtaattagtaatttagcaatcaatgttttgctattaataatgctattatccataaaactaggttggtttttctagtcccacttcctctgctgaaggaatcaagaatgatataattaagcaactagttgacatgcttagaatgaataaagaatgaaataataattaggattctctaacgtaagcaagagtaagaaagttatgacatagttaaactaataaaagtggaacaaaaaggagctgacctgcagacgtaatctctagacaaatatccacaaattgaatcttgatcagcagaggtggtcccaagatccgaaccacctccatagaagagaagaaagtagcacagcaacctttggccactcgaagggagaatgcttttgagtgtgtcctcatacaaaaagctgcttttttatacatgattaagattacgataattaagtgagtaatgacagaggccaaaagcatcaaatttaaatcagaatatgttttgacttcgtatcactcgcttggttcatgcccatgacgcaagaaagttaaaagaagaaagaaaatgaaaaaagaaacagagtgaaacttcgaatcataatccatcaatgtttgtgattggtttcaagttttcaactaatggaggatctaaaagcaaaggaaatacgtcataccacttgaagttaagtggagacataaacttaagccttacgtttccatctatgttctatgatcacagcgtaaaacacgagtattgaatctcttggctcactataaattgcataacaaaaaaaaagaagcattccaccatctttttgaccatattagtggaacctttatgtgacaattctccgacttttaaaattctgacccagaaagaaaatctatatcattagaatgagacagggagcttatctaagccatgcatacaaatgttatcggctaacataatttataactttaggcagagaaagaatagaaactaaagattattaggaaatagaactttctcctttgcttttagggaagcatgacatccacacgaaataacaatctcatccatagctaatgtcttactcacatatcacccaaacaagtaaaaatttcagcagattagatgtcaacatttttcaaaagttttagcgtggtctagttatcacgactcaagtacggattaatacgaacaaataacacaggtaaacttacatttagttgatgcactataggaacaatgagtcaatgactcttcatcagctcggtcttatccaaatgaaaagacatgttgatccaacaaagatgatattgtatctcacgccagaaagctcttcatggttgtgccatgcctagaatatcttgaaccataagacagtgggaaaattttctcaagttagaggagaatctaaactttcacttaaaaccaagattgaggcagaaacagattaaagtcaaatttagcactcaaagtaattgaatgattcacttactattaatgggaaaacactcaataaatacgattctgttagagtggcgctcatcaatactaaacttaaccaagctaataagagaaatatagaattagagagggctataatattgttatgcaaaacaaacagagtaaaacaacaacatggacaatcttcactaaaaacatctacagttttttttttagcttaggctgcaccggtaacgcatatccatttactgacagaggtaaaatgtaagatacaatagttgagaagttgaacaaaaatggcataccaaacatgattgtagttaattgattgtacgaagataaatgcatgtagcattacccattactccgatccgtctctcaataattaatgtagaatagagaaatctctcttcatcatacaatgtcattaaagatatcccacacattaacaaagaagttcttactaaatccctaaatcaaatcaatataatgcattcttgctcatcaaaatgcaaccctcaagaattcaacatctttacggtacaatagggaagacaatgtctaatgactcttcacatttcattgaacatatataagcagaaaaatttcaaactatagttgcagaaatttccaacccgtataaagaaaagaaaaaaatgaaacattcaggctcatatgcaataacaacgtcgaaataatgaaatttcaatcatctacatgatcatgtagtagagtgctctcaaccgttggattaatttatacattttctatgtgtaaatgtgtatcatgatagaaaaggcacgcaccaatggaacatctgggtaacgacgtagcaatcaaccacataatcgacgatcaacattgaaatctgagtacgcgcgactaacgaacgaaacgtttagggtttgcaaaattgaaggttgaagagacgaagaacggagacaacgtcatagggaacggttacgtggtattaatctgagcatcggaatgtgagccatgtgacgacgtggcctcctcttctcttcccggaatcgccatggaaacaaaaataaaatttcttggaacgaactagcacatgtgccacgtgtcacactaggcttcttacattttttttttataaaaataattaaactggaaaatggaaaaacaaataacaattcataaaaactgtaaatttaaaaatatatcttcttcgtcttgatgattatacataaacataacttccttaaacaattactaggtttttttctttttcttgttgcatgaaatataaaattgcaaaaacatagtaaaagagaaacaaattatcaataagaaaaacaccacgccggtccagcttgagcctccctacagaaccgataataaagccaggccggtccaccttgcggctcattatggaaccgattataaagccaggccggtccaccttgtggcttattgagtaaaccattatgaaaccggaccggtccaccttgtggctccctacggaaccgattataaagccatgccggtccaccttgcggttcattacggaaccgattataaagccaggccggtccaccttggagctcattacggaactgattataaagccaggccagtccaccttgcgactcattgcgtaacccattatgaaaccgggccggtccaccttgtggctcactacttaacagatcttgaacccagtccggtccaccttcgtcctcatcagcacgtaaccgattacgaagcaacgccagtccacgttgcgcctcactacgtaaccgattaagaagccacaccggtccaccttcagaaaggtacgggttaaaacgaccatcccttgtaacactctccgcaatgtcccgtgcaatggaattagcaggacaagacaccagctcaaagatgataaaaggaaatgattgacaagctatgaaaatagtatcgagccacattgcatatcgaggccaatcccgaggattatacaaggcagcaattgcagcttgacaatccgaagagattatcacgttttgcaaacgaagatctcgtaagcttttaaccacccacaagatacaacgcaactcggccatgatcctatttgaagaccttgtaaaagcatctcttgcatggtatagagccaaaccattaacatcacgagcaatccaagctaccccactcatcatgtcagcatttccccaatgagcattcacattacacttaacaattccaaagtctggaggagtccagttaagatccaagctcgtcccccgaacaaagcatgcgccatatgtatctatctgtcgcgcattaagccaccgttcctcttcttcaacccctatggatccttgtacactcaaatccacatgtctacctgcaagcaatttatcatttttattaaacaaattaaagataaaatttctgaattattagttagatacaagttacaagaaaaattgcaaaattctagctatcgtctttttaaaaacaaacgttagacattaggctaattgtatagtttatgataaaaggacaacgacatcaaattaaaaagattacaaaactcattagccatacaaaagttaaaaactcacaagagtgttaaacacaaaattgacaagaaccatatagatttaaattgatatatcaaagagagaaggttcagttacgatttatgtgtcctctgtgatgagcaatcatgacttgagaagtagacaatagcatcgtctcttgaaccttgtttaaaggtctgaccggccgttttgttaaccaactgaaagattctaacaacaaattttcttatatatatgctttaccaattgttgtctttgaacaaccataaaaaacaaaaaacaaattgagagttcttaaatacacaaaattgagaaggtagtgaatgaagactattattatgttaccaaattatatattcgtatatgtttaccacatttaaagcatagtcaataaaaaataaaaacgttaccaaatggataatatattgaaagttgattagtaagtatcatttatgtaatttccatctcgtgtatgcataattgtatgcatattggtattataaattcatatgggactttaaaaatggagtagttgcatttgttgataaaacaaaagaaaatggaagttctctctgattcaagaataaaggtaactgtaacatgttttatactcacatagacatttttgattactatgttttacaagattttaggaaaatgacttgtgtgcgtgtgtgtgcttgtctgttgcataaaagagaagagcacaagactgatatttacgattggtatattagaatgcattatacattcatgtttaaattttactgcattagggattacattttgttattttttgtgctaactaatttattttgattagtaatcatttatcacaacggtaagaagtactattccgttatttctgttaccctacaaaaagcagtaagcttttgattaataatcatatatcgcaatggtaagaagtatactgttatttctcttatccaattcctgcttttgattagcaatcatatattgcaatgataaaaaataatcggatattttttgttaccaaatacataaggcggtaagattaacaatgccaaaacgttaccatcgttatttttgtacctctatattataccaatttttctagatgttactcgaaatacatctaaacataaataagtcatctcgatcgaaaaacttttcattaacaatgagatttctagaatcatatctacatatcacttaagtcttcaaaaacataacctttttctttacaagattcttgataattctaatctatttaatttgttttttttcaaaaaattaaaaccataaatcaagtgtaaaaaacaaaaaaaatctcataatctatagcgtaatccacatattaaccaatagtaactcgtggaggtgataattatatagcttaatccaaccctagccaatcatgtaaagcgttagggataatgtactcttagagtctatcgaccagtgaaaataaaaagacagtgaaaatacgataagagaaagaaaaaaaaaaaacagagaaggtaagaaaaattcaaagcgaggttctcgggaaccaatctggaaggaggaggggtgcagagagagagagagagagagagaagcgaagacgatggcgatgatagggatgaacattattgggctattcatggttcttatgttgcttctcatctccctcatcatccttttcgcctgcaagccatggcgatatttttctcgtttccgatcctcctctcgtttttcttctaccttcaaggtttcttcttcctcttcctcttatctcattctctattcaattttcagagtcttcgttccacggcttcgttttttgatttttgattcgattttatgtcggatggtttgttttcgcgaaatgatcaattgataaaggatttgatcatcagtgacaagtgttacgtcgctggatcatgatgcttttctcgtggattccgatagtagttggggttatttggcgatttcgttgattgattttgtcgacgtgggggcggtgagatatatattgtgtgtttggtttctgaaataatctgattgactttttggagatgataatgtgttgttgagttttctcactgttgaaaaattaggattcttttgttgttgttagattcttttgaagctcaagagttgatagattcgtttggtttataatgagtgtggctggattttctctgcctgctcgatttgcacaaaatggttttgtttgaataaagcgtaatggccgtttcagcttcttttgtgtgctatgttttcttcttcttctctagccatggctaattgacattttcaacggctcaaactgttgatgtgcacttagacagacattggaagtagggaactcttgtgaatttgcttgcgaaaactgtcgatttgtttctgaatttggacattggtgcttatatattaggcaatgtgaatgttgccaagaactcagtttcagtgtgggaaattatcgtgggagaacttcttcctcattagttacctttttgtaggaattctgtgagttttgttttttttgtatttttgtctttctaccggagaaatggtaacaaatgaatgaaaaaggtgaaatcagctgttcattcatttcctagctctgttatactctactccttactaatctaataggcggttttactctcactggaaataggatacagctcatccatctagtcttttcgcttgtagatttcatttgtttgcaatttctccataacttggataacatactaaaattgtataagaactaaatccaccttattattactacattcttcatatagggaaatattgagtttctcatctttcagctattgagtatccagtttacgcaactttttttttgctcctagccctaattctttcagcgccattgtttgcaggtgggggatttgcagagaccacttatttctgatgatggaaatttgatccaaggacaaaccagtgaggtaacaagggaatatgatttagagggagcttgctaccaaaatgatggacttttgcattcatctctgactgagggacggttttacaaacaaaggcttccttcgtcatctccccatttctcccaaggtactcattgcctctttcctcccctgctatgtccagctctggtagacaagttggattgactctagatcattagcgtgatggaaatgatacagttgtatcagaaacatcctctttgcattatgaactctatgcatcactcattcttgaccttaccaatctgccctaacttatgtaggtgaaagctttgttctagaagtaatttctgaaccttctgacaatgctttggtgggccaaacgcttaaacttccagctgaaaaaggttccttggcagaagtgcaaacatatgactggcagaataacagaaatgaaaacttgcaatataatctggaaaaggatcgacttattaatctttctccgaggctcgtggaagatcaaagtaatttcttattcttttgcttgcctagggtgtgtaatacaacttcaatccattttttgaattacttgtgcaagacatatatcatattttgtgttagaagtgcaggaagttggctgttcctggaagtcatcgcgggtcctgccattgggcttcaacatgctgtgaactccacaagttcctccaagctgccagtgaaacttggaagggtttctccttctgatttggcattgaaggactcagaagtctctgggaaacatgcacagataacatggaactctactgtaaggagctatgtagatttatttatacgacttctgcatgccacttcttacactgtgcgtcacacctgcctggttttgatttcagaaatttaaatgggagctggtagatatgggtagcctaaatggaactctcgtaaactctcattcaataagtcatcctgatttaggcagccggaagtggggtaaccctgtcgagcttgcaagtgatgatataataactttgggaacaacaacaaaggtctatgtaagtcaatctgagtggtgaaggtgcttgctggtaattttttttgtttcccttgttaatttcatgcaatttcttttcatctttggaaggtccgtatctcctctcagaatgagtttcagatacccttcaaaattggtgtggcctcagatcccatggctatgcgtcgaggaggcaggaaacttccgatggaagatgtttgtcattacaagtggccgcttcctggggctaataaggttaccttgattagtgatttgagttgtatgtatgatgatgggcttcgctgcttttgataacataattccaaatgtatatggtttcagtttggactgttttgtgtttgtgatggacatgggggatcaggggctgctcaatccgcaatcaagtgagtctttcttaaaaaaatccaaatcacctctattaactatttcttttataaaatcctcctcgataggtcttattttgggttttctttgtatgcttaacctacgaaatgtcctaacctgaaaaaggctgcggttttggctgtgtttaaacttctaacagcatccgcctttctgagtttttctttattgtttttgcttcatttattaatcaacttcttatgtagtttaaaatttttagctgcatgtgattagccatgcaaatgtgttacagttagggcaggcgtggttacagccgggaacaaatatatgaaactttgttctgttcatttttgtaaatgggcttagtcattatatgttaggagccttcactaactactggagcatctttgatttacttgtgtctccaacaacggcaattatatacttgaatatataagctaattaaacttcttctccagaattattccggaggttctagcgaatattttatcagactcgctgaggaaggagaaagtgttatcaaaaagggatgcttcggacgtccttagggacatgtttgctaaaacagaagctcgcctcgaagaacaccaatatgaggtatttcagtttgtccttttcttttcctttgatggcatgtttgccttcttgacgacttggctggaactttttcattgcttcctacttaatgaattagttgatcgatgcagggttgtacagctactgttctcttggtttggaaagacaatgaagaaaacttcttcgcacaatgtgccaatcttggggattcagcatgtgttatccagtacgtaaaaaatattatattgctattcttgagattcgtagttgctgagcttgcattaaccagacttgtagcagcatttcttggtgtagaaagagggaggggacttgattactcagattagaaacaaagatcttgcgtgtttaaagcgtgagtgagtgtggtcttcttaatgaaaacctcttggtttggaaacagtagatgattactaatataggctttatagtagagtaaatagacatcaatagatgagattgtttcacgtcggagtagaatttttttggataagaaaaagaatatttgaatgtcgttgctttgctttgtggaaatagaaagagagtttatccctacatcttccttgatacggatcttaattaataataaaaaaattctgatagttgttttgctcttaggaattaatggtctcggcattataatagtaacttcgactttcttaactgattacgatttggtttgcatttggcagtcttggtggcagatatatacaaatgactgaagatcatcgagtggttagcttgagcgagagaaaacgattccaagaagcaggactagccttgagagatggagagactcggctttttggtattagctcaatgaattaaacacgctcaggtgattgcaacttctttgtaacaaaatgaccaaatctgatgtgataattttcttcaggtataaaccttgcgaggatgcttggagacaagtttccaaagcaacaagacagccgtttcagtgcagagccatatataagtgagcctttgcgtatcgatcaatctagtaaagacgtatttgctgtattggctaggtaaaaaaacataaacataaacataataagctttttcccgttttctgattcttgctcgctaatttttgaaatccgaatactgcagtgacgggttatgggacgtggtaagtccgaagaaagctgtgcagcttgtacttcaggtaaaatcaatttctactcgttgagacatttgctatgtctgaaaacgtcgatctcatgtaatgtttatgttatggcagatgagagataaagagagagggagagagagtagtgcggagaagatagcaaacggtctgctgaatgaagctagagcgatgcgtacaaaggacaacacctccattatttacttagatttcgatacttccctgtaatgttaggaaacatcttttaagatatttgggaagtgtctttcttttgtgtaccatctttttatgtattagtatttttgttagggtataagagagacaaaaaaacctcagatgcagagatttaggatggatcgtcttggtgagcgacattggtttcattatctttacttatataattaataatattatcagttaaagtttctgtttcgtattttattctttggtgagaatgaatttcatcagacaatacaacttatcagtttagtatggactatggagtccgtaattctgagtattcattggtacttttggatttcgattttggtttttgattttagtatcaatacggttattctagagtttcggttcagttttgttccagctatttcagttttgttctttttacgatgtgtacgcaggcaccaaaataatactattttgactgttgttcggttagaagtagaaagaaaatcacagattttgtaataaaaatctgcctattttcggaatgaacacgtatacaattttgactgatatatatggaatgaaccaaaatagtcaacagtcaagaatttcaagagattttgggattctttcctcaagtaatcttactacctaatctgagttttgactcaataaattttagtttaacttccgttttaaaaattggagttgttgttcaaccttttgcatcgtactaaaacaaattaagaaaaacagaaccccaaaaagatttgaaattgaaaacaaagcgggcccaaaaatcaggagtagttcgagcgtccacactaaaagcatgtgtcccaacaacaccagatcctatcctctcaatttatgaaacgtcattaaatcctctcaacggttaaccaaaccccacacctcacatccttttctttccccttctctcaaccttttggtggaaaaaaccagaaaatggggttgcatccaatttccgacgccaatgaacacaatcccttcggctctctcaccgccgacgaattctacgccaaacattccgttagccactcctccgctttcatcaccaaccctcgcggtctcaaactcttcactcaatggtggtcaccactccctccaactaaaccaatcggtatcatcgctgtcgttcatggcttcaccggcgaatccagttggttccttcagctcacatcaatcctcttcgctaaatccggtttcataacctgcgcaattgatcaccaaggccatggattctccgatggactcatcgctcatatccctgacatcaatcccgtcgtcgatgactgtatctctttcttcgatgacttccgtagccgtcaaacaccgtcagatctgccgtgttttctctactctgaatccctaggcggcgcgattgctctctacatctcgcttcgtcagagaggtgtttgggatggacttatcctcaacggagctatgtgtggaatcagcgataaattcaaaccgccgtggccgttggagcatttgctattcgtcgtcgcgaatcttatccctacttggcgcgttatccccactcgcggatctattcccgatgtttcgttcaaggagccgtggaagaggaagctt

SEQ ID NO: 1450 - DNA, 103024 bp, Arabidopsis thaliana
gaattcgtaaggcattaaagagaataacaatattatcattaagtttctgcttcttataaactttgtttgttgacaaatgtaccatctaaagattctcaacaaattaattaggatttagttgaggtttctcttcttgaaacccaatattcttaaagaaatggttattaaggagttcatcatcaaaactagttcatgctcacgttgaagtgtacatgtataaacaaatatttttggtttataatgtacttgatttagctggttgatataatttatagcatttttaagaagaaaaaaaaacatgaaatatgtaacagttttgaaataaggcccagctgaggccgaaccagccgaggcgtgaaaggactcaaggagcatgtgattttgttgcagtagaccgacggcagaaatatcatgtgaaataggcccttatgttgtaaaaacgaagaaataggcccatactaattaggcccattaatgaagattaaaagtgtaagacattttgtcggcaaagtgtttaacttcacagacaaggtgatttgattggtagagtagcttttaacatttttgaatcatttacatttacagtggttagagatttttttttcttaatcatagtccaaattttcctttttattatgtggttttcattttgttacaaaatatatgcaatgtcttacaagagcacccatacacggttacatcctcaaccaatcagcttcttctactttttatgaaaatatatattatcgatttttcatagtttattgggctttatggtagacaaaaactaacatatataataaatgtaacattcatatatatgcgaaaatagtgttgatatattgttatttattgcatttatcaaactaccacaagatttttgtaattttattaagtgtaggttggtcaattattgtttttactatttaccggcccacattcatctatcagtagagtctttagtcaacattatgatacacatgtaagagtaaaaccatattgacacttatcatagtgcagtttggttggatggacgtgaaagaaagaaaaaacaaagctgtaaaatagaaacaagaatatctttctcacttttgaaatcttgattttgtctcgatttctataatctatcttttagattttgtgcctttcctttatatttgtgtgttctaagtgtgagggagcgttttgattgagggacttgactatttttcggacacgacgcttaaagaaaaaaagaagatcgacaagtgaattttgcgtttaggatacgtcttcgaaacgtcactttcttttcactaacaaacaatgaagttaatgatctctcgtatatataatgactgaaaatatcagagagattgggagagaatcgtatctactttcttaccctcactttttctttctcttccttttttagattttgtttttttaactgttttctctatctttagcaagaaactaaatcgacaagaaaattcttttatatgttgtaaatttcccatgattctctcgtttagtcaattaacacaagaaaccaaagcaaattaaagtaacatttatgtatcttaccatcgatttcacaacaatgctattaattttcttctatcgcatcaatcgtatataacacaatcatttaggacaaaccactactataggtataatgatcacttatttaaacctgaaatgtgaagtgtggtatactatagctagtattcaaagagcatgaaaggcttctaattctaagaactaacgaatgcagctgataagtaaaactattatggaccactcgttactcaatcttaatccactatagaaaagaaaacgctcgatctttaatctggctggctcctacaaacacggattttacagtacatgatatatccaaatattcccgaaactccaaagaataaacttcttttttctgtaaaaagaagaagaataaggctgtgaatgtgatgaatgactttgttatattcgtgtccaaaaattataattatttgaccttattgaacctcttcaattattatttatattcttctctctcgaattattttcaacaaataatatgtgtgtcagtgcatgtgtgtatccaaacgaagtcgatcgttactgtgatacacttatttttatagggcttattgtagcaactactagggtttgatcgtgtcaacaaagaaaaaaaatatgatatttaatacttcaaacctcaaaagcattatgaatatatccacgttacaattatgaacatccacgttaaaacgcataaatctcatcagagtgcgtctcccaccgacgtatttattcctaatcatttataccgcgctagtgtgatcagaagggtttcaaatggaaccctttacgggtcttgtctgtgcttgatcttgtaatcacagacactcttgtatatattcctaacccgacgtatttattcctaatcatttatatcggtcttgatgtcttttaagagtgtctgtgcttaatcttgtactatttgtttaaccctttacgggtcttgttacctcaattagttctacatttacttctgattgggttaatcaactttaatattttgaataatacgtacttctaagttggcagagaaaaagaatctagaatatatattttagggcagaagcaaatccaccaatagagtaccagctaggatttggttttgtcgccatgttgaccactactcacggttcacggatccatccacacccgccaaattatcatgtccaactgtacagatttttttttatgtttttcgattgaaaaaaccttttccgaacacaattagttgcaatctactagaaaataatattaattgtacatattactatttagtactatttaataagttaatatagaaggcttttttataacattttattttttatgacaataattaaaatattgctctattattgataactcaatctagaagtaatttttaaaataaatttcagattcaaaaattaataatctagaagttatcatatttatcagattacatgtttttatttattttaggtatacatgttcataaggcttttttctcatataatcttttatactcaacataattttggtgatgtaatcaaattcacaagtgaattggttaattattcggtcaaagagagcgacaacataaagaatcaaaaggaagcccacgttcaaagaacaaaaatttaattaaaataaataaatactttcaagtttcaattttttttgtttaataactaaaaatgaaaaaaaaaaaaactatgtctagctaataaaataagggcaaaagggtgacttcttgtgaggtgtgaccgttttgaggatagtatatcagacgtccacatacttgaaatcatcactcaccatgtctttttgctctgcttagccacaaataaacctacccaatataattgctctctcaacattttcagattaaacataaaagtataagcacaccaaaaagacattgcgtaactaatcatgtggaggtcaataggtcaaacaaatgatgtttaaagggacattttgattcatgaatatgaagcatcgacatgcatgtacagtttgaaacatcggatccaaaattttaaaagttgggttagtagtttggagatttcacgacattactttagccatgtaaaagtttgtgatacaaatatttaacgatgtactggaagtcgtgatgagccgttgtcattttaatttaattctcattttaaccaacaaaaagggggttggtgcacttatttctttcgtctcttgaacaatacttggttattaattataccaaaaatataaaaattcaatttccttagaaactagcaataaaccaaagtatatagcgtcaaaataattccaaagaacatgcaataataccgaaatggatagacgcggatcccatgcagactactttgcaagaaaaggaacgtgaaaaaggagcttttataataccaatcgccactcacaggctcacagtagtaattataattaataattaacaataaccaaaaagaagacaaaaacccttaaccataaagagtttcaaagatggagtttcacgtgtcgctcactacattttcttattattatattccatataaagagaaaccgagtagggaaaaaaccctacaaaaccgtggtttattttttatttggccgtttaatacctgtagttttaaaattggaataaaaataccaaaattattttttgttgccttttaaattcatggtcttttacattttggtaatttcgaacttgcgatttaacatctgttaatgggtgttacggaagtcgttaacgacgttaaatattgaccctacatgtttagatatatatatatataatatgtttacgaattattccgttgatattgctttggtctggtgagctaacacccaaatcattttattcttgatatctgggttcgagtccacctgcaacttattttttttcttttaacttggtccatttcatttggggttttgctcatagatctttgagacgcaatcccttcgatgattggtcctagaacccttcctttgacgcttgtttgataatctctataagtctctcctcatcttcagcctgaacacaatcccaatcttgttctggtttttacctcttttactgtaactgattttattttttcaattcaattctcatcgtttatgttattggtggtgatggagagatatgtgattgatgggaggttggatgaacagagagttagggattttggtttatggtggagatcgttgggggagtgaaggaattgagttggaaaaagtagtggcagaatcaattgcaagaaggtgaagaagatgaagtgaaattaaaaaagcaaaataaaaacaaaaaaaaactttaaaagttgcaagttgcgtcgaacccgttaacttagggttatacaaaacccaggttaccactagaccaagaaaatattttcataatgcactcataaccgattgtatatatataaaacttaaagtattaaatttaacaccgtaaacgactttcgtaacgcccagtaacagttgttaagtcgcaagttcgaaattaccaaaatttaaaagactacggatttaaaaggcaacaaaaaataattttggtatttttattccaattttaaaactacagattttaaacggccaaataaaaagaaaccgcagtttttaaagcttttttcccaaaccgagtggaaacttgcactattattgtaatttaatagtaatttaatttggagacatatttaggaaaactaccttcaaatttattatgtctcactatgtacaagttacaaaataaataaatactatctcaagttatcattataagcaaagatgggtttaaacaaaatatggggtttaaataaaaataattacgatgtattccagtatgtgttagtcatatgcaattaaagaaagtaaaagtataataattaaaaaagtttttaaccaaacgccgaacacattcgccgtccgtacaaggaaaagccttttgatttgggtttaaccaaacgcgggtttgtgatgacgtcgttattgtacggaccaacctagtttcttcttttttttttgataaaaaaatgttcatacttattacattataaaacaattgatcatcttcgagagaatattgacgtcaaatatgcttgctaaattttattatgttgtgtgtatatatatatgtatgcgtttttaatacaaacagattatatgctttctaatttatctttttcagtttttttttgttttttttcaattgtcttttgcctctctgcttttcgaattttcaaatatttaagcaatgaccaaacaattaattctgattttataactagtaaggaacttttgtataatttgatccgtgttccattatattattttttaacaagaaaatattacatatatagggataccggcctacaatgcatatgtgtttagcctattaattcttaactacagaaacttttgatttttaatactaaaaccgaaaaatctttttctggtgaagttttgggccatactatttgattgagatcattaattttctgttggagaagttggatttatatataattatatgtttgagagcttaattatgttttttaatttattgttgtttgttgccatcaaagagaaaatttcaatgtatattctgtatttttttttttttatcatagaactttaattttttggaagattcttcttcaaatgtggaacttcctgtatcacaagttcttgaaatcgatcctactttttcatcatatgatatacatgcaattaatttgatttgatttggtggaaattgaattggcataataataaaaggaagcttctcgtcctaacaaagttgaggttgccactaatctcgaaccactgagggaatctttcttaccaaactagattaactgccgaccagaccacaagcatattccctctgcccatttctttccattattttatcatttttattttaagttaattgaatctacttttgagttttttctcgagttaggaaacgatgatttttctattaaaaacaatcaaacacatcggagaaaaattgtgaaattgtaaatacagagcaaaataagaagtttctctcttttaggaagtagcaacgcagaaagattcccaatttagcaatcccctgttttcccgatcgccttgaacacatcttcttgatacttgaacattctcaatgcccatcacttcatcttcatcttcatcttcttcctcttcctcctcctcctcgtattcttcggtttcttcaggctcaatagtctcttcttcgttctctacaaactcattggagtctttcaagatagagagacggagacgaccattgctacggtcagcttgaaagcatccgttacgaggaggcgcgtttgtggcggtcatgaccaatcttccgttttcacggtgtggtctcatttgaatgcattgaaatcctctcatagtggtcaaaggaggtgggagatcactagggctcacactccttttcctactttttaacgttcttgtctccgttgttgtttccccgagattcttggtttgcacgtcaagcgagaacaactcatcaatatctgtaacatcagaaccagattcgcttccgagattctcagtgcacaatgctaagctctggtcgcttagagctctacaagaagacggacgttgaacatagtaactactctctttctcagagcttgtcgtcgtctttgtggaggaggaggagccagaggatagggactggagagagctccagccactcgagtcagagaccggggaagcagcagctttgtcatcgttacggtttcgggtgtcctctgcatgagaggagtcaagtaaatgagatttgagagctaaaccaaatggttgagaaaagtgaggatttggtgaagatagcctaagccttaaagccctaggctcattaagctgagactgaaacccttgttgatacacaacagttcccatagtttaaagatgatagaagaaaaactgttaagagagagcaaagacttgtgtgagatgtgaaactaaagaagcagagagatgtttttggaaataagcatgaaggataatgagagggaggtgatgccaatttgtagtgtcacaaaaagtgaataaaataaataaagaaaataaagaaaaagagaagtgactgtgcaatgtgcagagactagagaggtgggtaagagagcttttccacaccaccacttgaataatgcaaaatcttttctatttatttattttattatgtcacacaaatgcagataagaatactattatgtaacaaagggagagtcgctgtagtattgtgcacatgaataacattgaaaaaaaaccttcatataatctttttactgttacaaaagaaaaaaatctgatttgtttgttagttaataggaaaagatttggaaagcatagactatacaggaaactttggttaatcatcgtttttgactcatttggcaaaaaaatataaagactgaattattcagcagccaaggaactttcgaccctcatgtgatctgggactgaaagagactacccataaaaaggaagaaaaaaaaaatcaatagagagaaagagaaagttccaaatgaaaaaatgaaaattagtgaaaagataattcaaatgaggttttactaagaagagtaaaattttgtatcttattaaggtacaataacaacagtttaacatctgaatgaaaaatagcaaaatcaaacgcatacgaaaaaaaacatacggccatttacagagagacacgtaatggaagtaacatgtcaaaaagttacagacaagttttgttctttcttttatattttaattttaccttccaaaaaaactaaaacaatccaacaaaagttatgaaagttctcaaatatggtttccccaatatagtagtgctatgattatgaaaacgattgtttgtttttctctctaatagtagtctccatttcacataatttaaagcaaaggagtcgtgtgtcacacagaggcatggatggtcaaaacctatgtcgggtaattcttagacccgatttaaacaacatgataacaacagcccactaattttgaaatctatatcccatctaccagaaagaaaaataaaaatgattattggcactaatcaaggaatcaacataagatgagtttccatgcaaattaatgtttagacaacaatggtcataaattgaggaaattctcatgtatcaagaaaccacgacatgaagcataaaacaaaaacaaagaaagtgagccgaaaatacactcacctcaattacactgtatttgaatgcaaggaagcaaaaaccaaattccgcccacttattatgacctaaaaatgaaagttttttttttagttttttaatgaatgtgaacagaaataattaaaagaaacatatcaaatcaaagtgaccaaggttttagttaactgaagtacaataaggtttagtgacaaataagaagaaaccacctatgtttcaacatctaaaacttttctctaactctgaaaaatattggcttaagttaacatcaaaccttgtcctttgaatctagccaacagtaaactttcaagatttgccctcttaagcccatgtgttaccctaaagaaaccgtacggaacagcttaagaagacagagtttaagaatcatttaagtcgtcagcaagaaccaagtgattccccactaaaacacttttctttcttctgtctctctgttaaatcagatgcttacgtacttaaccccattctaaacaacaaaagacacttttatttcttagtaattaaacaaatgccctagggtcactgacttttgcttaactctaaggcttgtggatttatttattatataaactaatgtaacctagtactcttctctctaaccaaaagaaagctagaatgcatgagctgttcctattccaaagagggtgggggagagatttgtaagatcttcttgggtttcctgtaacagaaaaagtcatctcagtttagtacttgtatcatagataaagaatgtgtagctactaccattgatgaactgtgagcataatgctagcttgtgtgctgtataactctatgatcaactttaataacctattccctgtcttttcgaggtttattgcgacatgaacaaagcaagtggattttagtttatgttttcaagagattctgtggtcactaagtcttaaaggatttggtacaaagatacctttgattatatattatacaacaacaaaagaaaaccattcttactgttatcagattgtgtccaatatcagtactcagcttctatagcaagtagcatcctacgatatattcccggtggttgatcacgtattacttagtcctctagaacataccaataacatgtacaaatgcagtagagaacagaaatgtggtcaaaatgtgttattaagaacctcatgtggtttatggatatagatctacccaagacacgtttcaatattcggtatataactcagtaattagtaatttagcaatcaatgttttgctattaataatgctattatccataaaactaggttggtttttctagtcccacttcctctgctgaaggaatcaagaatgatataattaagcaactagttgacatgcttagaatgaataaagaatgaaataataattaggattctctaacgtaagcaagagtaagaaagttatgacatagttaaactaataaaagtggaacaaaaaggagctgacctgcagacgtaatctctagacaaatatccacaaattgaatcttgatcagcagaggtggtcccaagatccgaaccacctccatagaagagaagaaagtagcacagcaacctttggccactcgaagggagaatgcttttgagtgtgtcctcatacaaaaagctgcttttttatacatgattaagattacgataattaagtgagtaatgacagaggccaaaagcatcaaatttaaatcagaatatgttttgacttcgtatcactcgcttggttcatgcccatgacgcaagaaagttaaaagaagaaagaaaatgaaaaaagaaacagagtgaaacttcgaatcataatccatcaatgtttgtgattggtttcaagttttcaactaatggaggatctaaaagcaaaggaaatacgtcataccacttgaagttaagtggagacataaacttaagccttacgtttccatctatgttctatgatcacagcgtaaaacacgagtattgaatctcttggctcactataaattgcataacaaaaaaaaagaagcattccaccatctttttgaccatattagtggaacctttatgtgacaattctccgacttttaaaattctgacccagaaagaaaatctatatcattagaatgagacagggagcttatctaagccatgcatacaaatgttatcggctaacataatttataactttaggcagagaaagaatagaaactaaagattattaggaaatagaactttctcctttgcttttagggaagcatgacatccacacgaaataacaatctcatccatagctaatgtcttactcacatatcacccaaacaagtaaaaatttcagcagattagatgtcaacatttttcaaaagttttagcgtggtctagttatcacgactcaagtacggattaatacgaacaaataacacaggtaaacttacatttagttgatgcactataggaacaatgagtcaatgactcttcatcagctcggtcttatccaaatgaaaagacatgttgatccaacaaagatgatattgtatctcacgccagaaagctcttcatggttgtgccatgcctagaatatcttgaaccataagacagtgggaaaattttctcaagttagaggagaatctaaactttcacttaaaaccaagattgaggcagaaacagattaaagtcaaatttagcactcaaagtaattgaatgattcacttactattaatgggaaaacactcaataaatacgattctgttagagtggcgctcatcaatactaaacttaaccaagctaataagagaaatatagaattagagagggctataatattgttatgcaaaacaaacagagtaaaacaacaacatggacaatcttcactaaaaacatctacagttttttttttagcttaggctgcaccggtaacgcatatccatttactgacagaggtaaaatgtaagatacaatagttgagaagttgaacaaaaatggcataccaaacatgattgtagttaattgattgtacgaagataaatgcatgtagcattacccattactccgatccgtctctcaataattaatgtagaatagagaaatctctcttcatcatacaatgtcattaaagatatcccacacattaacaaagaagttcttactaaatccctaaatcaaatcaatataatgcattcttgctcatcaaaatgcaaccctcaagaattcaacatctttacggtacaatagggaagacaatgtctaatgactcttcacatttcattgaacatatataagcagaaaaatttcaaactatagttgcagaaatttccaacccgtataaagaaaagaaaaaaatgaaacattcaggctcatatgcaataacaacgtcgaaataatgaaatttcaatcatctacatgatcatgtagtagagtgctctcaaccgttggattaatttatacattttctatgtgtaaatgtgtatcatgatagaaaaggcacgcaccaatggaacatctgggtaacgacgtagcaatcaaccacataatcgacgatcaacattgaaatctgagtacgcgcgactaacgaacgaaacgtttagggtttgcaaaattgaaggttgaagagacgaagaacggagacaacgtcatagggaacggttacgtggtattaatctgagcatcggaatgtgagccatgtgacgacgtggcctcctcttctcttcccggaatcgccatggaaacaaaaataaaatttcttggaacgaactagcacatgtgccacgtgtcacactaggcttcttacattttttttttataaaaataattaaactggaaaatggaaaaacaaataacaattcataaaaactgtaaatttaaaaatatatcttcttcgtcttgatgattatacataaacataacttccttaaacaattactaggtttttttctttttcttgttgcatgaaatataaaattgcaaaaacatagtaaaagagaaacaaattatcaataagaaaaacaccacgccggtccagcttgagcctccctacagaaccgataataaagccaggccggtccaccttgcggctcattatggaaccgattataaagccaggccggtccaccttgtggcttattgagtaaaccattatgaaaccggaccggtccaccttgtggctccctacggaaccgattataaagccatgccggtccaccttgcggttcattacggaaccgattataaagccaggccggtccaccttggagctcattacggaactgattataaagccaggccagtccaccttgcgactcattgcgtaacccattatgaaaccgggccggtccaccttgtggctcactacttaacagatcttgaacccagtccggtccaccttcgtcctcatcagcacgtaaccgattacgaagcaacgccagtccacgttgcgcctcactacgtaaccgattaagaagccacaccggtccaccttcagaaaggtacgggttaaaacgaccatcccttgtaacactctccgcaatgtcccgtgcaatggaattagcaggacaagacaccagctcaaagatgataaaaggaaatgattgacaagctatgaaaatagtatcgagccacattgcatatcgaggccaatcccgaggattatacaaggcagcaattgcagcttgacaatccgaagagattatcacgttttgcaaacgaagatctcgtaagcttttaaccacccacaagatacaacgcaactcggccatgatcctatttgaagaccttgtaaaagcatctcttgcatggtatagagccaaaccattaacatcacgagcaatccaagctaccccactcatcatgtcagcatttccccaatgagcattcacattacacttaacaattccaaagtctggaggagtccagttaagatccaagctcgtcccccgaacaaagcatgcgccatatgtatctatctgtcgcgcattaagccaccgttcctcttcttcaacccctatggatccttgtacactcaaatccacatgtctacctgcaagcaatttatcatttttattaaacaaattaaagataaaatttctgaattattagttagatacaagttacaagaaaaattgcaaaattctagctatcgtctttttaaaaacaaacgttagacattaggctaattgtatagtttatgataaaaggacaacgacatcaaattaaaaagattacaaaactcattagccatacaaaagttaaaaactcacaagagtgttaaacacaaaattgacaagaaccatatagatttaaattgatatatcaaagagagaaggttcagttacgatttatgtgtcctctgtgatgagcaatcatgacttgagaagtagacaatagcatcgtctcttgaaccttgtttaaaggtctgaccggccgttttgttaaccaactgaaagattctaacaacaaattttcttatatatatgctttaccaattgttgtctttgaacaaccataaaaaacaaaaaacaaattgagagttcttaaatacacaaaattgagaaggtagtgaatgaagactattattatgttaccaaattatatattcgtatatgtttaccacatttaaagcatagtcaataaaaaataaaaacgttaccaaatggataatatattgaaagttgattagtaagtatcatttatgtaatttccatctcgtgtatgcataattgtatgcatattggtattataaattcatatgggactttaaaaatggagtagttgcatttgttgataaaacaaaagaaaatggaagttctctctgattcaagaataaaggtaactgtaacatgttttatactcacatagacatttttgattactatgttttacaagattttaggaaaatgacttgtgtgcgtgtgtgtgcttgtctgttgcataaaagagaagagcacaagactgatatttacgattggtatattagaatgcattatacattcatgtttaaattttactgcattagggattacattttgttattttttgtgctaactaatttattttgattagtaatcatttatcacaacggtaagaagtactattccgttatttctgttaccctacaaaaagcagtaagcttttgattaataatcatatatcgcaatggtaagaagtatactgttatttctcttatccaattcctgcttttgattagcaatcatatattgcaatgataaaaaataatcggatattttttgttaccaaatacataaggcggtaagattaacaatgccaaaacgttaccatcgttatttttgtacctctatattataccaatttttctagatgttactcgaaatacatctaaacataaataagtcatctcgatcgaaaaacttttcattaacaatgagatttctagaatcatatctacatatcacttaagtcttcaaaaacataacctttttctttacaagattcttgataattctaatctatttaatttgttttttttcaaaaaattaaaaccataaatcaagtgtaaaaaacaaaaaaaatctcataatctatagcgtaatccacatattaaccaatagtaactcgtggaggtgataattatatagcttaatccaaccctagccaatcatgtaaagcgttagggataatgtactcttagagtctatcgaccagtgaaaataaaaagacagtgaaaatacgataagagaaagaaaaaaaaaaaacagagaaggtaagaaaaattcaaagcgaggttctcgggaaccaatctggaaggaggaggggtgcagagagagagagagagagagagaagcgaagacgatggcgatgatagggatgaacattattgggctattcatggttcttatgttgcttctcatctccctcatcatccttttcgcctgcaagccatggcgatatttttctcgtttccgatcctcctctcgtttttcttctaccttcaaggtttcttcttcctcttcctcttatctcattctctattcaattttcagagtcttcgttccacggcttcgttttttgatttttgattcgattttatgtcggatggtttgttttcgcgaaatgatcaattgataaaggatttgatcatcagtgacaagtgttacgtcgctggatcatgatgcttttctcgtggattccgatagtagttggggttatttggcgatttcgttgattgattttgtcgacgtgggggcggtgagatatatattgtgtgtttggtttctgaaataatctgattgactttttggagatgataatgtgttgttgagttttctcactgttgaaaaattaggattcttttgttgttgttagattcttttgaagctcaagagttgatagattcgtttggtttataatgagtgtggctggattttctctgcctgctcgatttgcacaaaatggttttgtttgaataaagcgtaatggccgtttcagcttcttttgtgtgctatgttttcttcttcttctctagccatggctaattgacattttcaacggctcaaactgttgatgtgcacttagacagacattggaagtagggaactcttgtgaatttgcttgcgaaaactgtcgatttgtttctgaatttggacattggtgcttatatattaggcaatgtgaatgttgccaagaactcagtttcagtgtgggaaattatcgtgggagaacttcttcctcattagttacctttttgtaggaattctgtgagttttgttttttttgtatttttgtctttctaccggagaaatggtaacaaatgaatgaaaaaggtgaaatcagctgttcattcatttcctagctctgttatactctactccttactaatctaataggcggttttactctcactggaaataggatacagctcatccatctagtcttttcgcttgtagatttcatttgtttgcaatttctccataacttggataacatactaaaattgtataagaactaaatccaccttattattactacattcttcatatagggaaatattgagtttctcatctttcagctattgagtatccagtttacgcaactttttttttgctcctagccctaattctttcagcgccattgtttgcaggtgggggatttgcagagaccacttatttctgatgatggaaatttgatccaaggacaaaccagtgaggtaacaagggaatatgatttagagggagcttgctaccaaaatgatggacttttgcattcatctctgactgagggacggttttacaaacaaaggcttccttcgtcatctccccatttctcccaaggtactcattgcctctttcctcccctgctatgtccagctctggtagacaagttggattgactctagatcattagcgtgatggaaatgatacagttgtatcagaaacatcctctttgcattatgaactctatgcatcactcattcttgaccttaccaatctgccctaacttatgtaggtgaaagctttgttctagaagtaatttctgaaccttctgacaatgctttggtgggccaaacgcttaaacttccagctgaaaaaggttccttggcagaagtgcaaacatatgactggcagaataacagaaatgaaaacttgcaatataatctggaaaaggatcgacttattaatctttctccgaggctcgtggaagatcaaagtaatttcttattcttttgcttgcctagggtgtgtaatacaacttcaatccattttttgaattacttgtgcaagacatatatcatattttgtgttagaagtgcaggaagttggctgttcctggaagtcatcgcgggtcctgccattgggcttcaacatgctgtgaactccacaagttcctccaagctgccagtgaaacttggaagggtttctccttctgatttggcattgaaggactcagaagtctctgggaaacatgcacagataacatggaactctactgtaaggagctatgtagatttatttatacgacttctgcatgccacttcttacactgtgcgtcacacctgcctggttttgatttcagaaatttaaatgggagctggtagatatgggtagcctaaatggaactctcgtaaactctcattcaataagtcatcctgatttaggcagccggaagtggggtaaccctgtcgagcttgcaagtgatgatataataactttgggaacaacaacaaaggtctatgtaagtcaatctgagtggtgaaggtgcttgctggtaattttttttgtttcccttgttaatttcatgcaatttcttttcatctttggaaggtccgtatctcctctcagaatgagtttcagatacccttcaaaattggtgtggcctcagatcccatggctatgcgtcgaggaggcaggaaacttccgatggaagatgtttgtcattacaagtggccgcttcctggggctaataaggttaccttgattagtgatttgagttgtatgtatgatgatgggcttcgctgcttttgataacataattccaaatgtatatggtttcagtttggactgttttgtgtttgtgatggacatgggggatcaggggctgctcaatccgcaatcaagtgagtctttcttaaaaaaatccaaatcacctctattaactatttcttttataaaatcctcctcgataggtcttattttgggttttctttgtatgcttaacctacgaaatgtcctaacctgaaaaaggctgcggttttggctgtgtttaaacttctaacagcatccgcctttctgagtttttctttattgtttttgcttcatttattaatcaacttcttatgtagtttaaaatttttagctgcatgtgattagccatgcaaatgtgttacagttagggcaggcgtggttacagccgggaacaaatatatgaaactttgttctgttcatttttgtaaatgggcttagtcattatatgttaggagccttcactaactactggagcatctttgatttacttgtgtctccaacaacggcaattatatacttgaatatataagctaattaaacttcttctccagaattattccggaggttctagcgaatattttatcagactcgctgaggaaggagaaagtgttatcaaaaagggatgcttcggacgtccttagggacatgtttgctaaaacagaagctcgcctcgaagaacaccaatatgaggtatttcagtttgtccttttcttttcctttgatggcatgtttgccttcttgacgacttggctggaactttttcattgcttcctacttaatgaattagttgatcgatgcagggttgtacagctactgttctcttggtttggaaagacaatgaagaaaacttcttcgcacaatgtgccaatcttggggattcagcatgtgttatccagtacgtaaaaaatattatattgctattcttgagattcgtagttgctgagcttgcattaaccagacttgtagcagcatttcttggtgtagaaagagggaggggacttgattactcagattagaaacaaagatcttgcgtgtttaaagcgtgagtgagtgtggtcttcttaatgaaaacctcttggtttggaaacagtagatgattactaatataggctttatagtagagtaaatagacatcaatagatgagattgtttcacgtcggagtagaatttttttggataagaaaaagaatatttgaatgtcgttgctttgctttgtggaaatagaaagagagtttatccctacatcttccttgatacggatcttaattaataataaaaaattctgatagttgttttgctcttaggaattaatggtctcggcattataatagtaacttcgactttcttaactgattacgatttggtttgcatttggcagtcttggtggcagatatatacaaatgactgaagatcatcgagtggttagcttgagcgagagaaaacgattccaagaagcaggactagccttgagagatggagagactcggctttttggtattagctcaatgaattaaacacgctcaggtgattgcaacttctttgtaacaaaatgaccaaatctgatgtgataattttcttcaggtataaaccttgcgaggatgcttggagacaagtttccaaagcaacaagacagccgtttcagtgcagagccatatataagtgagcctttgcgtatcgatcaatctagtaaagacgtatttgctgtattggctaggtaaaaaaacataaacataaacataataagctttttcccgttttctgattcttgctcgctaatttttgaaatccgaatactgcagtgacgggttatgggacgtggtaagtccgaagaaagctgtgcagcttgtacttcaggtaaaatcaatttctactcgttgagacatttgctatgtctgaaaacgtcgatctcatgtaatgtttatgttatggcagatgagagataaagagagagggagagagagtagtgcggagaagatagcaaacggtctgctgaatgaagctagagcgatgcgtacaaaggacaacacctccattatttacttagatttcgatacttccctgtaatgttaggaaacatcttttaagatatttgggaagtgtctttcttttgtgtaccatctttttatgtattagtatttttgttagggtataagagagacaaaaaaacctcagatgcagagatttaggatggatcgtcttggtgagcgacattggtttcattatctttacttatataattaataatattatcagttaaagtttctgtttcgtattttattctttggtgagaatgaatttcatcagacaatacaacttatcagtttagtatggactatggagtccgtaattctgagtattcattggtacttttggatttcgattttggtttttgattttagtatcaatacggttattctagagtttcggttcagttttgttccagctatttcagttttgttctttttacgatgtgtacgcaggcaccaaaataatactattttgactgttgttcggttagaagtagaaagaaaatcacagattttgtaataaaaatctgcctattttcggaatgaacacgtatacaattttgactgatatatatggaatgaaccaaaatagtcaacagtcaagaatttcaagagattttgggattctttcctcaagtaatcttactacctaatctgagttttgactcaataaattttagtttaacttccgttttaaaaattggagttgttgttcaaccttttgcatcgtactaaaacaaattaagaaaaacagaaccccaaaaagatttgaaattgaaaacaaagcgggcccaaaaatcaggagtagttcgagcgtccacactaaaagcatgtgtcccaacaacaccagatcctatcctctcaatttatgaaacgtcattaaatcctctcaacggttaaccaaaccccacacctcacatccttttctttccccttctctcaaccttttggtggaaaaaaccagaaaatggggttgcatccaatttccgacgccaatgaacacaatcccttcggctctctcaccgccgacgaattctacgccaaacattccgttagccactcctccgctttcatcaccaaccctcgcggtctcaaactcttcactcaatggtggtcaccactccctccaactaaaccaatcggtatcatcgctgtcgttcatggcttcaccggcgaatccagttggttccttcagctcacatcaatcctcttcgctaaatccggtttcataacctgcgcaattgatcaccaaggccatggattctccgatggactcatcgctcatatccctgacatcaatcccgtcgtcgatgactgtatctctttcttcgatgacttccgtagccgtcaaacaccgtcagatctgccgtgttttctctactctgaatccctaggcggcgcgattgctctctacatctcgcttcgtcagagaggtgtttgggatggacttatcctcaacggagctatgtgtggaatcagcgataaattcaaaccgccgtggccgttggagcatttgctattcgtcgtcgcgaatcttatccctacttggcgcgttatccccactcgcggatctattcccgatgtttcgttcaaggagccgtggaagaggaagcttgccatggctagcccaaggaggacggtggcgaaaccacgggccgctactgcttatgagctgattcgtgtttgtaaggatctgcaggggaggtttgaggaagtggaggttccgcttctgattgtgcacggcggaggtgatgttgtatgcgacgtagcgtgtgttgaggagcttcatcggagagcgattagtgaggataagacgatcaagatctaccctgagttgtggcatcagatgattggggaatcggaggagaaagtcgatctggtttacggtgatatgctgagctggctcaagagtcgagctgaaaggaaggcacgcgccgccgttgatggaggagcagcttagagtcccttttgagtctttgggtgttgtattgtagtccaataggactgtgccatctggcaagaaactatttatggttttactgtttcgtaatcgtagcacatggtttacagttaaaccaatacctttgggtatcatcaataatataaaaaatcgttgacaagaagagaaaaaaatatttgaaaattaatgtttcagattctctaccaatttcagaaaattttcaaataatggtcaaccatctgataatgtcgttgttttctccgtcaagggacaagagctcaaatcataaatggttcaagttactctgacatagtcgtctagaacaaatgtcaaatggttcaagttatgtactaagaacgtaagttaacaggccgtaaaataggcccaatagattaagataattgaggcccattaatccagtaagaacccaaaaccacataaaccctgcgaaattggcaggcggctgctgcactcgccggcggcagagatggggaagaagaacaagagaagtcaagacgagtctgagctcgaattggagccagagctaacgaaaataatcgatggagactctaaaaagaagaaaaataagaataagaagaagagaagccatgaagatacggagatagaaccggagcaaaagatgagtctcgacggagactcgaaggaggagaagataaagaagaagaggaagaacaagaaccaagaggaggagccagagcttgtgacggagaaaacgaaagtccaagaggaggaaaagggaaatgtagaagagggtagagccactgttagcatagccatagctggttcaatcatccacaacactcaatcacttgagctcgccacacgcgtaatctctctttctctctatctctcccttcgtttctctgtttttccattcccagataatttaaagtccccttcttccatttctaacatttctcagctcgccggccaaattgctcgtgcagctacaattttccgaatcgacgaggtatgtgattcctcttctttcaatccatagagcttgtaaaacttgttcctgttgcatcaaaaccactcaatgttgaaaattaattgtgctaaattctaaagctttttttgtttttgtttaaatcagatcgtagtgttcgacaataagagcagctcagaaatcgaatcagctgctacgaatgcttctgatagcaatgaaagtggtgcctcctttctcgttcgtatcttgaagtatctagagacaccacaatatttgaggaaatctctcttccccaagcaaaatgatcttagatatgtggtgtgtacttgagtcctttctcttcaagtttctcacttgtattcattctttttctttaaaagtgtgttgtgaccagattttgtttgattagggtatgttgccacctcttgatgctcctcaccatctgcgtaagcacgagtgggaacaataccgtgaaggtaatataatttccacatgcatctaatgagattgctttaaacccgtgacttcgcaattgctgattacatctttagagataccatatgaaatatcaaatgtcttttacaagaagctggtttggagaaatatgaataaagctgctacctttccttgttttagaaagctgtgatattgtgttttttgttttgtttcacctttgttttggaaatgataatcttttaggtgtgacactgagtgaaaaggctccaaattctgagggtacattggttgatgtgggtttaagcaaggtatcgttacttcctctcagcttgttatatctcagttggcctccattttacctgtttgttttacacattttttgcatgagattgacctttattcgatgctcgtgatgcagagtgttgttgttgatcaagtgctgggtccaggaattagagtcacggtagccatgggaactgaccacgatttaggtactgataatctctattttctttcaagttaccatatgcatatctgttttctttctttaaatttctatttagatcatttatatacgtttctctaagctacctacatctacttgttgagttaatatattttgaatttggttcatgtagatttggtacgccagattgttccaccctctaagccaagggaagaagcaggaatgtattggggatacaaagtacgatatgcatcacaattaagttcagtattcaaggaatgccctttcgaggtaataataatgatactcgtctccacatccttctacaacttagatcatatttcctgcataaccttatttcctaataccaaaagcagggtggttacgattatttgattggtacctcggagcacggcctggtaattagttcatctgagctgaaaataccaacatttaggtgattctcatttccccttaacatggtataagtttgtgtctaaacacattattagccgtttaaatttgggggactgactccaatggttatggcttgaaatcataggcacctattgattgcatttggtggacttgctgggcttgaagaaagtattgaagatgataatcagtataaggtaacctcatattcagctctttgtctctcacagtgactaaaaagttcttaaagatctaaagctgttttggtctatactacatgtgtttgatatggacactaagcaaaagactttgttttacaggggaaaaacgttcgagatgtgtttaatgtatacttgaatacttgtccacatcaaggtagccgaaccattcgagcagaggtattcacaaacttttcttattagttgtgttttttccttttcttatgttccgggatgattgagctgaggacattgtgtaataaatatgcaggaagcgatgtttatatcacttcagtacttccaggaacccatcagcagggcagtgagaagactttaagcttcgataaaaagagtcaaagaagctattttgttctcatagatctgaggtttgtctgaaaaagagtgatgtaatgtaactgttttagaatttggaccaagtgtttattcttgtactatcccaattttgggttcttacaattttcctccattagtggcagtgtggcacacgaagtgtactcaatttttacactgagtaacaaatttaagaggggtgtatttaatctagtattttaagtgatttgtgtaaagttcacaaattatgtgttattcaatcatggatttttaaaattctaatgaaatctagtggtattgagctaatgatttaaaaatctacctttaaatctactgttattgaaaacaatttgtgaatttcattcttattaattttgagaggattttagaaaatttctttagataaaaatacagaaattcaaatctcatagttttagatagaactttaaaaaagttttacaataaatcacattaacttttctaaaatcattaaaattatataaaaaatcttgttagatccgatacaccctctaataataatatcattgccaagtattgaaacttacgtttgttatataatgggtatgtagtttactaacaattacgtgaagtgggccgttaatttacaatatatttaaaattaagcataaacgcccggcccaaaatagagaagggtaatatagtaaaagcggaaagaaaggggttaagaccctccttatccctaatagaccggtgcgcgtgagcgactaaataatcgttcgtgatatcgatttctctcccgtctcgtttatctttcggggctaaaaactcgaaagcaacagcgatagagagatttggagaaaacaaaaataataaaaacggaacggcaacagaaaattaaataatctaattagaaactcccgccatggtgaagcagctacaagagcaggaggagaacgatcccgtcgagaagacaaagtctctgatctctgctcttaactacctttctcgcgaccttctcttgccttctcacctttacgcttccgtttcttctatttaccatgcctccgtctccgatctctctccttctccgcctcttcgtgtaagctgtttcttcgatttgcatgttaggatttgtggttgtgaatcgaattttctggctctgtgcttcttcaactccttctctaaccaattccttggagtttccttctcgaattcgatgaatccgaattcattgatttttgtgatttttggatgaagttatatgcttggattttgcagggaaatagttatactcccaatagaggtgatttgatgagcgagttcgaagatgcacttttgcaacagcgactaaactatgaatcaggctctcgactagccgagttaaaggaaactcggtataagaatcgtatccacaaccgattatctcaacttgaaggtgattgctgtttgactatgctgcttgtaattttttgaaaaagcctatggagccaattatcctgtgagatgaatgcttactcttgtgtttttttttaaaaaaaatcaggattaccttccaatagaggtgaagatttgcaggaaaaatgcttacttgagctttatggtcttaaggtatgtgtgacactagctgatcttttttattgtcagacattgtttaaaatatgatttccttgacactgacactgtctcgtttgtttatggcagttacaagaactacaatgcagggttcggggtgaggtgagtgcggaatactggctgcgtttgaattgtgcagatccggagagacaactatatgattggggcatgatgcggttgcctcgccgaatgtatggggttggagattcttttgttatggaagctgatgatcagttcaggaacaagcgtgatgccgaggtcatttgctttctaatccaacgcaaaattgcttgctcccagattttatatttttacctatagtgatgaagtctttcttcgaatggaaactgatggcgttttgagatgataggaacatctcatatatgctgatactatttgatgattttttaaactctttgttcagaggttattacggttagaagaagaggagaagaatctgattgaaacgacacagaggaaattctttgcagaagtactcaatgctgttcgtgaattccagttgcaaattcaggcgtctcatagacggtgtaagcaaagaaatgatggtgtccaggtatgatatctctgcccttatgtttttcattgctcatttttcttgtcattgaacccatgatataattgagttatgtatatccttaaacgtcataaatatacaaagtcttacaaacagaaattattgccatctatctaacaggcctggcatggaaagcaaaggcaacgtgccacccgagctgaaaaactaaggatcatggcccttaaatctgatgatcaagaggaatacatgaaactagcaaaggaaagtaagaacgaaaaactaaccctttttctagaggagacaaacaaaatctttgttagtttgggggctgcagtccagcgtcagaaagatgccaaactttcagaaaacaccaaattactgaaaggctcagaatctgacttatctgatgttgatgctcctgaggatgtgcttcctgcccaagatattgagatcattgactctgacaataatgatgattctaatgacttactagaaggcgagaggcagtttaacttggctatccattccatacaagagaaggtaactatgattgttttacaagtatttaatatgagtactgttaagtttgtttaagtcagctatcaatgctttttttaacaggtgacaaagcagccatcccttctacaaggtggggaactaagatcctatcaattagaaggacttcaatggatggtctctctatacaacaatgactataatggcattttagctgatgaaatgggtttaggaaagactatccaaacgattgcactgattgcgtatcttcttgagagtaaagatcttcatgggcctcatctaatattggctccaaaagctgtgctaccaaattgggaaaatgagtttgcattatgggcacccaggtatgttccaatttattctccattaattacattgatatggagtgtatgaacgttgcttcatttttgtccatttgacagcatttccgcttttctttacgatggatcaaaggagaaaagaactgaaataagagcaagaatagcaggaggaaaatttaatgtgttgataacccactacgatcttatcatgagagataaagcatttttgaagaaaattgactggaactacatgattgttgatgaaggacatcgtctgaagaaccatgaatgtgctctcgcaaagactctaggaactgggtatgtttctgtatgttactctggtctttgagtagactgtatctagtttcttaaagatgtttagacatgcctttttacgcattagcttgatgaagtctgaagtgaatggtgttaattagttgttactctgatttatctcttaaagatactgtcacaaaggaaatttaaagacattttgcttacactaatttgtcctggatgcagctaccggattaagcgcagacttctattaactggaactcccatacagaacagtctgcaagaactatggtcgctgcttaattttcttcttcctcacatctttaactcaattcataatttcgaagaatggtttaatactccattcgcagaatgtggtagtgccagtcttacagatgaagaggagctgttgattattaaccgtctgcatcatgtgggtttattatgcacctttttttggtttagaccctttttcttttatagaaaatgcgttatgcatgatacttgatgttaatgtcactttcaggtcataaggccgtttctactgagaaggaaaaaaagtgaggttgagaaattccttcctggaaagacacaagtcatactgaagtgtgatatgtcggcttggcaaaaattgtattacaaacaagttacagacgtaggcagggtcggtcttcattctggtttgtagctaaacttgaacttccattctctccaaaatgctttcatctttcggtaaagaacataagtcaggaagttaaattgctaatggagtccttatgtgcaggcaatgggaaatcaaagagtctgcagaatctgacaatgcaattaagaaagtgttgtaaccatccgtacctattcgttggagcagattataacatgtgtaagaagcctgagattgtgagagcttcaggaaaattcgagttacttgatcgcctccttccaaaactgaagaaagctggacatagaattctgctcttttctcaaatgactcgtctcattgaccttctcgaaatttacttgtcactcaatgactacatgtacctcagacttgacggtagcacaaagacagaccaaagagggattttactgaagcaattcaacgaaccggactctccctactttatgtttcttctgagcacacgtgctggtggtcttggtttgaacttacaaactgcagacactataattatatttgacagtgattggaatccacaaatggaccagcaagcagaggatcgtgctcatcggatagggcagaaaaaggaagtgagagtttttgttttggttagcattggatccattgaagaagtaatattggagcgtgcaaagcaaaagatgggcatcgatgcgaaagtcatacaagcagggctcttcaacacaacttctactggtaaaaagtcttcatatatatatattcttatcaactaaaaacatgatttggagactacatgctaatctctttgaatcatcaacagctcaagacaggagagagatgctggaagagatcatgagcaaaggaacaagctcactgggagaagatgtgccaagtgagagagagattaaccggctcgcagctcgaactgaggaagagttttggatgtttgaacaaatggacgaggaaagacgtaaaaaggagaactacaagacacgtctcatggaagagaaggaagttcccgagtgggcttacacttcagagactcaagaagacaagactaacgcgaaaaaccattttggtagcctcacgggtaaacggaaacgaaaagaagcagtgtatagcgactctttaagcgatttgcagtggatgaaagcgatggagagtgaagacgaagatgcttccaaagtctctcagaaacgaaagagaacggacacaaagacaagaatgagtaatgggtcaaaggcagaggctgtgttgagtgaaagcgatgaggaaaaagaagaagaagaagaagaaaggaaggaggagagtgggaaagagagtgaagaagaaaatgagaagccattacatagttggaaaactaataagaagaaacggtcaagataccctgttatgacttcttcacctaattctagaggtaaaggtagctcaaaaggaagtaaacgaaactgagaataaggtttctacaagtattaggcatttgagttggtctacaagtattaagcatcgagccattttctcataaatttgtctgttttttttataattcaaaccttgtgaaaaatatatctttttagaattcagagcttaaaaagatgagagggggaaattggaaaaaaaatatagatatcgaccgttgaatttaatagggtggttattagttcctattttacaaggaattttgatgattttaataaaattatagaaagtaaacaaatgaaatattttaaactattgcttgctagaggtttttttaaaatcttttagattggtttttcataatcttgtagttttccaaccaatctctctattttgatgatatttttcatgactttattttgtaaagaaaaatgtaaaaaaaaaactataaactaataacataataatttaattcattaacaatcatagattcttttgttttaattgaataacacaaaacttttattgactatataaagtaggaatccaacaattccagatttatgaagattttatactactatttacaaattttaaactaataacaccaaactttaacatatttttaaaaaatcttgattaaataacaacagattctacataacattttaagtcactaaaattctatttaaatcacaaatacataacaccccctaagttttgtttttggtaatttggcctgatttctcaagaatcaagtcatttgtttttctttcaagttacaaatggacatcaaatcttttctaccatcatcacagcaacctttgcaagtttagttttacaatacttggatcaaataccctaatatactagtattggtgattttgcaaatagaatgactgtttagattgccctcaacatatataacaagaattgttttgatcaacatgaacatgaatctggaaaaagataactgatctataattaccggtgaaacaaaaggaaatttgatccattaaatcgggaaatagcattaggtatctaaatttataatacgttggcaaaataggataaatagatgaaagagtactccaccaaaaagaattatgctcatagggaggagaagaggatcaagaagatgaccaccaccatgaaaataatgtcttttgctatgctacttgttcttttgttctctattggttagtctctcaccataaattttgatatttttggggatacaaagatgtattatataaaaagtttttgtttgatctttacgtgaatcttaaagatgaaaaattgttgtttgcatgttatagatgtcgttgaaggatccggaagttcgttgtgctgtaacacacatgcgaaatttggagcttgcaacacataccaagacagaaagagatgcaacaaatggtgtcttgatggatgtgataataagaaaggcggtttttgcaaacgttttgctggtggagcaaaaaaatgccattgttactgttaaaaaaaatatgtttttatgcttgcgtttgcaatcctcgattgcttattctaactagtattaaactcaaaatcttgtcttcactgttgattatatctttagtatgtgaaatggtcactcctgaaaacttctttcacgttagtttaaacttttcaagttaacaaaatttgtttaaaatcgtatctaaaccaaaacggtaccaaaccaaatagaatataaaattgttttgctcataggtatgacctcagaatagcgatacaatcgtgtttaaacaaaaaggaccaataagctatcggcaaaaataaaactaacaccaatgtctcaaatatgttttggtctttgtagcagcagctagagtaataatactggtacaaaacaaacaaaaacattgaaaagtaccaacatcacagacttaatcttcctgattaacttcaaggttcttcagcttcgattccagctcaccattcccattaccttcgttctcttcatcttcttcgtcttcctcatcatcatcatcttcttctccatcaggatcattctcatccaaagctccaagtaactctggggatttcttgaatatctctttcaattcttcaatgccttcttctgatatgatgttcccgtcaatgttcaacagcttgaaagcttctttcttcacaacaacatgagccaaggctcgtgctccggctcttcttatgtagttggtgctcatatcgatgtattgcagttttgagtgaccctcttctatacaatttgcaatctggacacatccctcatctttcagctcattctcagacaaattcaacttgttcagatcttgttttgctgcaacacaggctgcgatagctgaagcagcttcaactgttatgtcatttcctgccatctctagaacttcaatgggcgaagcagactcctttagagcgtttactatggctatggcaccttcatcctctagatttagataactcaagtaaagctcagtcatgtgtttgaagcttgaaagagttttgctcaaagaaactccggcttctgtgccaaacatattatcccgcagatcaagtttctccatatgagtacaatgctcaagtgcttctgacaaggcgattcccccttttgagccgactcttgtggaagaacaacggaaattctccagcagtggggaacgcttgacaacctctgcaatagcgagtgccccttcatctcccgtcatgttattatgaaaatgaaggaccctcaaattctctgttgaaggaatcaactcggagaccgcttgcgcagcttccttagagataccatcattcatcaaatacagctcttccaaagagctcagagattttaagagtgccccaaacgctctaacacccttctcacccaatgcattatctgataagttgagagacgagagaatactaccttgcagtgcgtcagaaaatatattcataacctcaagagcttcaagctcaggtcgtccagcaacaaagtcagacaagtcaacttccttaagctgatctttcaaagacgccaagataggctcagcgacacgagcagctcccaagccaaaactcctattactaaagcatatcttagtgtaggcattgccaggttccttcaaaggtttgagaagctcctcagcttcctcagcctcaatgaaagcccgtttacctttagaaatatcgaaaaaagtttcgcggggagacacagaatcctcagaaatcaattctcttgccgcaactttagcaacaggtcctttcttgagaacttctaagataagcttactgcattctttggcataaagctgtacagctgaaccaccatcaccatcaggctccctctcaaactgttggttagcagtggaaaaagcaatatcttcgatcctcttagcgttctccgtagcctggtctttggttaagctaccgtacttctcagtgaaaatagtcttggaagaaaaattgttggttatacgctcaatgagagcttttcttgtaggtaaactcggtggccagagtttaatcgaaaatgcatgaggtcgagaatcaagtatatcagccattatcgcaaatccagagttttaatatcactgcaaaaacatacacacaaaagttagaaataatcagaggaggctctatcgtaatcactaatcacttaggaggattaacattgagcccaaaggaataactaattgataaatcagaaaatgctgtgactaaatcaataacagagattaaggagagtaatctcgtaaagatcggagatcctataagtggatagtttcgagaagaagcattaaatcaccaactacgaggaaggaacatcggtgcttaatcacagggtaaaatcggatcagacaaataattatccgtttgcgatgagaataaacggaaatgaaaagcgtaccggaccgatgaagattgtctgaatctcggagctctgagactctctctggctgcaaaatcgagtgtgtttttagggtttctccttcaccggagctctttaaaactccctcctacgttcgttgaaccaaaagtctctatagactaatttaaaaaaaaaaaaaaagagaaaggttaataattcatcgtgacttgagtaattaatcactttggaagaaaacgtaattaattagaaccaacctggtaattttgaatctttcatgttaaagaaaactcctttatgtgtaatgtaattttcagtggcttgtgctacaaaatacttacaagttacagtctctaatcatcagtaatactttcgattgattctttatttgtaaaacaaaaatgggatattatgttctgtgttgaatcatctcttaattattcagacatgaactcactggtcaccactaccaatatcaaatcgttacagctacgcttagtcacaacctacccaaagtatcttttctcaacagagaggatagttggagagtggattttgaattgaatagtggaagttataccacaatggtatttttggatacaaagggtagcgatttcattcaagaccgattgtgatcagaggagattaattaatacaatacaaaatgaccaaaacgaaccaaaaagcacagcaaataactaagacaacccagtacaggacgataaagacctctaatggcggctcttgatctctctctctctttctctctatataattccttgtctacttacctctagttaagtgcagtcttcttcttccgcattctacaacctcaagctttgcaggtttgtagtagactttgttagggctctacaaaagtactctcttatctctggtattgttctctgcaccagctcgttctgcctgcattttccattcacttttgtttcagactaatagcaataaaacaaatcttagtggagagagagagtgacatcttgtttatattaccaaggcattgaactcagtttatcgaaatgctccaggatgaacatgatacaagcttgcctcagcgacatcgcatggaatgcttctgatagctcgtacatgtctcctatactttccaacgtaatatcctttcatattcaaagtaaccgtgtcagatttcgttaagtactacgcaaaccacatcatcactttacattgtgatataattctggctcacctgagcaattgtgtattcacagagtcgtttcaggccctccaagagatactgatccgctgctcttagaagatcttttgatatctcatttgttatgtcgacagatccagtgtatataaacctgaaaatcataatccaagggagtcaattacgtgtatatgaaaagttctcacagacttttcgaaatttcaatatctcgagtgagtcaatcaaaagcatgcagaggttcattcatcatacctcatcattaactcaaacacctcccatttgatatttggaatctcaatatctctagcgtctttttcctgtgatataaacgaaacacaaaccgtgacacaattcaggtctaatttccccaaaagataattgtattcctttgataaatagcagaccagcatacatccatacgtcattgtcatcaaaatatcatttaccccacaagaacattatcgaaaaaccaaaatatttagttcacttactctgtaaccaccatcaaacattgcacgaaatgcatctgaggatgccagcagacaaattctgtgtgcatagaatgtccttcctgcagtatgatttttctgttttacatatggactttgaagctaactagagttccacaacttctggatttatatatgattaccttcgactagaaaggttacatcagacagcgtagcattatttacatattgctctccgagataaacctgtcacaaaaagacatacagaatactgcattgagacttccacccgttacctataggagaactgaagcagaaaggaaactcaccctttgtgttggagaaggaggagcagcatcaactggagaaagtgccatagatttatttgctaatttgtacaacgctgctgcaccgtcaagttgctgcttagtgtttaaagaaccaagaagaccgagtagcaactccaaccctgtcaaaagacaactcaatattaactttttggacaaagaacatctaaactggacggttaacgcattaaacataacgcatgcatctcatttagctcatgaaaatataaaaaaactgtcacatgccgttgtcatctatgaatatggttcgttgatcctcgggtgaacagagatgagcaagggcaagagcaactcgtctttggatagacttctctgaaatgcgcattaggtacaacagatgtctcagaacctacaaaagaaaatcaaagcacagaaatctcaaaggttgaataaagaaatgctaaacttcaacagagcttcagaaactcaaccaggataaagcagttttagtcatcaaagatggaaaaaaaaaaagaattaaagaaaagtatagtttcacttactcttccatgaatcttctcctccaatctctttagtgttttggaaacacaatctttagttgcctaaaaaatcatgatatattataaacaccttaaggggaagagtaaaaaaatacgattaaagctgctaagaaacttcagtatctagccaataaaggagtatgacaatgtggttctgtaaagtagaggaagagtggcaacgccatacatacttgaacaataaactctccatcctgtagcttttggatacctcccaccctgataaaatctgacacattatcctaggggaagaaaaatggatcaataacccatttaccgacgtttaccatcaaattctgcataatgaataaaccgaaagtagcatacagcacacctcattatcggcaaggccataaagagcaaatgcagcattgtgttgcaatgatccatttcttgaatcgagaagcttcaataaaggtcctaaaccaccactatgggcaataccagcttgattgtgggcatcctgcaagaaagagtatgctagaaatcaaaagacacatcggttttattatttaatataactcactacttaaaagttccccctaatgaaaacagatttagaaacacaataagaatacccatcttccacaaccatggaagccagcttttttagcatctataaatttaaaatcaaaccaatcttgaagtaaccaataagaaaacagttgacaatcaaggcaacagcaaattatccaggatcactaggaattatttgaaaacactaagaaacaaaagctacaaattaataacagttgtggtatcaaatgtttgatctggaagtaagaagaggtaacatctaaagcgtgaagttactatttcacaacactcaaatgggaatgcgtacactttcataaccgaactaccaaaagttttaaaagaagaacctgtgccaatctacccagtgcaaaggccgacatttccttcaactggacatccggggactgaagcatctcaattaaaggacggacagcacccctttgcacaatgtgcacctgcaaagttataatttgagcatgaagtgaagaatgaacaaaacaaacctatataaatcagggaaaatggtagaattagtgagaaatgggaaggtatgttctacaaatcaacagaaacaaacaacttatcacttcgtataaccaaacaaaaaaagatataaggctttcgggaatggaaaaagagctgaggataaaaaaacctgggatgaaattgtaccttacaatcagaatcagttgaggcaaactgcccaagtaataaagccgcctctctttgactctcagggcaacaggagctgtaaaagaaaaattcaagaaatcaaaagaatgaacttggggttaacagcgaaataaaaacctcaacaatagagaagctggtaagatttcagctctagccaaagtcataacaactctatgctgaaccatcaaccatgtatatcaaaatggtgagggtccacatacctaagaagaccaatgacaggttgcaacgccccggcagtaagaacctcttttttaatgtgtggagacgagtgtactagattgcctataactccaaccttaaaaagcatgactcaactggttatttcaacgtcaatcccacatagataaataagtagcaaaacagttgattataaaaagattcctaaccgcttcataatgtatagcagcatcctctgatcctagcattagaataagtgtgggaagagcattgcattcaactatctgcaaagaaaataattatcatgctccggctaaatctaagtagaagctgtaagatagcaatatttacctgattcttgttatcatcatttttaaatgcaagggttctcaatgcccctgctgctgctctctggacctttgaatcagaaaattcaagcaactccacgagaggtggaataccgccttctaccctgtttgtcaaactggaagtcaagaggatagagttgtactgaaaacaaatctcgaaaggagaaaaccacttaaatatgctgacctaacacgggtcttgatactgctgttctcatgagcaagattggtgatggcatcagccgctcttctgataacactattcacagctcgagagctagaaccatctttgtttctcttcaacaaattcactaaatgaggtaaggcacctttgtctactatcagtttctgatactctggctgttaagaaatcaattccacaacacgatcacacaaacaatacataatcccctccgtgtataagagttcaattaccaaaattttgccttaaaaaaaattgatttggatcaacaaaacaaaaaaggaaactactttctaacaagctaaacacactatacaaggagctgacatagagaaaatgaggatcacaaccttaatagcaagaagaccaagcgcaaaagcgcttcccttctcaacttcgtgttcgtacggcttctcagccaagtccccgtcgttgtatggtggcgcctgtagatgcgtcataagagctggaacagcacctccgtcgacaatcacgttcactaaatcctctgctgaacatcaaaggtcactagtcatgcaacaaaatatgaagaaaccggagaaaaaggagtaagatcggaagctgattttcaccgtttttggctagctcagccagaacttgagtggctcgcttggcagcagcgcgatcggactcttgccaagagaaggcagagtttagtaccgagacttgagcagcaacctcgctaagaagcgcttggcctccgtcggtgctgacggcagagatctctcgatcttctacggcggcggctccttcctctagcttccgcttctgtcctttacgctccggaaaactccggccttctcgcctctccggttgttggtccatcgttcacaaagtaaaagacgatccgaagaagaggagagatcagagaagaagaagaagcagcgttttgaaatcaatctcaggcacaaaagagatcaggggtattttcgttatttcattcgactcacaaataaaaaccctttattttatttttattttgtatttctagtttaaattgtaagaaaagaaaaaaacaaattcgtacttgggattagagtattagacataaatgatctttcttattaatgtccaaagaatgtataattgaaacgtttttaatttttcgtttacatttttgattgtttatatattgaaatgtttttagacaaatatatatatatatatatatatatattgaaatgtttttctagcgacatagtgctaatttgcgctcctcactggtggtgccgatttgctaacttgggcgtaccggaactgaaaagatattgtcccactcccacctcgaggttgtgcagttttattgcaacaactaaaaacttattgttgatggtttatagtcattattagttggtatcaataataataaaaataagtaatagtaaggcttttgaacttttgggtggtctgccacaaaggagacgtgtttgaaagtgtgaataaaaatatcaaagagagaagaaagaactatttctttaatttgagaagataaaaggaactatttctttatatatggtgaccacatgaaatcaaaacttcggaggcacgagcatgctttgaacaaacaaaggggaaaaaaaaaagcgagaacaaacgataaagtggaagaaaataaaaggtttattcatagaatcatagctcattatgatatatggaattcagcagcatatctctttttgtgcctctctcaagagcaatagagcatgtatcttattatttgtgtttgtaaaaatgtgattgattcactatgagatcataagaaataattattgtgaggtctaaagtgggcaaatgcctaggtagtgatgtgtgtgatgctatgtagtgatgtgtgaagctagctggtatccatatatacatttttttcttataaaagtatcaatatataatgatatacatgttacttgcaatttttttattttattttacatttcacataaataatatatttgttttgtaacccaatcaagatgatataatgtggagtgtccaatagaagattttcgaaaataatgggcctgatcatgagccaggtctcgttgctgggccatataggcatgaaattcccacgtcagccgcaatggaattaacggagagagaaaaggtcaaaggacctctctttgactcgctcttcgtttttgatctccggccggaccagagggtcaacaccttctgctctctgaccttacctaaaccctgaaccttctccgaatcacatgccagaccattgagattgttatatacttatatatgtttgtttcctgtgttttagaatcatacaaaactatagtctaaccgggccaagttccaagcaatcttcttgagaaaccaagacttgatcttagctaagtcacaaaacttcctagtgggtttcacccatccgataagagttatattatatctcaccttaacgttgaactacgaacaaagacattagtcgttccaaattgcttaaacaagaacagtaaaattcttttttcacatgacacaacatgatttaagtttttgcttcttttatagcatgtgtgtgaagttagatatcttaagttacattcgtcacaaactggtagatggcgagtggtttcgctctgcttcatgttggtctaggccaataatcctttcaagtgagaaactgtatctcatcgttccgcttgactacatgtagacattttaagtggcaagaaaactcgtatttctatagactcggagttagtgtaggtttcatcttaagatgagtacaaagaaaaagaaaatagtgatcccaggctaagacagtgtatagactcgtttatagtgtttttgtttgtccatccattctttgctgtattttttagtgtagtgaaagaagacagcgtggcattatcatgattgaagtcatatacagatctaacgaatacgtcaaagattgatttcacttttttacagaattagacatgatgaattttgatgtcagggattagtttgaatgttgggttcaaaacgttaggccagagagagttacagaagtggaccctgtcttataaacgttgagccaaagttacttggtggatttttgctgagagaaaaaggatctaaacaaaacatctgaaacttgcatgtgcacatcattcattatcaatacactatttgctctttcgttatctttggcatttactcttttgtcgctctctcaaactaacaaatcatctaaagtgtaaaccaaagatttgatctttctaataaacccaaacctttgaaaactttaggcttagatactgacagagatacacaacaaagaacaagactttcgaatccaaatacataatgaaaaagcataaaaatggatgtgttcaatgatgaaatttcttattgttttcgggtatgaaaatgcccatcacatttacactgtcacacctcagatctcaatcacaaagatccatctaatcacaaaaacccaaccaaaggataaacagatatataagtcacaaaaagataaacagatatgttgatcaagttcatctctcaactctgtttttctggagccttagaggaaacagaggaggcaatcgagaagaggacttagacggagtacaaacaggaacatgaatcattggtcttatcctcatagtcacagatctcgttctctctaaccctttcttacctctcttcccttccttctctctctcctccttcttcaccgcatcgccaatcgaactcgaagaagacgatgtcgagcttgaagaagaagacggcgagagagacgataccctcgttgaagccgtcgtagtcgtggtagtcctctgtttcttcagccgcaaaagctctttccacagcacagtacattttggtggacgtggagaagggtcgtcgtcaagaaaccagcttcctctgttgttgttgttgttgttgttgttgttattattctcttgctccttgttatgaacaaaaccctcctcgttcactactttatgatcttcttcttcttgttggacttcgacttttggtttcaatgtaacgtttttaagcttctctgaatgcttaacctgccagaaaggaagtaactttccttcggagaacaactcgtcagcgctaagcatcgttgcattttccgacagaaactcaaagtctccggctttcactgagctcttgtctttttcttctctacccacaatgagattcatcacagggttgatacagatgaaatctccgtcgctatctgatgatgacaaatccgctgagaaggaaatgcgaggccctgtcgtcgacggttcagcctcagccattgtcgccgtttctgctgataccatgatcgtactatgtaacaatggagctagttatgaagttacaaacaaagcaacgtgtatagagcaagtggactttgtgagagagaagtgaagatgaggttataacatttatataaaggacagagagagagagagagaagggatgaagtaagaagaccacatggacacgttgagaaggagacaaattacagagatgtaagaagagaagaaggaaggaacctatggaagatgaagaaagatttagataatgaacatgcattatgcatataaaatattattcacatcgatcgggagatgcgttggataaatagtaagaatatcgaatatttattttgttttttcaatgattaagtctgcttaattatttgaataatgtagatgtggatttgaaagagggatcaagggaggtttgactgaagattaaggaggaaaaattgaacagtgaacacatgtactcacatgaccttggtgtctttgccatgtgagaacaagtacaactcctaaatacgagatacatataatatctcatctatatttgtgttcttcttcgtacaaatatttaccattgggcatatcaaaattttagttttaccattaggttaaatactttttacagtaaatcattggaagattattagaaaagaattttgtctctataatcattaacttggtaaatactcattttctcatcttttcaatattaaagtcattttaagtttttttacacaatataacatatttaaagatatgttgtatatgttgttaataaattatataaaataatactttattacactaaaaactgcgtaactttatatttgatcagaaatgaaacatatacgtaattaattttatgaattgtaaatacatcaacttgattaaaaaatacacataacttggataatttttctttccggacttttgtcttcttcattttcagattagccaactgtctgtcggataagacgagatagccacctattatttgattcacgttcttttggcttctgcttatgaatagtcgaatacaaatgtgatatgtttattatttgtaacaaaaatgggtatttcgatcagcttaataaacatacatggtgattactcgatattaacttggagacacttttgagcagcggttttattggtgttggaccactcctttctttgttttggtgcagaattatcattgccaaattaaatacaaaaaatattattacgattacataaacacatccccttttaaagtgccaatatgcttcatttgtttagttttttcttttgttttctttttttctgcaacagtgcaaatattaaatgctgtcgtcgagaagagtgggagagagacagcgatgttaccaaagatcttaacattactaaacacatgtcactgtttatcattaactgtccattaccatgcaatgcaaaacacaaaattccagtctatcctatataacttttcaatagtatttgtttccactaatcaatcattaaccacattacttatatattaactcatcactacatcaaattcgtcaatagtatctttcaagttgtatgatatacatatacagaaaaacaagaatcatggtgttcaagaaaattcaataattgtaagtagtaactagagaggtccccaaaatgattttatatcattgcatttcgctgtgcttgtgtttatataaacatcaaggattcaagatggtcaaggaaaaaatgaagagacccccaaaatcaaatgaggacttcattattggttatgattaaaaacatacaagtgaatattttagtttgtaatgtataagagaaacaaagtgtagaagttttgactttgaccacattattagaatctttattcacgtatgaaccgattctcaatgcaaagaagcacatgtatccatccacttagagccaaacaaatgcatacgtggttaatgttgttgaacttctactctacgtatatgattaatttgtacgaccatcatcatcattaatatcttctcgaaaaaacccaaacaaaatctagaagcttatgtattgtcatgcacattttatgtttaactacaagaatgtcactgttttggtttgacagtgaccataaggttcaataaatatgcaaaaaaggcaccagaatcactgtctgagattttggtgcgtgcatgaaatggagcaaggtatcaaatccattttttgttttagagatggttaacgattttttttgtataaatgttgtgcaaatccacaatagccgaaccaaccttcatgttatgtactagctagtttggactagttttgccctgtctcatagtcatcatggcttcactacaacataaaccctatccaagataatgttttcactcaaacaacttgatagtcacatactcacattcattccaagaaaacgatgtgtaacaaatcgctaaaaacaatatgttttgtcatcacatatgtattttggaatttcatcgagtggttgatagccgtgtacaaatttttcttcatagcgaagtcgattacaaaaatgaaaaataacgaaataatcaaaatcttttattagtttcattaattgagttttattgaaactcaattttaaaataataaattaaagaaaatcaccataaattaatttggcgtctataaacagagaaattaaaataaattcctttttctaaatttcgtttacatcgaattacccaaaatcctaaaaatatacaaaaataaaaataattgatagaccggtcgggatatttggcgagccgacccgtcgcgtcgtgggtttaggtttaacgtattggcgcgccagtgaagaaaatagacgacgatggcgatgatgcatcctccgcagccgccgcaaggctcctatcaccatcctcagacgctcgaagaagttcgaactctttggattggtgatttgcagtactgggtcgacgaaaattacctcacttcctgcttctcccaaaccggcgaggtatctcttcacctctttgtttcctcagctttctctaaaagctgtgactttgtcaatttccaattcacagctctccattttcctgggtttattcgccatctaggaacaagataaagcagtgaattttactttcgggattttaagggttggcttatatttctcgtgctttattgaaacactgattcttaatatggttttgttctctctcgaaagactcgcacgatgttctatgttcaccgtctatattttatgctcctaattcaataggtagcagataggtacttctgtatctccttttcgattccacaataggcttttgtttctgtttcctgcaagtaagatttgttgttagaaattttcttctagatccttctcttaactctctaatttatatctttgtatgtgcttaatttattaagttctggtcctatatgatcttcaagtgtgtcaagattgtaatggtttatatacacatttgtgcagctcgtttctgtcaaggtaatacgtaacaagatcacgggacagccagaggggtatggttttatagagtttatatctcatgcagcagcagagagaactctgcagacgtacaatgggacacagatgcctggaactgagttaacttttcggttaaattgggcttcttttggttcaggacagaaagttgatgctggacctgatcattctatctttgttggagatttagcacctgatgttacagattatcttcttcaagagacattccgtgttcattattcttctgttagaggtgccaaggttgttactgatccaagtactggacgatcaaagggttatggatttgtaaaatttgcagaggaaagtgaaaggaatcgggctatggctgaaatgaatggtttgtattgctcaacaaggcctatgcgtattagcgcagcaacacctaaaaaaaacgtcggtgtgcagcaacaatatgtcaccaaaggtatgagaacaaaacacgatacgtgattttgttaatcagattttgtttagtccagcttatatactgtttggatatcatttgcttaactgggagtttttgtctagctgtttacccagttacagtcccatctgcagttgctgcaccagtccaagcatacgttgctccacctgaaagtgatgtcacctgtacaacggtaagttttatctgaaaagcttgagtttttttttctcgtcaagtctcctgattgttttcatgcattggttttggtgtacagatttcagttgccaatttggaccaaaatgttacagaggaagagctgaagaaagcattctcccaattaggagaggttatttatgtcaaaatacctgcaacaaagggatatggttatgttcaattcaaaaccaggtaggccacccagtaaaactcagtcacttgcgattgcttccatgtatcagtttgtgatgtctgctcatttctagctccgttgactagcattttgatatctgcccttgttgaccccaggccttctgcagaagaagctgttcaaagaatgcagggacaagtgattggtcaacaagcagttcgcatctcttggagtaaaaatccaggacaggtaaaagcttactgatgtgatgtatgacattattatacttgctgtgttcactgaatgtggttgatgacctttggtatttgttataggatggttgggttacacaagcagatccgaatcagtggaatgggtattatggttatgggcaaggctatgatgcatatgcttatggggcaactcaagatccatccgtgtacgcatatggtggatatggctatccccagtatccgcaacaggtaaagacatgaaaacttataaaagcttttgcaatttatggatacttcttgtttttcatggtcagacaattttttagggagagggtacacaagacatttcgaactctgcggcgggtggagtagcaggtgcagagcaagagttgtatgatcctctggccactcctgatgtagacaagtaagattcttattactttcttacaccttcttacctgggttggtgtctcgttgaatgccccattcattgttttgttcctctggcatttgtaggttaaatgctgcttacctttcggttcatgcaagtgccatattaggaaggccaatgtggcagcggacctcatcgctcacatcacaattgggcaaatgatcgggaagagaagaataaaatggtgggtgctttgagatgtttagtgtgtccatttcactgctctttgtctgattgtttgggatttttctgtaatctacagttaggatctagttacaatgcaaaatcatgaatcttccaacttttctgccatggtcaatgataatgccttttacttttttactcacccgttaaattaacaaacaccactaatgcacatacaatcgaattgaaaaagaattctgatacattgagaaacctctgaaacttaaaatcagtagtagacaagcataaaatattcacgaacatgaaacacctccctaatcccatttttaagccttgctcctctctcttggtgaatcatgagcaacccaagccttcttcttgatgttcttatgtgcttacttatctgttccagtggtgtcatttgaatgatagttcacgccgcttcttaggattaggatctgggtttccttttctcatcatcgccacaaattcctcgtagtttatccgcccatcctataagaaaaaatgttttgtattattagattgttgttatatgttcatatcaatttaatttgtgatagtgaaagaggcttacattgtctccatcaacctcagaaatgatttccttaatgtctctgccatcgttcatgccaaactcccgaagggcttgctctagctcttccgttgtgatatatctgcaaggaacagagcatcatttggttttggtttcaaattgtatcagaactgttacacatgtgctcaattacttacccactgttgtctttgtcaaagtgttggaaggctgagtagagatgctcttctctgtcgagcctgttgatgtgcattgtagctgcaatgaactccccatagtctattgttccattaccgtccgcatcagcctatacaaacacagaaaagatcaggtctctacatctttcttaatggataaatagcacacaaaagaaagaacagagtacttacagcttccattagttgctggacttcgtattcggataaccttgtaccttgcttagcaagtccctgtcttagttcctcaagagttatggttccactgttgtcagtgtccattcctttgaacatctcttttaaccccatgatttcttcctctgataagcacccggctatcacctgtttgttgatgatgccaatgagatatatagaccaaaagactcgcattgtttattacaatacatatatggttttgagaagaatgttaattacccgtaaagcaactttcttaaagttgttcattgctttgaactgcttgagcctagacatcactgcattgtcaagaggaacatccggtgcttctccatcctccttgatccatggatgatctttaaaacaacaaaaatgtcaagaagagttcaatgaaatatatataggagcttttaagataagagctgcttactgagaacttgagcagcggttaatctttgttttggatcagagttgagcatcttcctaacgaggtcttttgcctgtggtgagatgactggccatggatcgcttgaaaaatcaacctgtccacttaggatggcattgaaaatcccattctctgactctgtaatcgaaaaaacaaacatgaatgaatcagaagatccctgtcttttgttttgacaagatagggagggagtcagatatcattaccagcccaaaaaggtggaacaccacacaggaggatatacaacatgacaccaatgctccaaatatcagcctctggtccatacttcctcctcaacacctctggtgcaatgtaataagcacttcccacaatgtctttgaacacctctcctggtttgtagaacacggataacccgaagtcggtggctttcagaggagaattctcatccttgctaagcaacaaaaagttctcaggcttcaagtccctgtggataacccccatggaatggcaagtatggataatctgcacaatcgtccgtagtaacgaggctgcagctctctccgaataatgtccctttgcgataatcctgtcgaacaactcacctcccgcgcaaagctccataaccaaatgcacagaatgcttatcctcatacgctcctttaagctccacaatgtttggctgaccggtcaagtgatgcataatctgcacctcccttctcacatcctcaatgtcttctttgttcacgagcttccttttagcaatggtcttgcaagcgaattgcagccccgtggccttttgcgtgcagagatgagtcaccccaaactgtccacgacctagctccttacccaatgtatatgagctctttacatcttccattggtcgccctaagacaggtcctattggtccttgtttggttgcaggaggaggagatgctggcgggtgtttagaagctctaacagaggcttcagcggcaccaacaccgccgcctccattttccggcctcggttcttctttgttatcatctgaatctcttccatgagagcaacaatttcccattgttgcaattaaggggagaggaagtaaaagttctcaaccaggaagagaaataaaaaaaatattaaagatcttttcttcctctgtctgttcttttaggtttttggtttcttctttagcaagaaaaattaggagttttttgcttatgaaatggctatgagtagcatttttctgtttttgtaagttttttttcgttttgctggccttcaagttcaaacgataatgatcgggagggactttaggaaccaaaagcagcctgtctctgtatttttgttatttattttaggatttagtacaaaaggttgagagcatttcctggagaattaatacggacttgcctgtaatattctaaatttgttatctatattctcaaaaatgaaccttatattatatagtttattgaatacgaatttgcaaatctaatttggaattaggaggatacaagaaaaagagactaagatgctcaatttcagtaagtaggaattgatgggtcaaccttgagagaataagcttgtatcccaccagtaatgttgtacacactcttgaagccctgaggaacaagagaacaagccatgaagatatcataattgcatatgtatatatatatatatatatatatatatatacttataaaggagcaggaaagctttttacctgagactgtaaccagttggcaacctgcattgacctgccaccaaccttgcactgtaacaaaggccgcgacttagtagagaagaactttaaaaagtcatttcaacatcagaggttcctttgtttcagatgatcttagatttcttatgagaggctctcaactcctaaccagataaatacccaaaacaatctgctgggacacccataataaacccagccctcactaactgctctctaaccaacctacaacacctctaaattgtgctaggctagatacagtatacctatatctaacagttgagaagaggctgatatacataccaagacaaatgtatccttctcagggttcagctttgaagtgatgtctggtgcccatgttccaaattggcggagtgggaacactttgaatcctggcaaggatgctatctctctggtacaacaagtagtgaaacagaatagaagaaagcaaatgtgagttgactatggatactttgtcctccttctaagataaaaatgtgcaaggtacacatgaatctaaatggcagagcaatcaaactcagcaagatacacatgaatcataatgttgagaaagtatgaagctaatccattgggcttcattgaagaaggaaaagtatgtcaagatgagaaatgaaaggaacttacatctcattgggttctctgacatcaattaactgagcctcatccatgaaaactggatcttgcattttggaatgcagctcctctacctggatatctttcaccggttctctgttaatataaaacttttcgtcaagaaatttacaacagtcagatagtaaatgtcgctaacagcggaggatagttttcagaagaattacctctcagatagaacttgcaataagtgcaagccaaattgggttctacacctcaccacctgattcagctctgctttaaacgcagcttcctcaaactctggtacctgaaaacaattttaattggtctgccatgttcatatcgcagcaggaacttgccaaagtccaaaacattttggaattactttatcattggttacatcctactacttccatttgcacatggatgtcaatactgaaactttattcaccagggactgttacatcacccaattgtttgtgaaatatcaaggctaagacagcaagggtcctatagatctgaaggtgtctatgcaacaatataaccaaaataaatagagaatattataaaaaagagagcataccatttgacccagttttacccatccaagtataccaccgtcctttttggaaggacaaatcgaatactcagccgcaagatcactcatctcctctcctacacaagaaacagttacttgaaaaaacagtagacagccttaatcttctaatacaaacaaaacaaagtgacagtcgagtaatgaaaaattcatatatgtgtcagtatgatatgtgctaaccaaaccccaaaaccaattaaaatcgagtaagcagagacgccattgactatagacattgcgacacataatataagttcagctccacagcgacaaagctcatggcagaaacaactataaaagcttacatgcctagctactatgtatgttgaaatatcaaacgagtaaaaaaggattcaagaatcagaccatccaagaatttcttttggagttcggcaaagagctcaacatcattattcttaacaagcaaatgctgcaccagaatctctctacttgcactacttccactactcccactgctaaacgaagctgaaaaaacaaaagataatcagaaatcaacccaatcagaaactaaataatcaataattcagatatacacagttcacagagcaacggtaatcgcacatgaattttgaagaaaaatcagatcagagtaaaggtaaattcgttcctactagaaatctgagaagatgctctcgcagtcaagtctttgatacagttcatgttttgttgtacctctcattttgagagccgggaaaccagagagtcgaatcgggcacggagaaggaatgcgtggtcggagtgaagagatgcgtccgccgagaaattgacgagaaaacttcgagaaccaacggagatggggaggagaggcgatagcgagagtgggagttatggaaagtcttagagcggcggagaaagacgccgccgccaccgctggagatgatgccgccgagagagttccggtcactctaaacattatgggttcttttgggtaacgagtccaagtgtgagagaaatttacaagttaaccactcaaagaagactgaataatatgggcctctgatccacaaatactgattagtgttttgtgttcgaactttttcagtagtttttgttagtgtcatcaacttaaattcaaatccgcaaattgtatgctgttgacaaaaaatatgttgataattgatatacatcattacaaagtacattatcctctgcatagtttttgaaaagcaaaactgaaaactaaccattcttttgtaaagaatgcataaaaaaatttcttatttgacaaaaaaagagcatatgctaagatgagaagagagaaggaaaccaaataatgttacaaaaaccaattttcctgccgctatgtggatgggggtgaggggataattgaatcggaagtgttagtagatggtgtccaagcatatagaagcatgccgactacaaggatgattgtgcctgcaacaaacccccttggtagtgtagatgccaccccaaggtatggtaggggaagcgtgaaacagtacaccgctatgggcactgcatcgacaaagccaaacaaggttctgtatattacaaatgtttctcttctgcttataaatgatgctaactcctatgccattccaccaaaatttatgaccaaaaaaagtttggttgtttataggattggtacagcattgttgacttataagatatcacatagatgatgatggtatatcattggtaattactaattcgctgaagaagtaggtttccatgaaagcatggcaaggctacaacgagacaaagttttgtacctgaaacggtggatgccagagacgacacaactgcagatgaaatcttgatgaggcgtagaagagagatgttataagccatgttcatcatgacaaacattacaggaagaaggggagccccttcgcatcctgtgtcatacccaaattggcgtgttacacaggaaaaaaacagagatactggagcagaaagcgttagcatcaactacctgttattctagaaccaatatttagaaagcaagcacccccgtctctgatatagctcggtagttggttaaacggtatgccccaaagctttgaaagaaaaggaagaagcaacgcaatgcatatgacctgggtttaccacaaaaagatgcacattagctatcaaagagattcacattcaatgtaaattaaaaaaaaagagctacactaagaattcttacttggaaaattgaaccatatgagtttacaacaaacaaatcaagtgaagcaccctgtaataataagaacagatttctttcagaatccaacactcgcgaatgttgttaaagggttccgcggtataattaccttcaatcgctttttgctatctagaaagatgacttcctgcaaggatatgaaatgtaccgttaaagagaagagcccaacatcttgaagttggcgacctaattagaaaatgattgacaaaccttcattactgtatctgctccttgaagcagaaaagaaaacaccataagaagactccaaagtattcctgtatctttaaatgaatgagcggcacccgacccactgaacatggatgagaaagtagtatataaactcaacatggatgaaatttgttaaaactggttacgttgtgtcgattgagaagtctaacaaaaggaaagaagaaaccaagtcacttaaatagtatcaagcaagttaattaagctggcgaaccttgctacactgacgattacaccaaatgctacaagagtacatcccaatatttgatttattctatatctcctcccgagaaatataatggagaaaagaatttgccagacaagaaatgtctgcagagaaataaatgacaagaattaactctgaaacatttttcagacaagaaaccatatttttagcaaactagctaggaaatagagaaaatatcaagtttgagtgaagaatttgcagcttttcacacaccagaacaaaaatttaggaatattaatgttgtactttgatcttatggaagataagagatagtaatgttttcagattctaacctgagataaaactgtagtagatggtccagaaagatttgctgagtcaagaaaaacaacagtggtaagtaagatgaaaagaattgattttcatgcatcagtagtgtttagatgtataatttctttagctgtaattacatcgaaaaatgaattaaacatctactgaaaattacagtagaaaatgggaagggaaagaagctttaagggtaaacctacatgcggccgccatcccagcagctagagcaagagactccaagacgccaacaattaaaaatggaagttttggaactgatagcatctcttttgtaacaattccagctcggtatctgaaatacaaaatcgaaaagtatacagctacatacctgcaaaaaaagacatagcaaaataaaatttgtgttttttgtgtaaatagaaacaagatacatccaggaaatcgattgcatgaacatgacagcgatttatccacattgaagaacaattagaacaaacttcaagcttactttctctttctacaagtccgagatcatgagaggaggagttcaacagtagaataggtcaaaaactgtgaaaacacaaattacacggccaaagtcacatttttactatggactaaatttcggatgcatcaaacacaaaacaatcatatacattctctacaatatatacattacatttcttccagtcccagagtgatatctaatgcgtctatctcataaactgtcactgctaatgtataaaccggtgaatagaatttcctgttctcagtagtagtcgacattttaaaaatctgatgcaagaaggcaacaatcaacataccaacttgcacatacataaaaaaaaacataccaacgacccatatacaaaagatagtgagacacgtgatttacacttggttaaatgaattcagaatattaggcacgatataaatttcgttaaaaaaactctttattaaactcaccgcagatccaacaaaaaagtaattaactcactaattaaaaacgaatagcctcacgtaggtgacgcagagcaactcgcacgtgagaaagcgtttaaagtgcgcataaaaatattttaggtgaagataaagtaattgaaaaaagtcgccaactatgacccatttgttccaagagagaatcttgtgataattacatttttacatacgaatatctgggattccattttccaaacgtacggtccaacaattgaacacaatgaatgctagatcatcaaaagagaccacaaatcgaaatcgaaatctcaaaaccaaaactgaaatctaatattagccatttctacaaagagagtgaggaagagagagatttgttacccgaatgtggagagttgcgcgaggaagaagggatattgcttgagaggaataagagccagcttatacagtacgcgattcccgacacccagcgccgccgtggtcgccgctgctattactatctccatcgttctgtcatcttttccggcgaccgcgtgaccaccggttccaccgatcgcgtaattacgagtgtctgacttcttgatatcttcgtcgccatcgttagatccgttccaggactttgccggaggaatcgcctcgattaaccacagcctggaccttcgagaggaccgcaagacgataggcggtgcgccattgatttgatttcgacagattagagaaacggattgagctggatttgcgtaacgagattcgattgagccgatcgacgccgttaaaccggcgattaaccggtcggagctcgttgttgccatggtttgtacaggttcgatcgggagatggaattgcgtcaactggctttatactgacatcacaacgagactacctcttttgtgctgtgtgcttcttttagttgaaagtaatttttttctttctttcgcgtatcacaatttcttttgagcactccatagctgtttagagaagtgtgattaaaatagcagaggcttttggggtgtcaaaagggtattttcgtcaaatgaataatagttttcgtgtattttcagatagtattttattatatatatggaaattcaacgtaacattgtaccattgacccaacttttttgatcatgttgtttgggctatttgactagttgacccaaaaacgtaattgggcctaacttgtgtgtagtagccgaagcaaattatgtccatcttacataggtgataggtctcttatgctcattaagctaagaaaccatcctgccaaaaaaactgttggaactatgactacgatggcgataattttggagcgtatgatcgagttgatgatagagaagtagatgttttgataagctgcgatttacctttgaagaagagtcatatgttaagcagtagcgaagagagccatggtttccttactgactggatgctctccattgtaaggtgagaagatgtgttgacaatgacaaaactccatatgtgcgttgcggatgatgcttcaaaatcaatctctactaggattctcaaagcacgtacatttggtgtaacaaattgcaatggggtaccacacaaatttggatccaaaatgaaataaaattgagcatattaaatcatacttgtatatatggttgtcgtcttatttttgttatacacaacaagtagattagtagtagtcaataagttatacattaaatacaaaaagtagagtagttcgtttacactttacagagagtcgtagctcggatccattctaactaatcgaagtagcacctatttacctaatcgccaattattaaattggaccagtggagcaagatcataccagctgttgctgacgtggaaaatcgttattggttagattgatttttaaaatatataagacttaagttgaaccagacccgacccgtgacttctccgacactcatgacccatccactctctctctctcacataacacagcagaagtaggtggaaagcaatgtccccttcttcttttctctctatctctttgctaatacctctctgctattacacatctagcgttcgacggaataaccagagagagctttctgcgacggctttaatggtgttgatgctggttctttgaggcctgtgcggagatttgggttttgggtgaattgtttgtagctgttgtcgttttcaattgtttgtatcgaaagagggtgaaattgaaacccaattggagcaggatttgtcgaatttagctgggtttcgtttcgaggttggatctggagattatgctgttgaggcaatggaggcttctttagcggctttggagcggccacgaggttcagcttctaatacggtaatggaggtttctttggggtttttgctgagtgaaattcagaaatttacttgtattgttgtttctatgtttttaattgtccgaaatcgctaaaaataggacaaagtatgaaaatgattgctaaagttttaatcttttataagaaaattggagtttgtagatttcaatgtccgtattatcaggcagcggttgttataggattctcctgatacacattagttgtgagacaagctttgattagctgttcatggaagccctattggtttgatcgctcattgaagttttagcaaaacactccaatatctgtgttgagtacatttccgtaacatcaaaagagaagcttgatgactttcctagtgattaggcagaggttttgaattgtttatatatttgtgcatgtcgggttaccaatataaactgaaacaattaagagaattttactgaattttacttgtctctgggactatctatattctctagtttgtcaaaatctaagtttgatactaaactgatgatcgttactaatattatgtaactcacgattatttgacaggttttcaagagtggtccacttttcatatcatctaaaggtatccgtgtgacatttttcacctccctatattgtcacatttcactatacttgctcattttttcaattccctgaggctattgtgatatcataatccattaaacattttattttggtattctgctcaataggattgggttggacgtcttggaagaaacgctggttcatcctcacacggacttctttggttttcttcaaaaatgaccctgttagtattcacaaccatactgcctttttgcacagttgattttaaatgtgtatttgacttattttgttaatgtattgtatgataagattcttgataatcatatatattgagctatttaactaatttttcacagggtacactaccacaaaagggtggtgaagttaacttaactctgggaggaatcgacttgaataactctggaaggtatgcaggatactgctcgtcgattataaaatttcatggaataattgaacttacagtgattttttttgtttgttttcagtgttgtggtgagagaggataaaaaactgttgacggtattatttccagatgggcgtgatgggagagctttcactcttaaggtgattcatcatcatcataaaatttgaaatacctactctaagaacgagtttcaagtcgtttaagatggttctgtgaatatatttttgttactaattttggatgttgcaggctgagacatttgaagatttgtacgagtggaaaactgctcttgagcaggctcttgcacaagcccctaatgcagcactcatcatgggtcagaatggaatattccgtgctgaaactaacgaggctattgaaggttcttttcatcaatttttgttctagtccatgttacagctttggcctaagtgccttacatatacacaatatttatgcctttatttcttatgtatatttctgccttaataatagtttactttccatcatctatgcgtcattctacctttatggtccataattgttagggcgggagaagcgtccattaaaatccttggttgttggaagaccaatcttacttgctctggaagatattgatggaagcccatcattccttgagaaagctcttcagtttattgagaagtatggtacgttcttaagaaaatatcaatagctatcaccaagctttattgattacctggtgttccccaaattactttgctggggttattcgcttttagatcaacatgtgtccatagttttgtcagcgtacttaatacgtggaaagtatttatttcagtaaaagttttaacatttgttccatgattctgttatctcattcaatctgttgtactatttgttgcaacggttgaaacttgatgtatttcttttctttgaacaggaactaaaattgaagggatattaagacagtctgctgatgtggaagaggtggaacgtagagttcaagaatatgaacagggtacctataaactgcttactgatttctctctggattaagtttaggcacatcttgttaagctaatatataatatgttcttagacttcccttgtatgtgctctctctaaaaaacaatttatattttttcccctcttccacttcaaatgaaacctaggcaaaacggagttcacttttgatgaagatccacatgttgttggagactgcattaaggtagtttcttctcaacttcttattctgaaagtctgtgcattgttacaatactaaggcagtttcattttacattcagcatgtattgagggagttgccttcttctccggtttcagcatcttgttgtactgccctgttggaagcttacagtgagttcccttaccatcgtttccttcctttgattaagtcatacttgtgtgggtcttctgttaaagaattcctggagatctgactgaacttctgtgaagttaacgtcctcttaattggttttgctggatcaggaatcgagtctaaggaggctcgcattagttcattgcgctctgctatagcggaaacatttccggaacctaatagacgtctactacaacggtatgtttccagatcttccttcgggttgttttgagctaatagcctgtttcacattgctaacagtttatagattagattaaatattagatgttaaagttgagattacttgtttctaccaagtctgcgtctatcggccagatgaattccttgtgtctttttatgagtaagagtgctcgagatttataaggtgttttcttacacccttacatattttctttgtaccctcagaattctgaaaatgatgcatactatctcgtctcattcccacgaaaatcgaatgaacccaaatgctgtagctgcttgcatggctcctctgctcctacgtcctcttctggctggtgaatgtgatttagaggacgattttgatggtggtgaagacaattctgctcagcttcttgctgctgctaatgctgccaacaatgctcaagccatcattacagttcttctggaggattatggaagtattttcgatgtaagacgcactctgatagtttcattcaaccttcatcaatggtgtatgtcttatatgcttatttgcaatttcaggaagaaaatattcaaagatgttctatatcaactgaatcacatattggaaatagtgggcctgatgattcaagtgatgatgacaacaacatgaaaaatggatatcacaatgcagataatgaagttgaaccagtgactgatgacgataatgaccgtgcattgagtggaaaaatgagtgagagcagcggttgcacaggcagcgatctctatgaatacaaggtaatttctcctttggccagtatctctcccttcaatatactcatgcatccatccaagtttacatgaaacatttatttgtatagttgatgatataccaaaatgcctttaagttagggaagtataattcaggaatttggaatatgtttttaggtgtagctactgtatatttttccttttccagtgctatttttcgatgaaccagagtcggcaatttttggcagctaagaagaaaggttggacaaaatagttatttcatgattgctgaaaacattctttgtagggatttgttgctgatgactctgatattgaatcaccaagagacacaaatggcccaagatgtaattcaaacatacgaacagatcatcttatgagaaatccttttgtcaattccacggatcaacaagctggagagcagataggcgatgatccaacaaaatacggagtaaactcgtgtctcgcacatgttagtgagtcttatcaacaatcagggacgggtctaaatgtacccactcatgggaatactttggctgctcctggtcttgaatcaccaagcgcgaaatccgtgaataagggcacaccctcctctgttcatgcaaaacgcgcaacattctggggtcgaggcagtgtatgtgttttcttatctttatcaagtacttctgattctgtacacgcggcagatttggtccattagttcatatataattggatgcattagacaaaaccctttttctccaatttgatagaagtgtcacacctttgttgaatcatatggagataatgagccaacggaataatattttcttctctttgtttgtctcaggccagaaagatatccacagatgggtcttttgattcttcaggagaagacgagtaaggctttaactcttgggtgtattctccatctccatatatatattttcttctagctagtgtattcataggcaacttcttgattttcttagcaaaactatcatttactgtgattatctatccataagttttcaagtttaaatgtttcctttgcttgaaatactttgattatctatactactacttcatctctttggtaaatgcttgaatcgaagattacactagcttggtgtttttgtactgctaattggttcattgtttgtaggcttgctatacagaggctcgagaccacaaaaaatgaactgcgacaacgaattgcaaaggaggtaatcatctactgctgaaatattattctttgccttcataaagtcattaacactggtcaccgttattgttataggccagaggtaatgcaatattacaggctagcttggagagaaggaaacaagcactgcatgaacgtcgtttgtcgcttgaacaagatgtaaagaatttctctttaaaactatcagtgtttataaatctcgtctctccactattaatcctaatgtcaaaggaatcttcttctgatttgatgaaaaatacttatttaggtgtcaagattacaagagcagctgcaagctgaaagagatctccgagcagcactggaggttggtttgagcatgtcttctggacaattcagttcacatggtgtagattcaaaagtaagtatacattttaaggaaatggtatctttctttataacaattagctcgtaaaaaatacttacaatccaagtatttgaagacaagggctgagcttgaggaaattgctcttgctgaggctgatgtggccaggctgaagcagaaagttgcagaacttcaccatcagcttaaccagcaacgtcagactcattttggttccttctcagatgcacgtgatactcatcagtatctccagaatcacaatcctcaaaagtgagttgtatcactatccctgtttcctcacactgaggagcttgtagtccaagttattttttgtgataacttacccttatttctgtaaatcttttatgcttgaattactggcttgtttctttagctagtgaagatgtttaacaaatatctcagattaacttatccagcattaatcttcaactcagtacagctgtgagaattatgtttgaagtaacctttgcacaacatatcttgtactatgattggttcacatctgtgtttcttctctaataccatgttatgtatttccgcagaaggtttcttcagcaagattttgattccactcttgcctatgtaaatcatgaaaggaaacaaagacacgaggtacttcttactgatatttctgtcatcaatcatcatctttcatagtttagatcaaacctatagaatttactgtttggcctacaggagaatgtactgggagcggagtggagaaatagtaaaggggcaggatcttttggtgttggcaatagcaggcaaccatctcgtaaacaaataccagaatcaacaaacacaactgactctaaaatcagtgaagagtctggaaagatatccgtggacaagctctcatccatagattctccatctattccgtcgacttcaagagtattagatgtaagaccttttgctccttgttattatcattcccttcacttttgggttgcgtagtattgtgtgcaattctgtgattggccttacctggtttcaatagtaactacagagacatgcacgatcgctttctgcctagcaaattaaagctgactgctcttaaaaattctaaggaaacatcttaagcaatgacattgcacactaacatgcttgaggttttgcagataacagagtacccaaggcttaatcatccgtcagctgctgcatcagcagctctggtagagttaacaacacgtcttgatttcttcaaggaaagacgttcgcagctcatggagcagctccagaacctcgaccttaactacggcggctcatcttcccaagatttcatacaccggccatcatctccaccttggaactaacaacatgagaaaaaaagaagaagaaaaggctctatttgttctgtatatccttttggtgattgattaatgatgttagcatttgctctactcattttctcccccagaagactataatgaccttattcttttgggcaacagtcttgtgtgtatataaaggtattttgtaatgcaattttttttgttacgtgaggtttgttcatatgtgttaactctaaagctgtattgatatgttagtctctttatgctcttgagtttctgaccaagccaattacaactgaaagtctcttaattttcatttgtagccaataatgtatttacatgattcagttacatcaaacctggatatacaacaatattatattaatctattctatcaaagtttaaaaccaattttttaaaaaaacatatatatatatatatatatatatatatatatatatatattctatgaaagttagagaacctttatgtgagatctcatcagagtatgggaagttgacatatgtccaattactaaatgaataaattaataaaatcttattgattattgattttatatcaattcaaatcaactaaacataaaaatcctaaaacaagatgtttaaaaaaggaagaaaatctgtcttaaaaaggggaatgaaatcttatcataaatacattattttttaaaaaaaatcataaaagcataaacatagatatttacattaatgtggaattttaacatatacagtattacattttcattttcctcttatgtgggagggcttaatttttaaatcgccatcacaatacaactagataatatccgcacatagtgcggggtagaaaaaattatttaataacttttatgtataattgataacttttatgtataattatttaatacccgcaatataattgattattattagataaataatggtgtattaattaattatcaaaattagtgaaatatttatttatgtattaatgtttatgtttatcatgatttattatgtatatcttgttatattaatagatataaaatattagatactctattttgtatagatttatatctcttaatcatatattttaattgaattttcattttaataattgaatgaaaagcataaattaatttaaaaaaataaatagaagtaaaactaatgacaaattcgtaaatattatgttgggtgtttaattaaatggattgagaagcaatgtgagaacgacatgtcagcgtgacattttccttaatgatacataaaagtatggttatttttttaaaatgcttctcaattaatatataaggaataaaaagaaatattaaataccgttggaagaagttaaaaaaaaaacccgcgaaattcaaataacacaccacacatatatcttaacttactataaataattatgtatcattcactacgaaaaacaagtataactcatccaacaagatgtacgaacactaaacaaccgagatttcaatcattctcctagtaattttacctgtttgttaaacattatgcagattgtctcgactagtaaatcacaaccaatgtgtttgagaacaagtagtaataaagaagtccaaaaatctttgatgtcaaatctttgaaaagaaaagactaagaaacgacgacgttcatcaaatcccgtaaggcaacattctccgtttgactaaaccaatagcgagaaagaaaacacttggacaatccttttttttttcttcttcttaatattcattgttcactatttatatgtcctctctattgtttttatatataagcaaaagtcgaccttatacaatcttcaccgtctctattttttttttcctctctctcgcggaaaaaaaaaccctagtttttctctcttctcaccgatttttcattccgatgcttctggtcgcatagcccatccccgcagatctgttaattccggttagatttcttccctttattcctaatttcgagaatttggttgttttcttcttatctcgtcgttttttttttcttcaaaattaaaaatcttgggaatagggtttcttttgtatgcttgccctttttgaattcgatcctgattctgctttgatttcgcttctcgtcttgcgggtaatagtttatgattgatgattataggcaaaacgattctgatatgaagggtctttgtgattcatgtgttcttttactcttttgaaatcggcgtttgatcactggtgcaatcgttttgattttatgtcaatggtctttattccaattcaagggtttgacttgtctctgttctttagtataaagctccaaacactttagacgattttagctcggctgttttattactttgttttagatgataaggttttggctttcttatcttattgcaggttacatatgaaataacattgaaacatttgatggatgatgactttacagatggataaaactactgcttcctcttcatgggagcgagccaagtccatatatgatgaggttctctctctactacacttacatttctcaatttggtttgttcttgtttttggagtgatttaacatatctcttagggatgcaatcttagtttatttgttggggatgtataaggtcgttttgtcaattcacttgaccctatatctttgtaagattttgggacgacgttgtattgactatagatgcttactttgcagattgctgagttagcaaacaagcgtcagaaggctggaaatccacctgacccaaatttgttgcagctcttacgtgagaagtatgaagcaataattcttgaaagtcataccttttctgagcagcacaacattgaaattcctctgtggcagttgcattacaaacggattgaatattttagattacacatcaatcgtgtattggcttctagtacctcgacagcagcgcaaaatgtcaagggtccttctaaagcagaacaaattgcacaactcaagctgcagttcagaacattcctttcagaagcaactgggttttaccatgacatgatcttaaaaattagatcaaagtatggccttcccctgggttctttttctgaggatcaacagagtcaaaatttgtctgataaagatggaaaagagttagcagaagttcaaaaagccttgaaatcttgtcatcgttgcttaatataccttggtgatctggctcggtataaaggaatgtatgcagagggggattccaggagcagacagtatgcttctgcttcaagttactatttgcaagcagcttctctatggccagccagtggaaacccacatcatcaggtgattcccttgttttcccctctttctcatgttattttatatttcgtacaactatggaatacattttttctgactagattaacttaatgtctcagcttgcaatagttgcttcttattcgagggatgagtttgtaacaacatatcgttatttccgaagtttggctgtggagtatcctttcccaactgcccgtgacaacttgattgttgcttttgataaggttaactaaaaagttcctgtttcattattattttagtggcttggcgtaagagtgtgattattctttcacttttttatcatccaaatataatgtatctttctctctttgagcagaatcgtcagagttatgaaaaattgtttgtgccctccaaagactcatccaagaggctgactggtaaaggaagagggaaaggtgcagatatttcattgaaagatgcgaccttggtagctggtcctgagaaggataaagtaactattgcaaatgagatgctcaaagcattcagcattagatttgttcatctcaatgggattctttttacccgaacaaggtaaatttttctgaattattttgttctagattctgataccggctctctggtataatacctatcacttgtcttcacagcctggagacattctttgatgttcttgcctccactagcagcagtttacgagaggtgatttctttgggctcagctaaagagctgactttgggcatagacaccagtgacagcgcacttttcattgttagagtcgtgacaatgcttatatttagtgttcataactcaaagaaagagacagaaggtcagtcatatgcagagattgtacagcgtgttgagcctgccagaaactccttaacagctagtttcgagttacttggactcgtaatagagaagtgtgtgcaactgggagatccttcgtcgagttactttttgcctggtgtcttagtttttgttgaatggttggcctgttgtcctgacattgcactgggaagtgatcccgatgatagacagactgctgtaagaaatagcttttggaaccagtttgttgtcttcttcaatcaagtcttatcgcttggacctacgtttattgatgatgtcgaagacgagacttgcttctcaaacatgagcttgtatgatgaaagagaaactgaaaaccggcttgcactatgggaggactatgaactaagaggattcttgccactgcttccagctcagacgattctcaacttctcaaggaaacattcgtttggaactgaaggtcccaaggaaaagaaagctcgtataaagaggatctttgcagcagggaaagctttgaccagtgtgatcaaagttgatcagaatcatgtatattttgattcaaagaagaagaagtttcttgttggtgtaaaaccggcagatgactttctggattctcattcaagcccacctaaagcttgtaatgctttgcaagataaccaggtaatgatagatcataactcgccaataatgcagcttgatcaacagatttatatgggtgaggaagatgatgatgatgaagtaattgttttcaagccgcttgttactgaaaagaggaaagaggcttctgaccaaatatatgttcctagtggaggcttcaggaaatctgatcaagttactactatgggggactttaaagctttaagtggatctgatgtagcttttcatgaaaatcaaattctgcaagctagaggcaatgcgagtattcaagtgcctgcatctgttggtgctaaccttctgggacctctacagccatcaacccagtctcaagctatgcatatgcaacaagttcagacgcaggttcaagtacctgcatctgttggtgctaaccttctgggacttcttctgacatcaacccagtctcaagctatgcatatgcaacaagttcagacgcaggcagtgaatcctcagccagcccaatcactagctgcttctcgacttcagccaatacaatcacaggtcgcacaaccactgccatcacgggttgtgcactttcaacaaactcaagctcaggtttcacatgtttcaccggcccactcgcaatctacttcctttggtggtggtagcaagtggtcacccgaagaagctgcttctcttgctagtagcctatctgggtttgctcagctgggtaatggtcatgtaatgaggaatgagatgcaaggaaatcatggagtttcctattaccctgcacactcattacccgtccaccagtcttacaatggcaatggtatgggtggtatgccatattctcagtcaagaacacctgaagctgtattcccacccaaaattgatcctgttttatcatccggagttgttgctgatggcctgggcgtccaatcttcattagcaaagaaaaatccaatcagtagagccttcaggcatcttggccctccgcctgggtttaactctgtcccagctaagctgcaaaaggagccagcacctggttcggaattgtctggcaacaaccacctaccggttgatgattacagctggttggatggataccaagctcaatcttctcgaggcgttgggctgaacagttctttgaattacgccacctctgggaaaccagaacacttgggtagtactggcaatggactgaacgggcctgccaactttccgtttcctggaaaacaagttccaacttcacaggtccaagcagattttccttatttccagaaccctcagaaagataactttgtggacaaaaaccatcagtcaactcaactccccgagcaatatcaaggacagtcgacttggtcgagtcgtcactttgtgtgagatcagaatggaagagtaacacggtaagagcaaacataaagctcctttgcattatcaaatactttgtaaactatcttattgttattagtgttgatctaggtaattgggaatgatgcaggtgagtgttacgcaacgtttattgctacctaactccaactgatccttgttctgctgaagtctctagttggagtctttgtggccttggcttcttgtggggcacttcctacctgacgggttggtccttttcatcgttttctttaagctagtattgcagttccttgtttacacatgcgtaggcactcatacaaatcaccaatgtttattgatgatagattcaggacacagctcatgttggtgaagagatatgtggtaacaagaatgaatggttctgtggaattgataggagtaaagtgcctttctcgtgctacttgaggtggagatgttaaaccttatgaataagaaaggaacatacgtagcatgtggctcactctcgatatctgaagcagttgtttgctgttttcttttcttcttgcgtatgactgtgtagctgtccgtcctcttgcagctatctctctctctcttgggttgctttacttttatttcctctatattctatgcttgtctcaaacttgtctctgttttgctgtgtcgttttaagttgaaccatcataaggtgtgtgaaactttgcaatgaataaaaaagggactcatgtgataaaacatgatttggtgttgaaatacttcctcctcttgaagatctgtgagaatacctttgattttaaaggtcggattttatacataatttcacttcatttacaggctcattttactcccttggcattttgaaatctgtaatatgccaatgctgctacaaatgaacttgataaaactgatgtcgaaaaatgttaaaaagaagttgtaattgtatatgaacatagaagactgaatacagttctccctatacaatgaaatctttaatgggttgacttggaagccttcctgagtagaataccccagcagaggattcgataaaaaacgaaaaaggcaagcatgatcccgacgttgatccatctcgtatccttgtcaagccctctctccttcaacacatcctctccggtcatcaagcagcccatgttcccactggagaagcattcctctcgcatgctccagtactcattcaccaccatagactccagcgggtaacggtacaaggacacatagtacatgaacatccatggttttgggatcttctcttttgggataaagtagccggagaagaggaagaaggctccaagaacagtgcatatgagggagttaccagagatgaagtcaggagaaacagcgctgaggaaaagcaccagagaactggccatgagaatgatgagccagacgcagaggacaaagaaggagaaggcttgaatcgatgggtttaggcctacgatccagtagactgggatggagaagaggagagatacaacgaagaggaacggtacaaatgcgatggtgttggctatcatgtaggatgagattcggtaggatccacgagatgattctttcatcagaacgcgacgttctcggaggtaaatgggaagtgcttcgactgttgaagagaggaggaagcttaagctgaaggcaaagagtccaagccgctctgcaacgccttcttcgtcacgcttgagtcttgtgtagacgctacctagacctaatccagctacaaccgcttgcattgttcgcgccaggaacaactgctttgttctatagatgatcttgcagaatcttgagcagaggtatgagatctcggtgacgtctaggacacgaaacgcttctttcttagagataatcccatcgttttcgttgttttcaggccacattgatgatgattctacgacagctaccgagtttggcttaaaagttctcaaggactcaactatttccatggcgaattctataggattcagctgttctggaatctgaaaccctagtttcgctatcgagtcctcgagatgttcaagacttcccaagtggataaccgatccgcgagaaagaatcaggtaatcggagatgtaatcgaggatcctataacttggttggtggatggagaagaggacggttctctgtttggatttcgccatagtagccaaaagctcaacaacctgaagcgagtttcgactatccaaaccagaggttggttcgtcaagaagcagaattggtggatcacgaatcatctcaacggctatagagactctcttcctctctccacccgaaacgccacgatcctcttcgtctccttctcccacgaagctgtcttggacgagaacaagaccgagatcactcaacaagctctccactctctcttctctttccttagccgttgaatctctcaaactgaatttggcgctatacattaacgtctctttcacggtaagtagaggcagtaggtcatcgtcctgcgggacaaacccgcatagccttcgtagttggttatagtcagtgattttacgattgttcatcaaaaccgcggaagacggatctagtgccttgtggttcactcttcctgaaatgatctttaaaagagtggattttcctgttccactcggtccaaccacggctaggattttagaggattcagcagctaatgaaacggaattgagtattggggtgtgattgatggtgtaggataggttagtgacggttaaagagtagcggttaggggttgggagtggtgaagaagaaaaggaagaggaagcagaggagaattcatcaggagagtttgatgctgagaaaagaatgatggagtcttcctcgcggtggcttgtagccatagcagaagggtggaagcaggaagccatggtatgagtattgttgttcttcttcatatcaaaaaggtctactaatgctttttatgtatgagtaaaacttttttttcagaattggtcgaccaacaaaagaaacaagtgtttaatgtggtaggcagaggttggtgcaactcttcaaaacctgtgtatctaattctttttggttggtcattaattgtttgattttgctgagtttatcgtataagataaatttatcttacatatatgtaaacggtattagtggttgaccaggaataaagagtattggtgtatcaaacaaaaaggtaacgtgttaaattcattactaaaatgtactttccaatggtatcaacatgctaattgtattccgtcatgagaaattcatgatgtcaaaagaatgaatctgaaaatagattttgatacaaaattaattgcatttaagatagcattcgtaataatttgtatataccaaaggggcattaaatgattttgttaaaaaaagaagcctattaaaaaaatacagtattatgatgttaagaagcatatcatttaaatttgcccatagacatctaaaatgtataagctcgcactgacaccataccattaatgctgtttgaatttcaacatcaaataataacatttatcgagacaaagaacgaaacaatgtatgcttgtggaatttacaaaagaatttacatatgaaaaacacccaaactatgatgaaaactattttctctcttggttataatccccaaataaacctatgaaacccgtagacagaaactaaaaaagaatagatgagtgggaaactcagggttttctgtgttatcaggggttagcgaagaatattaatgacccaagtcttcacttcctacacccacactggatttatcaactactatgcgtacattgtattgttcgtaaactcttcctctgttctctgcccaccattcttctgcttgtttctcactaaaccgcttccggctgccatcaaagacatcctcggattaagctcatttcataaccaataaaaaggagcatccaaacattccagctaagactataaaacaaaaaaaaagcattctggtacctgaaacggacacgtttgagatcccttgcacctccagctaaggctgtgagagtgatgtacacaccaggttcatcttgttcaacccattcattttcgttacggggttcactttcttttgatcgtgtgctgattctatttatcgcttcagcagcatgattagcttgctgtcggtaacttccactatcgaaaacaggtgtgctggtcccatttgaaaacattgggacggtggttaggctatcagaatcagtttctcgactgtttggacggtttaaggtgttagaagaaggggcagcgtaatcaggactggaaccaaatgaattgagagacggagacttgacagtccgagctgatccaacaggtagtctttcagccatgtctttcaactgcatgttttattgagaaaatcagtaagttgcatagagcattttcattcattttaacagcagagaggaaactttggaatttacttgagcggtaagtgatttgatcacttcttttgctgccttgcatctcgctgattcttcactagcaattgctagtgcctcctttagctgtttggttgttctttccagttcaacttcttgaagttgtgccttccgtgtaagattttcaacctgtgaaatcatttactactgagttcgcaaaaggagtcaaattgcaaagaatgaaacgatatgttaatgaaacaaaatagcacaatctcaccagctatgtttttttcctaaatacacaggagtaaggaacaagaattaaagcgtggaaagcagcttacttgagatcttagcataaccacctcttggcttaggttatcattgcttctcttggtatcatccacgacaatttttggtgtagttagtcctgaaagagtgggagttggcgttgttgaccgaggtgggctaggacgtcttgatattggtgaagttgcccgggacgcaattcgggaaccaggaactgaagctgagaagaatttctttgatgatccgaaagttggattaaaagacttggttatgtttagtgaaccccggtgcgagcccccactcggtattggtgagacacgactactattgaattcatatttcttatttttcttggatcgactgtccacttgcctcatgggctccaacaatgagaatctagctagctgtccgtcggatctagtatccaacttctcatctctgtcaattgcatctgatccttggttgacactttctcttcgactcaaagaagaatgagatgatggatccgtttccatggcctttttcaatttgttgaaacacctatcacacactcgatatggtttgttagggtttggtgccatacaagccttcagggactttttattactgcaagaatggcaaaacacaagtccacagttatagcaattgtgccgctttctcttgaaattgaaaggctgacggcaacctgaacacatggactggtccatccctgatgcccacttgtgaagacagacagctgcggtgaagttagaaccacatgcaatacttttcacctgtttatccttcagcgactcaaccaatgtgggggaatttcgatcatctgcatccccatggcctagtctaccatttgatccttttccccaagtgtaaacctcagtccttgaagttaaaactgcaacatgataagcaccgcaagcaatctcttcgacaaaactcttgtgaagtttgccgtcgacacgggttggaacctttccatctgcatgtgggtttccaagctgaccataaacaggactgcccatagtatagacgtggcccgatgttgtaagtgcaactgttaggctatgtccacacgcaacttgacaaaaattaggttctacaagagctgcaacacaggtaggcacaagttttggttctttgtcaccatgaccaagacgactcttgtcaccatcaccccatgtaaagagctttcctgaagagcagttactagagctcgagctcccaaccatgacttctacaactgcggctgtgtgccatacaccacaggctgcccgaacagtgcgaagacctttcaaggagtctacctctctaggtatgaaaacacttttcctgtctccatggcccaaaacaccaaaggtcccatcaccaaaagtaaacaactgcccagcggaagtcacaacagctgtgtggtaaggcccacaagcgatggatgatacatgtatcccttccatcagaaaatttactcttttggggacccagtgactgacttcatttccatgtcccagaataccaaaatctcctttaccccaggtatacaaatcccccgatagagtaactgcacaactatggtattcaccacatgctacaagctcaatatttgtggtattgagggcatcaatgagctttggatgttgaacattggaatccacaccatggccaagcctaccttcagattcctctccccaagaaaaactttctccttgttttgttacaaggacagcatgttgtccaccgcaagcaatattctggacatcaagtactatagtagactctaaagcttttggcagtaaggaatccattttgatctccaacgaacttccaactctgtggtttccaccacccaaaacaccttcgcctattccttctccccacatgaaaacgtctcccaatgtgtctccatcatcatgaccagaaccatggctcgacgaactaatcgcacttgacagactaactctaaaagcatccatacccattcctttcatgtgaccatgtagcgtatctgagcctccagatgacaaagagtgaactgacatagttgccgaacctggggggaaaaaaccttttggaggaactgcatacaacgacatgtctgaaaatgccttgtcaacgccattcttaggcgggctctcatatggactgtgaagacgaaggtgatttgagccctcctgaaaggtaagagaaatattaccttagttaagtaatgcacaaaatgaattggaatatttcattctagtaccttctggaaactttcattgctactaaatggagaatgtaaaggggagcttctccgggtatatgttctcggactattagcttcggatggcgttccatcacttctcgattcggtcctccatttccgttgatgacaacgggatatcaaggcttttagaccactaaaccacacttcagcctcatctttatccttgcatatctatgaaatgaaattctgacacctaattaatgaactttcaataataacaggcatttaaatgatggaataatgatttcatagaggaaattaggaaaagaatatactataagaaaaagctcaccaaatccagtgacctctcgtcatatattagcgagaacgattgatattccttctcaggacgtggatatctctgaaaaataggctgcaagagaaacaccattgcaagacttgtcagaatatcacactagatatgcaaggtccaaatatgcaacctacgactatggaaactggctcatgcaaatgatgcatgaaacatgcaaagtcaaatcaagattgacctgccacgctgaagtgaaatgaaaaaaaatgatgaatccaatcaaacatagcataagcacgtaatcttcatttgagtttatgttgataaaacgactctaagaaaagagccttgtgcataacatacaccacttggaaaaatcataaacaacaattcagatcacattaggaggccatcctactcacaatcatgacagtagagctcagacacaaccagaagaagatactcttatcagatatccaaccatataaacgcatcgaaaaatggataatactagtctaacgaacttattctgaacatttaatagccagcttaaggaaagattaaatgacatgtctacggatgtcaaaacttacagtgcgctgcccagagatgatcctggaaacatgacttagcttcaaatgtttttcctccttcccagaaaaccatatcaaaacagattcatcctgaaagttacaggacagactatttacttgacacagaacaacaagaagctgcacacagcaggaagcagcagagagaaaatataacgaaacaaaaggactctacagactcttacataagagtaaaagaaaatgatatcaacacaacttacattcgaaaggcgaaatggacagaacttaggctttccccttctgccatacttaagcaaataagctccttttttaagagcagtgatagcctgagccaattgataaaaaaaaatagtttccgtaaataaagcaggtgaagtatattggcaaggggtgatttcagctttagatacagctatataataaaactgaaatggtcttaaatagagatgagcaataactatatcctgagaaattgcacctaaaatagattaactgctaggaaaaaaacatgaagtgcatttttgttctccaatatatagctagagtcaagcttggagactccaaaagtggaatagagctcaatctttagctaaaaccagtcacactaaccaagaatcccaaatctaattttcaaagtttaagccacgcctaagaaaataaccttctcttaaccttcctaacaaaggatttgttccacagaaaacctaacaattcagtagaattggaatcataaacaagaccaaaaaaaacctgctcaatatccctcgtcactggaccggctctactaagatccgacggcgtcattcgtccgttcctcgacataaacaaaattcctcagtagcaaaccccttgagccgagaaaacctcaaaaaaaattcacactagtcgtcaagctcaaatcaatagacctcgtgcaatcacgaaatccactccacatcacatcactttgatcgtcgatcttggattcaaattcgaagccagagcagcttcttcagctccaatttagattcaaatcgatccaaacagtagaacaaaaagcgccgtttcaatcaaatgtaaaaggattcaaatatgttcttctggatgctgaattaaactcttcgagaggaattgaaacacagagaatctagctagagagacatggcatgatctatactacgcagcttaaagcgagcgagcgagagagaagaaagagaccaaaaggcagattctgactagagaaagctatacttcttctttttttctgctttctattgattttttagatatataaaacccgtcattattctccttaattacgggatataccactgtacactcccaattaatttactctccttaaacattttgtatttctgtgactagtaatgtggaaggctttttgcgaatatctgttttttcagcaagcttttttcgaatattactttcgtgtatacatttgctcttttttttttttggtttaaatttttctaatgatgggactttaaagaatttaaatacctaccacctaattaaagaagaatgattcaatagaagatgtcatgcaaattaaataccacacataattatgttatttgtaatggatactctatgactatgatgtaatgtattttcttcaaaagttataaatcttgacattttaaaaattgctttatgatctgtaacatgtcgttttgagtgtactgatctgtcgcaattctataggacaggttagaacttctggtggaggaagaaggttcgggttctgttttgtctcttgtgtgctttgttgttagttcttgaggtatcgggaatcattctcttagcatatctccttttctcgtctcggtggttcgctgtcccacagccactctctctaatccgggctccttaatcttgacgaacagatttcagaagaacatcttctttcttcaactaccaaatctttcgttttttctatctaatttcgccgccatgagttccgttaccgagatcgtgtctgagcagcaagtgatcgacggtattcaggatttggcccttcaaaatcaggttctttgttacccttattcaattcatattctcgtctcttgatgaaaattttcaaattttaaatatgtttgctttgtgtgtcggtcttgtttcggagttggagctgattctgtccatgatgcttctgcttctatgtggaaatgtatctagccttgctccacaatattagggtttcgtaaatttttgattttgtgcgttattatgtgtttaatttcgaattggacgattagggctcttcaggtttacaatgtgaagttgactgttgctgaatttgctactgatattgtttatgaatctgctttctttttctcttcataactttcacagaacttaggtctcttgttcttacatctaaacataactctttaagatgatgttgtgtgttctctgcatgtggaggtgatttaagagattttatctgaacctctctctcaggacaaaaagaagatccaggaagagatccatgagccgagtttcgggaatcatggtggctgttgtgcaatatgtttgagtgaaattcctcttcaagaaactgctatggtcaaaggctgtgaacacacttactggtaatactgttgtttcttctctttgtttcttttagatgatatatatctgatttggttacatctatattttattagttacaaagtttagtctgtactgtagtatgaacatattgatttcgtcaaatgaattttgttttcttctcacaagttttcagttgtggaacttggttttaggtttaacctgtaaactcgtgatcaccttttatcttctgtgtttgcttttatgcctacgtggtaactgactttctttctactttgggttttaagaggagtaattcatttctatctatttagtgtgacatgcatacttcgttgggcgagttgcaaagagagtcccacatgcccacaatgtaagcatccatttgattttctcagtgtccaccgagcacttgatggcaggtgacttcccttctttatttacaattttgtgtatatattagtcgattactccatttgcttgatcaaactctttttcttattcttgtttggttgtataaattctcttttgtatttctatgcagcattgaagattttctgtttgaggagagtgtgtgccttctccttagagcctcatggtttgtaccattggatgtggtggaacaggcgtcgtacagccatggttaccatgatgattttgacattccttatgactacgaggatgaagatgatgaccttgacgagttttatctgcacggctcaagtcttcgcataggaaatcggagatggggtggcaatggttttgtcagatccgggcgtcaagaagccaggcctgtccagagatacagtggttctggttctagttccagttccagctctgggtcatcctcaagtgagcctaaggataagcaggtgaagacgacaaacacaacaggaagacgtgcaaaaagggcaatgaagcgtgaagctgcaaacaaagcagcggaagtaactgcagcagcaaagcacgaggcccatttggttaggttgggaaggaagtgagtgtgtatctgtaaataaattgcactcaaaaagcttccacctacttccattacttagtatcatctgtacagcaagtagtttttaatgttgtgattaatccctgtcagaccactatataatggtgtggggtttggaatggtagaaacaagaagttgtgactcattgtctcatacaatacttggacaaccattggctatcatattactctgttcattaaatcttgttatgtttctaatcattgatcagatgagaaagtagtgtagcttttgattttcttggtgtgaatactgaatatgtaaaaatatgtctagatgaagaagaaagacaacttctttttatggattcgttgtctgagttggtcggtgagctttggatactaagtttgcccaactttatggcacaacaaggggtagatccaatgcaagttacaaaaatacgaaacctatagtattcatatttgccaaaatcaaagtctttttatacattcttttttcatgatagcatatggtataaattctatttaaaaaatgttgttgtaaaacaatttctaaattttgctttattgttgtaaaattttcggccaaactacgcaaatattatattagaggattttggatatatgattttatcttttgaagtattataatgttcttttctgttttaaaatgaattgactattgagtttgaagtgaaattggaattgactactcaacaacgtgtgtctcttttccacctaaccattgtgcaaaccacgcaaaaggaaaaatatcaaaaaagtctttaaagagggcaaagaaatcacccaaatatacgcattcgtcatttggtccctccacttagagagaagcagacagaacataactaaaatcgagaaaaatggcaaacagtggtgaaggtaaagtggtgtgtgtaacaggagcctccggttacatcgcctcatggctcgtcaagttcctacttagccgtggctacactgttaaggcctccgtccgtgatcccagttccgtaccctctcttctctatcacattcatttgctttagggttcatatactattccaattaagtctgtgttactgtagtttaagatttgggtttctactggtaaactctgtgtgcttggatcctgattctattagtgaatcgaaggctacatcttaaaaactgatactttggaattggataccaattttgatcttaagaacaatctaaacacacaaacaatgatcctttgatgttcttgtctctgcttgtacacaggtgatccgaaaaagacacaacacttagtttcactagaaggtgcaaaggaaagacttcacttgttcaaagcagaccttttggaacaaggttctttcgactctgctattgatggttgccatggagttttccacactgcttctccattttttaatgatgccaaagacccacaggtttggttttttattccctcaaaaaattgctttttattttgtggattgatttgatcttaactatgtatccacatctccaggctgaacttattgatcctgcggtcaaggggacgcttaacgttttgaattcgtgcgccaaagcctcttcggttaagagggttgttgtaacctcctccatggctgccgttggttacaatggaaaaccacgcacacctgatgttaccgtcgatgaaacttggttctctgatcctgagctttgcgaggcctccaaggtgtgttttgaatattgagccatgattcatttcgattattttgttgtcatctactagcaactagtcgtcttattgtgctgtaatgttctcttcaaactaaaatgttatgctttgttacttggctcagatgtggtatgttctatccaagactttggcggaagatgcagcttggaaactcgctaaagagaaaggcttagacattgttactattaacccggctatggtgatcggtcctctcctacagccaactctgaacacgagtgctgctgctatattaaacttaatcaatggtaagagaaaaacttttacttctttcatgatacttaggaccggtttgtcaaatgctagctagagaaacccttttcaacttggtgtcttttatttatttccgatatgtaggtgcaaagactttcccaaacttgagtttcggatgggttaatgtaaaagacgtagccaatgcgcacatccaagcatttgaggtcccttcagctaatgggcgttattgtttggtcgagcgtgtcgttcaccactccgagattgttaacattctacgtgagctttacccaaatctcccactacctgaaaggtaaaacatgaactaaatatattacaccggttgttttgttcatgtcctgtgtcaataacttttgcctcatacgcaggtgtgtggacgagaatccctacgtgccaacgtatcaagtgtccaaggataaaacgaggagccttggcatagactacatacccttgaaggttagcatcaaggagaccgtcgagtccttgaaggaaaaaggtttcgcacagttctgagaaagcatttgagccaatggatttaatccagattagataaagtatttggaagactatttcagaaataatatttggaacatgtcaatgttctcaaggagatattagtatgttcttgtgtactttattgttgttccatcaaatgagttacttttccttttatttcttgttagtaagatatcaaataagaattcgagtcaagtgagcatctttacactgatgaatctacaaatgatcaaacaatgattaatgaatatcttctgacccatggtgacatggtcgggaaagaagtaaacaaaactaaagggacttttacactattgtttgccaacaaatagtattaaggatccagacaacatgaaaataaagagtcagaaaatttaagaacatctgcttcatatcgtacatggctggctattcaagtaactaaaacatttgaaaccctgatctacaattattgaggaaaaaaaaagataaacaattttcaaagaatactgttttttcctttttctttttacttctttaagagatacagaaacaaagaacctttcttaattttcgccttctaattgcaatgaaccttctctcattaacttgaggctcaaactgttgaatctttcccgggaatactgcctcgacgctttcctccaatctgttccagctttcatcatcgccgcaaactcttcatagcttattcgtccgtcctaatcaccaagacgataaaaaaaatcaagagaagacttgtaaactgctatgtatttccaaaccaattttgccatcaagttgcctgttcaagacttgagaactaaggatgcacaattctgagatatactgataagatcaaacacataatctcatctattctcaatgaaccaggttacacataatctcaatcacgcattaaaatgctgatatggcatgtgcacttggtgaactcctatcatattcccacatatagccttccgaggagaaagattcagacaaacatacccaagtcttatgctactacactgaatcatttgtgtccccatattatcgtcacataacattattgagtgaagacgcatttgcagtgaaaagtgtctatttctaatctcatattttgtggttaccttgtctgtgtcaacatcttgcataatagctgcaacaacttcttcactgttagtatccacctcatcatttaaagcctcacgcagctcctcaatctctatgtaatcgctctgattctggtcaaaaaagctaaaagccttatgcaagtgttcgtcgttcgccattttcttaagatgcacagagacagccacaaactccccataatttaaagtcccatccccatcaacatcagcctgcacaccagataaaaaaaaaaggctttcaaatatctgttggaacacaaactccaaagttttaagttttttcttacagcttccatcagaatctgtagatcagtatcaggtatctgctgctgtccgagtttatgaagtccaaatttaagctcctcgaggtttatctttcccgtctttttactgtccatcatctcaaatgcttccttgatgccagctacttcctccactgataagtgttcggctatcacctgaaaggaagtgaaaaaagaagtttcgcattatttcttcaaatccaacagaaataaggtcatgaagcagctgcaatgctagacagaatacccgtagcgctcttttcttgagcttgttcataacagaaaactgtttgagtcttgctttcaccgtctcgccgagtgaaacatttggagccttcttcgcattttgtatccaagaatgttctgcagatagaagtgtcatgatatatatgttccataagtaacagattttagaaacacactaggaaacataccgagtacttgtgcagcagaaagccgttttttggggtcaggttcgagcatcttcctcacaaggtctttggcagtctcagaaactctcggccatggatccctcttaaagtcgataactgacctaatgatcgcctgagccaccccttgctcagtctctttacaaaaataaacaacatcaagaaaagaaactcaaaaagtggacgaagataagcaattaaaaaaatcgaaagaggtcactagtgaatccatgaacatgtaatttgataacatcatcctaaatcattcacagaggaaactagtggttctgcagtaaatctttctaatcatctatggaaactaaaatcaaccagctgcatatccgtacaaaacatccactgttgaagaacaaaaaatggattaagacaataagatggatcataacaaaccggcccaaaatggtgggacaccacagagcaggatataaaggataactccagcactccagatatcaacctcaggtccgtaatttcgcctaagtacctctggtgccatgtaataaggacttccaacaatctcgttgaatccctcacctgttacaaattcaaaatatatcaagtggcgtagacagaacaaaattatctgttgacctgagatatataatggacattataaaatctataccaggcttgaagaagactgataatccaaaatctatggctttaagggctgatgtctcttttttatttgcaaagagaaagttctcaggctttagatcccgatgcatcactccatgcttatggcatatctgcaataccaaaaggtgttcaaatcataaaggtaaaagttgggataacaactttaactagcattacactgtaagtgaaagccactgcataaagacaaacaaggaaccttgcaatagaattagaggcaagaaagaccagctagaaagttgacaaaacgagagtgcaaatgaaaaacgaaaaactacaaacctgaacaacttcaagaatagtcttcatcactgcagcagcagctcgctcagtataatgacctctagcaacaatccgatcaaacagctcacctccttcacacaactccataactatatgcactgcatcatcatcctcaaaggcatccttcagcgacacgatatttgggtgtctaggcatatgtttcattatctcaacttccctcctaacatcctctatatccacagctgttctaagcttcttctttgatatagacttgcacgcatacttctcgcccgttttgatatcagtgcacaagtaagtaataccaaactctccgcgaccaacctcacgccccagatcatacataagagatatatcatgtcctgttggatctttcaaaacagagagcttgaacccagttccagatccattcgtagtgtatgcttcactataaaacgggttacttttgatctttggtttccccttcttactcccagtctccgaacccgggctcgcacaacaatttcccatttataattcgaatctgagaagtcctgagatttcatcaaacaactaaatcactcacaaacgcaaacatgtcattttttccaaatcaagaaagcttaaaactttatcaattcatctccaaatttttccaatttaaggaattaaagactctcactaatccctaaaacttacagcaagacaaattcgatttgataaaagggcaaaacaaacgatcgagaacaaaaaatgcaacgaaattaagaaccctagaaattgaagagctgataagtaaaccctagcaaatgaaatcaggtgaaacccaaaaaggatgaagctttaattagaaaggggaaacacaaacctgagaccttaaccggagaaagagatgatcagattgggatgaatcgacggaagcaaagaggggaaataagtgacagagagaaaggagaagaagcagaagagtcaaaaagtctccttctccctcgcttcttctttcttagtgtggtgagagcaaagagagactctttttttttggtttttgggttctctctattgtggagtcaggtgataacccaatttgtaaaagacagtcacacggtcacaatcagactcaccaccactctctctctcttttattgttccttcctcacaaatactaactttctcaaaataaaatatatttttttttggtttcttattgaacaagaacatgtgttattaaaagtttaaaacacaataatgtgtcatggattggcttttgtgttttgtcgcatctctaaggattttgatataataaaaaaaaagattagtcttttcataatccaccattcatacacatgttatataggttacgttaagatagatatctctagtacaaaccaataattagtgaggcatttgatctatatggattgataatatgattaagatagatagatatgtctagtagaaaccaataaccttgtgatttactggtttatatgtatttcaaattttatcttgtagtagtcttactatatatataagaaagaaagaaaaataaaaaattaagagaaattttgaaaaatgccacttttacaggtgatcacttgatcttgttctcatgtttatggacaataacatttagacggtatttgaaatcaatcataagtagctttggccgtgacagtaaatcaatgcttataaaatatatttgttatcaatattcaaaactccaaagtaaacagtactaataattagaaccagtcaacatatgcattcaaaaaagaaaagaactaatcggtcaactcaaccatatgttccacgtttatcaaattcataaataaaaactactactactatttaactataaatatttttccaaacaacacaaaataatagcaataggacgtatactaatagagtaataggtgggagcaattgttagattgttaccaatcaaacgagccgtgaccaaaactatagcgcggaaagacaaaactatttaacgaaaacgatattgccatttgcgtttgttaataatcactacttaccagtgctttttaccgaacagtaccgagccgtgactaaaaatcaagcatttcaatatcgagtatactcgattccgattttggtcatccgtatataataactcttgatttccaaactcgacacagccatcgaaaatggcatctgggttttgctcactggctctaactgtcaccacctccttattctcgtcccacgcgattacacggcgcgttctacccattctacggtggcgttccagttctatgtccctttctccgctgcgtcattcccgcgctttatcagctgcaacaactgttccgataagctcatccttcacgtgggacgacgtaatcgagaccggtcgggcagagtacaactcttccgatctcaccggatttttcgagaaaatcaaccgctgcaatcgcggatccgtaagtcctactaaatcgaatggttttagggtatcggttcctaggagagtgagattgaccaaggaaagctgaaattcaataaaaatgttagcttttcctcttttctgtttataaagttcaaaacttttctgctatacgtttttcaggaaaagttaggtgagttcattccatttgttatagaggaacaaatcgttggttatattcataaaaggtaactgttcttgcttctgtgattctaaacttgaggttgtacaaattagacttctcttttatgcattcattcacaaactagttttagcagaatcttggattttgatgcttgtttgtctacattgaatagatttacggagtacttgagggagtttcatgatatctttacattttcacaaaatggttcttgtcctgaccgtgttgatggctatgtaacgcttaatctgatgcttcaaaagcctgaagatagaaccagagcagttgcagatgtgatcaaaatattgggtgacaaaggaatcattccaggaatacgtaatgaggtatgggtctatgttttggtttgatctcctaactctctaatgatgcttcatttatgttgataatttttctttctcaccagctgtatcctgtgaaaccatcgtttaatgccccggtctttttttctctagagcgtgctgctgctccttatttcggaattaaggtaaaaccacactccactgaattggttaagcttgtagccatgaacaccaaattatatgctttgccatcaatacatgtgtaccgttttcttttcctggttttgctttgcgttccttatgcgagttatctgatatagggttacggagttcacatgaatgggtatgtagaaagagatggacagaaattactgtggataggtaagagaagtctctcaaaatccacgtatccaggaatgcttgatcatctggttgctggaggattggtaagatttatcttagtcttatacttatccatggttgtctgctgatgatgaaagtaaattcatcatgatacagtaagtctatactagtgattataattctcactagaggaaattgaaatgcacgtttcctttcatcattcgctgggaaccatagcctcacgggattagctgcggtggaaatctagtaaaggaatgtgaagaggaagctgggatttccagagccattgctgataggtaagacatactctgcagtcttgaacaaagtagtatgtataggctctcttgatgatttcaacctgttgcattttatgtttatgaaagggcaatagcggttggtgctgtctcatatttggacatcgatcagtactgtttcaaacgtgatgtgctgttttgttatgatttggaactccctgaagattttgttcccaaaaatcaaggttaggcaatcactagtaaggcaatgagtaattctgaattgctgcttagagagactctttcataacattgtagtccaaactacattgcagatggagaagttgagagcttcaagttgattccagtagcccaagttgctagtgtgattaagaaaactagtttcttcaaggcgaactgttcccttgtcattattgacttcttgtttcggcacgggtactaactcctatctcccaaaatttctaccttaaaagaaacaatttacttacgttaatgttccgtgattttaatgctctcgcccctgaacacattatgttccattttgtctattatgcaggtttatcagaccagaatcatcgggttacttggatctataccaacgcctgaggaatagagattgctcatagggatgttactatctgatgattgtaagtaaaacctcactctatgaattaatattagatactttggctgtgtaataggttcatccgtatatataatgtattgcattttatttcagagtctgctgggtcacttcaggtgccttcatgaacataatgaagtccaaagaatacaattttttatacagagagcgagcaaaacaaactcacgtttagagttgtacattttagctcctgttctgttctagactatgagactacgagggaaaatgcttctctattagttgtgatttctggtttgagctaaccggaagctaatgagctcacatggaattgaaggctagcttagtgaattgttggaaacctagccgagattaggggatcacacactgtaattgcttaactagtaaatcgcactgtgatcattatcttctttctcgatcaatatacaagtttctcgattaatgttccatactttgactgtgaaatcatggttgatgcaaagatcgcaacattctctctacggatcagctctaatgtgagccttgcttgtcctcccaactttgattttagtgggcagaatggtacgactaactcttctcgttagtggaagattacaaatgataatttgtcaaggatagttcaagtgaccttgagagtgaaatcatgtttagggttataaatgaagactttgggcaacacttaacagcaaaatcaagtgataatattttttggttttcaggcaatttcttaaaaagtttaggcaattaataaatgaaaagttttgtatttgtttaagctaactaaaaaagttaggtattttgagtgcgacacaagagataggttcaaaaaacttacttgtccgtatctaaaacgtcttgcatcctagacaagaacagctttgtgtctcctccgtccaagtggcatctggattttgctttgatggcgctcgacttcaaggtcccctccgctgagcatatcaggaatcaatgaatctatgaatctacgctaagatcttggacaaatacaaacatcaattataagaatatactaattttgaaatatttttcatgtgaagttattgtgagcgcgacacatgagattttttttcaaaaaacttaatcatctgtatttataacgccttgcatcccaagctagaacagcattgtgtctcctccacagacatggcatctgcattttgctcactttgtcccactcccacctccttattctcttcccacgcgcttatacccactctacagtggcgttcgagttcgagttcgaggtctcctccgctacatatttcccgcgttttatcagttgaaactgttcctttaagcccatcattcacctggaacgatgtttttgagaacagtcgaaaagaatacgtgcctcagaactcctccgatctcaccggatttctcgagaaagtcgaccgctgtaatcgtggattagtaagtccactgaattgaatgtttgatacttgtatagtttctaggaaagtgaaaaaaaaataaaaagtccttttatttttatagtttttatgaagttcaaaaactttttttgccatacgtttttcaggagaagttaggtgagttcattccatttgttatagaggaacaaatcgttggttatattcacaaggggtaactattcttgctcaactatatatataaagctatttttggcagaattttgagtactctaagtgtggtttgtctatacgttgaacagatttacaaagtacttgagggactttaatgatatctttacattttcacaatatggtggccatgtaacgcttaacatgatgcttgacaagcctgaagaaagaaccagagcagttgcacatgtgatcaaaatattgggtaacaaaggaatcatccctgggatacgaaatgaggtatgggtccatgttttggttctatgattctatagttgtctttatttgttgatctttttattttatttttcttttttcaccagctatatcctgtgaagccatcgtttaatgctcctgcctttttttctatagagcgtgctgctgctccttattttggattgaaggttaaaccaatttagatgttttgctgtgaaatctgctcttttataatggaaatatttacgtgcatggctcgctcacttgttacatctgatctagggttacgcaattcatgtgaatgggtatgtagaaagagatggacaaaaatttctatggataggtaaaagaagtctagcaaaatccacttatccaggaaaacttgatcatctggttgctggaggattggtaagatttctcatttacttgtcgattatacatcatgttgtagaatgtcctatatataccagataataataattcttatttgagggaatcgaaatgcacatttttattcggtcatttggtgcatagcctcacgggattagcgtttgtgagaatctagtaaaggaatgcgaagaggaagctgggatttccaaagtcttggctgataggtaagacactgagccatgctttatgtggtgttggaaaggcatatttgcccaagtccacacaaaaaaattctaaaactaaaaaaggctacgaaagtgctaattccttgtgtaaaatatgtatctcagcaaattccttgtgtacaatatcatcagtatattgcaacaaccttttactatgatttgaactaaaaacttcataaaaaattcgcttaaaaatcaagatagttatgacttaatagtttaaataaaatttggtcccagctggtcaaaaagtttttggggtggatgccacattatttgattcacccaagtgtatgtgtacattctgctcagtatttaacaaagtagtacctatatagctctcttgatattttccaacctcttgcatttttgtgtattcttaaagggcgattgcggtcggtgttgtttcctacatggatatcgatcggtactgtttcacacgtgatgtgctgttttgttatgatttggaactccctcaagattttgttcccacaaatcaaggttaggcaataactagtaaagcaatcagtaatcttgctcagatagacaggtagatatactttgtcatagcatagtaatcttaattacattgcagatggagaagttgacagcttcaggttgattccagtcgctcaagttgctaatgtggttcggaagactagtttttttaaggacagttgttccctggtcattattgacttcttgtttcggcacgggtactcactcttttctcccaaaatttctacctcagaagaaacatgttacttaccattatatattgcgggacttttatgctctcgccgcggatagtaacatccttatgagcaatctccaattccctttggcaatacattctgttccattttgtctatgcaggttaatcagaccagagtcaccgggttacttggatctataccgacgcctgaggaatggagattgctcataaggacgttactttctatctaatgttttaaagaaaaagctcactctctaataaattaatattagatactctgactatgtaataagactcatgcatgtatataatattcagagtcttcatgtgccttcatgaacatatatataccaatcaaggaagttataaaacttcatttatacaaatgagcaaaacaagttcacaatttaattgttctcttcaaacagagttattgatttttagcatcagaaagctaatccaattgtgtgaagcaaacactaattattttcatcgttatccattcgaattcttgtaacgatatgatgaaagtacactaagattgacatttcaacctcaacaactttctacttgcttagaagtcttcatgacccctaacagccttttccaataggatgccaaaagttagtattaaaaaatcccccggacataaaggaacaccattgcttgagatcctccaagtttagaaacctcctaaatctgctcctatgaaatcgtgatttcaaacaatttgtactataaaggaaaaagtggaattttacaagagagatcgttctcctcctcgtcatgaacaccttcatcaatgtttaagaacatctttcttctaaaccaagcaatatctatttatggataaaagaagggaggcatgctctctaatttttttataaaatcttgtttcttttcttttatccaactattactaaatcatcgatctttatgatgtctgagttacaatcgagacatgttgagctttcatcggttaatgcgcgttttatagaatggggaaaattaaccgatgcaatctcaacatcgatctcattgttcttttttttttttccggaaatatttggttccctaagcaaattatatgtttatctaacgagttttattcttggatacagaatgctgcatggactccagttccacagttcggagggtgggaccaaaaaggaccaaatgatgctacaaactactcggttgtcttttctaaagctcgcgcaaacaggaagcagaacaaagctggtgtaagacattctagtttgggaagcgaacaagaactcatggtaagtgttcgtcgcaaccaccaacaacttcaccatcgccatgaaactcaagacgatgaccctgtcatggtaattaaattatctctctctacttactcttccatggattctttggttcatattcaccttgtgatgatccttttccccttagtcaacgcgcatggatcatcacaaggtggtataacaattcaggaattgattttctctttgcgtcttttgtttgttttgtgtttttgcatgcgcctaaaaagaatatttcattccatttctttcttaactcagagacataattgaaccatgaatgttattcaacttaattatgagttaatacatgcatcatagtatcaggtctcatttatgaatatgtaatgatagtgtatctttaaatttgatgttatagtgtattggcttgcagtttgtttccatggttttgaaatgatgtgttttgttcgaacaatgaatttatagttcgtttccattttcccattttctactttctttttatttgttaggaaaactttgtttttttttttgcattttttccataacatttcaataagcaaccatattttaacattatattcccacctaagctaaatttcattacttctattgttagataaaaatataattaaaccaactaaaagtctgaatcatattataatctttgcattatgttttaactatatgttgggagttacataaatttgttttgcttggagcctccaaactttgaagaggcaaacatgaacgaaatgtacactgcttttctagagcgaatatgaaaactccatctctagtttgtataacagtcgaaatcaccttgttatacgaagcattatgcaatatgtgaaatgtattaagaggaagcatgttgtcaccgtcataagtctctctaacattactaatttaattaccatgcagaagaagaagaggatcttgacctacattaattgttgtataaggccaaactagggctttgttcttctacaaagtcggaatctttctctcttcagcgatatagcaaatatgtctcaagtgtgtaaagacagtagtgtaacgtttctgtaatcttctttatcacacacaaaaaaaaaaaacgttctgttctatgtgcatcatctattaagatacccctggttgtgttgtgttgtgatacattttgacttcttcctacatcatacgagaacaaaataaaacatgacttaaccaaaccgtcagatgcagaatccatttaactaatcttcgataaattgagaattgtcggatgatcatagttttagaaacaagagttaagaaatcatgcattgattgctggtacgatttggccatttgggtgattttagctttggttaatcattctccaacttcaatataaaggatccgaacaatagcaatgactaaacgaatcactttttggccttagcaaattggtcttaattatttggccacaaatacacatacatatgaccatatgaaaaacagtggctatcttgcaactgagtgccaccacctaatcgtggccatatccactaacaagttgaccaccgtcttaatcggtggctattgacgattgcaacaaaaattatttgacggctatattagcatttttttttttttttaactatgtgattaaaaatgcaaattataagaaaattgaaatttttattaaaataaaaatacaaatgtaaaaaaagtcgttgtgaaatctgtaaagttgatcatacgcactatgaagcgcgtgaaccccacgcggtaacccgtataaataacaaaattttggacgaaaaaaaaacagaagaagaagaaaaagaaatcgcgattttataacgccattgtttgaggaaactcctaatccattctcaaaccctagttacttccttctcgaacgttcctcgatattcccgcgggaaattcacgaccaagagcaatccgttttccagattagggtttatatctctgggttgcgatgagatctgcctcgtgaagtcatgtatggcggtgattgatctttgcttcagctttgttttcgcttttcgtcaaatcttgagcttattgagctttggcttgtttggttttcaaattccaataattgcagtttaatcaacaacaacaaaaaaatatggaatcagagagcgttaagtttggaggtaaatttggtttccaagctttgatttttgtcaagttttattattttgggatttgagggtcaatgagcttctgggtttctaagtgcaggtcctagagaattgggtggtgcactagatcttataacacaatacaagttgttgccacaccatgaattcttttgcaagagatcacttccagagtcactgtcagatgctcattatcttcataatttggttggagacacagagattagaaaaggagaaggaatgcaattagatcagcttattcctaatgcatcacttagtagccgagatacgaatgctcgcatccaaccttttgttcttgatgaacttaaggaggcttttgagcttaatgatacagctcctgttgaattgcctccagtaagaatattgctctctctgtttagattttaacttcctgtaacatctagatcttttactaaccatgataagttgaattacttccaagtatcttgtgatgatagttgagctaggtttgagaatatgagatctcctgttcttatttcaggcagagaagggagctcctaccactgtatcaaaatcaaaaagtgagtcaaaagataaggataggaaacatagaaaacataaagacaagaaggagaaagatagggaacataagaagcacaagcacaagcataaagataggatcaaagataaggataaagacaaggatcgagacaaaaagaaggaaaaaagtggacaccatgataaggttataaaactgtctgctcttgttggtacctaggccgtctatatatgtatattttggattcttaaattcgatagaattgacgtggtatacgctatcactttactttcagaaaaggaagaacaatgggactgaagatgctgatgacgttcagaggcacaaaaagagtaaggtaatatactaatggcaatggaggcatctccttctttttagtgaagctgaatttagaagtttctggttactcgcacattggtgttgctctgcaaattttatttttgtcggccctaaaattaacttttttgcagcataagagctcaaagcttgatgagatgggagcgatgtaggttggaggctgaagccgtgcacactttcatttttgtattgcacacccaaggtgtcatggagaggcttagaagcagctaactttgttaggtaactcggtcactagagtcatcttctcatctttagataacgcacgtttctcatatggggctgcgtctgtcataaccaacggtactgtacatgatgaatatgattgagtcaacaaagctatggttgttttaaacatgaagaaataattattgtctaaggcttataagaagataacctggaactctagcgaccgagagtgcactaactttattttggagtctcaaataattagaaatgtttctatatggtgtagatttgtctcaacataacataaaatgatttggatttggttttgcaggtttaatctctaaataaaaattgcattgtgggagaagttaggaggggttaagcaacgaaaagttcgccaagaagaatcacaacttgtacattttgttacactttaaacaagctatgaagtttatctattctcgtgactatttaaacagaaaggtttcatacattcgaaatcatttactctgaaatttatcgaatctgaaggcatgtgactttttgggtgtattcgtctctatggaaataccaaaaacaaaatttagatctttcaggaaagtgttttatctcgaacaaaagagtaaataatgagaagaacaaaaaaagacatatgtaatataaccaacggaacagagagaagggtcagtggctgacaaagtgtttcaagacttcatgtatatgtaatgaatagcaaaagatcaaactctatcagtaaaagatactaacggaaaatctcaaactcttaatcaacaaaacccttagtgggaaactttccaatccttcacactcttctctcctaccaaacgaatgactaagtaatgctgcttttcattttaaaaaagcgttccaagatgtgacctcatttgcttatccttccttttcattttctagcaaaggtctctcctttgtgctcactcccggcacaaacaacataccctgcttccacctataaaaccaattgatgttttgattatggaatctgtaaaagcattgatacgtaggggacactgtattatgaaaactgaagggggtaacgtacttggcagtctcttagagtaacacgctcttgaagctgtgcgttgctgcaaatgactgagccttgtattgaacatccgtctccaattgtggcatggtccatcacaactgaattaacaatctgcacccacatatacaagcagttgagtgtcttttcgagatgtacaccacctttctttggctggcttgagtaaaaagctaattattaccttcacattggagcctatccggcaatgtctcccaattacagatcttttgacactgcatttatcaccgacttgagagccttctccaagcatacaatgaggtccaacctgcaacccaaaaattgttattcacgatcacaactcacagaacaaatgctcaatatctacacatgtagagttacgtactgtggttttcgatccaagctcagctgatgggtggacaatgttgtgatgagcagaaaaggagtatccagataggtggtttgattcaccaataacctgcacaagtttgaacaattgcggagcttcataagtcaactgagaaaaaaatactggagaaggaatcccatgtgtaaacaacttacatctctgtttacgtccatgaaggcttgaatgctattcaagcggacgaaatacttactttcatccgctatataaacacagcatttatgggttttccgggtacccagacctgattcatagacttgatgaaagcttggcatggatgcgttggagagaatttgagacaagaccacctcgttgttctgcatattattttttccatttccattcccattttcttctacattactttggtcagagaagacatctgatctctgatactcaaggggaaaccgcacaaataaggaatcaaaatggtaataaaaaaaaaatggtcatttgcaaggaccgtatccgactaaccagctgtgtacgaacaagatacggtagtacatcctgttttaggctcctaaaagcaggtttttgatccaaaacttcctgcagaactgctctgtaagacaaaagaacatattgagtatcgacagataaaactactttgatagcaggaaagcagatctgaccaacctcttgaaggcatatatatgagaatccatcagatctgatcgaatttccatctaaatcgaaaatgacaagataattagaaactgtactaagaatttgtaatatatgaatcataaaaagatgcatttgtaggtaatttcaaaaacttaataagaacattaccttgccagccgcacagagaatgctcttttttactcgggtatctttcttaatctcagtacctaacacaatttcaggaggtaaaccaacaacaagttcaagcattttgttacctctaagaaacataaagaaaaattaaaagtaggacctttggctatgtataacaagaactgtttcaaggaatcaagccctatgatatcatcgcaagcaggttttttggttttatctttcccaccagaacctcctgattctgatggcccactgacaggttgagcacaaagcataacagtcactgctgcatcatgccttctatgagtggcggcaacagcaccaggaggaatatcagaaacaatgtctccacttacgatctacgtcaaagcaaattaccagttaactagaagctcaaaaagttgcacaaagcaaaagctacgagacgtctttattgaaaagctaaccaaaatgtctttggcagttaagtggtgtgcaattgccctgagtgccccagcagttccaacattctcagcaacagcagcaacctaaagtaaaatatccagcagaacattaataacgaatatgacactagtttctttcaatcatgcatagagttttacagaattc

SEQ ID NO: 1451 - DNA, 35369 bp, Arabidopsis thaliana
agcaaaagctacgagacgtctttattgaaaagctaaccaaaatgtctttggcagttaagtggtgtgcaattgccctgagtgccccagcagttccaacattctcagcaacagcagcaacctaaagtaaaatatccagcagaacattaataacgaatatgacactagtttctttcaatcatgcatagagttttacagaattcagatgccatagatgagtaaatacctcaacatgtaaacgatcaacacaagcagaagaaatccatccaccaactttcaaagcagcatcttccccttcaacaacctgttccaccaatgcgaaacgaaaaaatctgagctctattgaaaacattcaacctagaaactcgcaaaaggaaatcagtaattgtattgaaaagataaaaggcgtacgacgatcagatccttgagattactactctcgagaagatccagaacgtaagacaacaccggacgattcgctacgggaagcaacgccttaggaacttcctgaacaacaacaacaaattagcaattcgtcgaaactgttatgctgatgatgagagtgaaagagagagacggaccttggcgactaagggaacaagataactagagaatccgccggctagaatcacgacctggaaatccattgtcgcagctgaattgacgagagaagacgaagaagagaggtttctgctttctggggttttgattttgagaaacggtagacgaagacgatatcaatttaacccgcttgtttctttcttttggatccgacgggtcgttccattaatcttgggttatctatctcacttaaatattttaattaaaattaaacattaacaaagattaaaccatactttatgtatatgattttatagtttgtgtaaagcttgctatcaaattagaagagatgaatgaaaaaaacgaaattacattaaagagaatgagagcaatctcctacatacacactgcttctataatatataagtgtgtcaattcctaagttgttgttttctttctcctacctttagttttaagtcatttcacctaaactgaaactctttcactcttggtctatgctttcttcatcataatcttcctcgtcactagcactagcctgttgttgatcatcaggatctattttcatttcgttaatctccaacgggtaatctggacttctctctagctgtgtttccagccatgtagcattgtctccattctcatctaattcaacattaagatcgaagttccttacttttacctctgagttactactatgatgattgttgtgtgatgcaactttcttccaagatgtatcgtcgtgagaaaggctcccgttttcgggagacggggtcctgctgctttcgggagaaccgtcttctaaatcttcttcaaattttagagacagcccacttcctgttcttccactacttcgtccgcggcctctacctcgccttcctctgccacagctagtatgtttgacctcatgctgtaacaaggcgaaacatatgcgttaagtaatatacaattgtctattggcaaaataagtctggctagttaccatttgagtggtctttatcatatcttcatcgttgcaactacttccatcaacaactttcctgaaaagtcgaacaaacaagttgttagacacgataccgatatcaaaattaggtagattgattgctgacatagaatagaactatagaagaagcgggcctaaccttcttttggtagctgattggtcttcagtgtctgagccacccaaatcaggaactttagcgacagtgtctcttagaaaatcaaagacattagtcgcttgcacacactgcttcctggaaaaagaatagaaaagtattgaagaagcaagaaaacaattggtttatataagcaaaatccaaagatgagattcacacttacaaatgaaaggcgttgacagttttagcacctcggcttagagttacatcatacgtgtgattacacaagtcttgtaaaaacagctccaaagctttagctgaaaagttaaattcaaaaccagaacagatcaactacatgtgacacaagctaacatatgaacaacgtttgagtaagaaaatcaaaaacatcacatcacttacaaacaagaagagggactgccattgctattttgccaacttcctcatcagtttgcataatcttcttaatccttgtctgaaacaaattttgaacatatcaacacatacaaaatcagactcagacactaagaaatttcttatgtagatatcaacatctttgattagccctaaacaagatatctctgcagtttatttatatctagccatgaacaaaagagccctccaagtccaaagatacattcacaaagataaatttaaaaacctaatgaagacaaggaccatggaaccctgaagaagtaaacctgaaatcatagcaaaagttgaacctaactactctcacaactcacaaaacagagttcatggttatctccataagaagaagaacataacaaactataaaacagtgaaaagtaatgtttcataccgctggaaaacgtgtctggagcttcttcttcatgctattgttttacagaggaatagcagcttccaaagtcaaggggaagaagataaaaaccctaattttgaaatttgtgttgcttgcttccgttctctctggaataaataacaagagaaaatcaaattaacaaatatatatattgattccatcaaacacgacaagaaaaggaaaaaaaataaattcctttggatctgtttttttctagttagaaattggtctctgttttctgacccgtccttgtcggacccaaatcatacgcaattggaccttttttctcccactcttttttaatttaataatgagatcttatattttattttgcttttcatttaacaagttttatgtaacaattatttaattttgacagcatgtattatgtaacatttaatttgatttatcacatgatatcttaagaaaccataaactcaaaataaataaaaattatttttatagagtaaattgtaaattatactttatgtttgcattgctattcttttacttgcatacaacttttgtatcattgatgcaaatagtattttctaaaagcaaaatagaagcataaaatgcatagattttaaatttaattgggaaataaaacttcaaaaataagacagccacacatgttaatctggaagctaagctctctctaacacaatcttttgactgtcggaagtcgcagaaaacaaaccagaagactgatcataggcttttcatagctagtgtctgatatcagacaaacacagacatgtctgtgtctctaagctacacttgtcttcttagattacccaccttttcagttccaacgaaacccattagtttcaatggacctctccctttttatctaccaagatctcatatttcctcatcttgttttggtttcaaatcaaacccattcataagaactcagaccccaagattcttcaagtgtttgcctcagagagtgtctgatgaacgcagagaaacacaagtaacaacagaagaagaagaagaagatgaggaagaaaagattgtcgtatttgagaggctcttctctaacctgaatcaatcaacattgaagcgagaatccggtacaaagactgttaccattttgcatgtgaatacccaaatttggatagaaatttttggtttttaagttttagaaattttcaggaagtttgtccagtgcaattttcttggttgctggcactaccgtaagtgtgtctactttctcataactctgtccatattcttgttgaaactatgcaaggaatcaagtttgttttctgctaaacttttatccttttcttgattaggtaggtgcagggatacttgcgattccagctgtgacacaagaatcaggttttctagcctctgcagtcgcctgcattctctgttgggccttcatggtgatgatggatgattcttcttatctctgttttatgtttcttgcaagtaacggattggtcattagtaatacatgttggcttcaggttgtgacaggtttgctggttgcagaagtaaatgtcaacaccatgagtgaactaggctctggaggcgtatctcttgtatatcccctcaaaccaatacttctatgaaaacttagcttagttattatgtctttaaactcagctttgacatgatattttggcaggtctcaatggcgaagcggactcttgggtctgttggagttcaagttgtttcgtaatcatcctctcattctcacttcagaacttgctttccatcactgtttctttcatttaaacttgaaacaagcctttctgttgtgtagttggtcttatcttctcatacattacacccttcttgtggcttacattgctcggtcatcaggcatccttaccaacttcctcggcattccgatgtatgaaactccaattgatcctcatttacactgacacttttgagtgttgtgcttctgtacttattccctagaatgttctgtagatgggagagtgcaactctattctcactgatcttcggaggcctttgcttctttggaaggttagctctccatattaaactaatcactgatgccacaatttaaatcagaaactgtataaacacaaggagaaccagagtggaatagtggtagacccgacaagttaatcataccttcctccatgtggttgcagccagcgattcatcggtgcagccaatggagttctggtgtttggagtaattgcatcgtttgcagcactcgtggtaacaagtttttggctaaatactttcctgtgaattcattaaatggaaaacaaaaccatagatgacctcatgaccatattgttaggcagttgcaagtggagacttacactgggaagctcttctcaaggctaactttgaggccgttcccatgagtgtacccatcattgctctgtcatttgtttatcaggtagtcagagggaatctcattatttcaaacttggattcttggctccaagatgaagaatctttctcaattggttgcttttcttacagaatgtggtgccggttctctgcacagatcttgaaggagacttgccgagagtaaggtgacatcataccctgcaacgttaatggtgaaactcactcagtctgtatggactaactcaaccttcttaatatctttatcttcagaaccgccatcgttcttggcacagccataccacttggcttgtttcttgtgtgggacgctgtgattcttggatcgtttccagtagatactggggtggctgttgagaagatggtcgatcctctgcaacaattgagatcaagtagtgtcactgtcggtgtaagtttagttgttcttgcttatttgataaactctcaccaatcaccagctaatcagtcttcttttgatcacacagccgtttgtggaagcattctctctttttgcaatcgcaacatcttatatagggtttgtcttaggcctctctgatttcttctctgactgtaagtatcatcaaacaatcaaacttttatgtttttctactaaatctacagccatggagacataactgtataatctattctttcatcgaaaactttcagtattgaagctcccgagtggccagaacaagcctcttctttacttgcttactctcgttccaccgcttgttctgtccctactggatccagagattttcttcaaggccttagattttgccgggacatatggaggtaagtctcttcttgagaaacctgaatcaacaagttcaaacatgaaaacctaacaactgtatgttctctttcgtagttctggtattgttcggaatcctcccagcagcaatgtcttggtcagataggtacatagtctcatcatcaacagtgacaagattacctcaacttgttcccggaggaaaactcaccctttctctggttatgggagctgcaggatacgtaattatttctgaagtaatagagaatttgtcaaagtatctaaatgtttcttaacaatgatgcaacggaatagtaaccattgaaaatttagtgttattgtaacatgaaagcggtcttgcaactaggaaagaaacatttcggtaaacaacacaaacgaaaacaaaacttgaaattcagatatgtttcggtaaggagaaatttgaagtctctaaatcttgttgaaagcgacaatgtcacaactctggatgtactcgttgttaggctctgaggtgaggaagtcttcaatgaggttgtccggggacacgaggtcatcaacaatcgtgaacataattgtgagtttcttgatcccataaccaactggtacaagttttgctgcaagacagggagaaaaaaaatatcaattataaaactgtctcacccaaagagtaacaagcttactctgatataaagattgaaagtttaaacgtacaggctccccagaaaagaccaggcatctcaacaccacgaacagcctcttccagtttcttcatgtcggtttcatcatcccatggcttaacatccatgagcacagaagactttccacctaacaaagagttcaaaattcaaaagagagttagaacccttattaaaatttaagatgcagttactaattcacatgcttgtatatgtactatcgaattcaattaagaggcttactctctttaggcttcttggtgtccttcttagcagcctccctctcctctgcagctttcttttcttcttcggtctcgtcaccaaagagatccatgtcatcatcatcatcagctgcagctgcaggtgcctgttgacaattatgcaagatagcgtaaacacacacacacacacacaacattccaaaccaaactccaatcaattcccctaccaaacatagctcgtgatccctaatacaagattggaaatatcacctttcaaatcatagttccaaactacattcattaccctttttctaaggtctacgactatggtaataaagaataaagcattcaagtaaaggtacctcagcttcaacagctggagcagcagcagcagagccaccgaattgtactccaacggcctttccagggaaactgcaacaaatcaaaactcgtcaattcctggaagatcaatatacaaatccaaatctgaatcgattattacaaaattccgaaaaaaggacgaaccttttagcaagttgggaagccacggactcgtaccacttgctagcattggggaaggcatcgctgggtttcactggaacggcagcgtaaaccttgacatcatccacagacaattgatctctgcaaattcaaactctcttatacgtcaaaacgggaatagaaacaatcgaatcgtgtcgcaaaaacaataggaaaagtgagaaactttacccggagatgtaggtttttccggcgaggtgctcctccacggatttgacaccctcctctgtgtgtagatctgaaaaggtaacggccattgttgctgagttttagggtgtgagggaggtagagagatcagagagactaagctgctgttgaaacctaaaagagtatatcctgagctgtgagactctgagaaaccctaaacccaaataaactgacaaatatttgggcttatttatgggccttcaaagtggctcgttcccaaagagagtccggaaaaagtaaaattaacatttaggttgttctttatttggaaaaaaataacataggtctcaactctcaaataggtaaaggtatctacaaaattggaaataaacaaattaatgataaaatttattcttcccagttttgggtatagagtgaaaccttgatatgaatgaattgtaatttgtactattttgtatatatgtaaatctgtaatgaaaagtaaaatatttttgatgaatttaaatttacttgactccgattgatcatactaaaccagagctcattttggacttagtttgtgttattttagtaactaacttagacaattatgtaatgtcatgtgtatattttaacagaatttgagtgtcaattctcttcccagatatggcaatgagtcactaccatgctgcatatttatagttggctccttcatcttggaatcaacttctcttggttgctgcatgatacaacagataaagcttgagtctgctccaaggatggcgatttatgaaacttggaaggaacataatcaccattatcaccttgacattatacactacaacctgatgttaccgttgtcccaaaagaccaagaagatctctctaaacaaagcttaggctctgcttcgattggggtcccttacttacttagtgatgttggtttgatcagtagttatcaacttaccacttattagtttggtgaaacgatggttgagaatttgtatatttctttgaatgctacatttatagggtgtttattttctcttctattttttggttgatatggttcatgtttaattcttttataaactttattttgttattgcaaacaaatcctttgccaataaaagaaaaatgtcaaagtgtacatattactggtcactgtcacgtttgagttttatgttttggtccatatatcgtttgagttttatgttttggtccatatatcacctttactttcgacttgtgagattaaacacttgatgacatgaccacattacgtacctacaaattgtacataacatttgggaaaaagatgtattcaatatttggcatctttataagaaaaatctattaattacaaatttacatttttaaataataagcttaacggctaaatgacatagacacaagataacattaaagtagttaaattcaaatatccacgcattgaaattatctactactatttttgttgtcgtcctttagtactcataaaaggataggttcaattttgaataattgaattcggatttgttcgatgcgagttattttaaatatcctaccgtgcacattaaaatcatgggaagaactaagaagataggtacgtagtttacactcaaaacaatataaaagttgattttttcatcgaaatgccaaattcgtctttagtctttaccgaaattttaatatatttcatttgtgaaaataacggtaaaaccaaggactgtgtctgtatatattcttgctgtcgcctttgtcttttcttttcaactcttattaagtggtactattatattacagtttttaaaaattataactacattactactatatgatttttgtgcaatttaagatctatgatattagccagacccattcataagcagctgtagcaattctgcattaactaacccttctctatttgttcgttaaccaagctaatgcgacttctcatttcatgttgttttttacgtagatcacatgcattgatcacatcattttaactaaatgacactgaattttcaatattctatttgaagaatcattattaatatagtactacttaattaaagaaactaaactaaaaaatataaacatattcgcgagacataagaaaaagatgtctataaattaaaaataagactgttgacaacaacaaagataaataaataagactgtattcatatctttttgttatcaattcacattggaagtataaaactttatttttctgggaatcccctctgagatccacgtgattttattttttatttaattgatgcctatttgtttcttgtctgtatttactggaattcattttaaaaataaatttgttcaacttcttcgttttggtaaatgcacttataagctggagttttcgctctttgcaaagcagaactaaagtttcaagatcaatccttgcttggcctttcagtgtccttgtacgactatctctcttttccctttctctgttatctttatttgtttctttaagtttctaaaagtgttttcttttttttgtccacccaaagataaagagagttcaatacctgctctgttttgtctctgtaacttttatagtaagcttatatcctaagtatacgtttgaatattttccaacgaggcactgttggtttactttttctttggaagtatacatatgtgttttgggaaactgttgatccttcttacggctttcttcagaaaattggttggttttaaagagtactcatttacttagaaaaaatgttctttcttgcagatctcttttctagccttgtaggatttggtttaggttttaaggtttagcttagatttggtgtaaaattttgtcaatagtcattagtcaactaagtccaaagtcggtgtcaagcatgtgttatgtcaaatctcgttgtatctaattgtgtaaagagtttgtgattaatgtaatcactgatgcacttctactctcgtgttcttaggatttggtccaacttctaggctcttttgggagccattggagtcaaacagcaccgcaaacttattggttggaagtgacttagggatggctgagaggagagtcagtaacggagaagaagttgttattaatgtttcagataaagaagattcaaaagatccaagagcatctccttctttcaatccattggcttcaccagactccgatgctgggattgagaaatcgaaaccagtgccgcccataagcattcctactcctgaaatctataagttctctggtagcgttcataagccacctaaaattccaagtcctgaaggtctagttcggaggaagtctctttcgaggtcaatttactccaagcctaagtcaaggtttggggagcaacagtcttttcgatacgatagcactagagaggaaaatggtggaaggtcccttagggaacagtttggtgctggttcatttgcaaggggttcttttgacagggcttctcctaataacaaatccaataggagcgttgcgtcagcagcactgagtaaagttgctgaggaggaaccggatgaaaatgaagaaatctacaaaaaggttaagctacaccgagtgaagcgtagcggaatgaaacctctggcctttcttgagttggtagtgtttatggccattttgggggctttaattgtgagtttaaccattgatgtggtgaacaagcataccatttgggggttggaattttggaaatggtgtgtgcttgtgatggttacactcagcggcatgttggtgacaaattggttcatgcattttgtggtgttcatcatagaaaagaactatcttcttcggaaaaaagttttgtactttgtgcatgggttgaagaagaatgttcaagtcttcatttggtttagtctggttctgattgcttggatatgtctgttcgatggtgatgttaaacgtactcgtaagaccaagagatttctagacttcatcacttggactattgtctctcttctcgtagggtcaatccttttcttggtgaagacgtttgccttgaaagttcttgcttcaaagttcaacgtcagaaacttctttgagaggattcaagagtctgttttccaccaatacgttcttcagactctctcgggacctccgcttatcgaagaggcagagaacgttgggcgcgtgccaagcacaggtcacctaagtttcacaagaaccaaagatggaaaggtgaaagacaagaaagtgatcgatatgggaaaggttcacaggatgaaacaagagaaggtctctgcttggacaatgcgtgttttgatcgaagccgtgggaacttcaggtatatcaaccatatccagcactctagacgaggtcaacaataagaaagagagaacagataaagagataacaaatgagatggaggctgttgctgctgcttatgacgtcttcaacaatgtcgctaagccaaaccacaagtgagtcatcacacaaatactctgttttcttctactctgttttcatgttaatctcacaacttgaattgctttttaatttctcagttacatagaagaagatgacttattgaggttcatgataaaggaagaagtagaccttgtactcccattaatagaagatgccgacaccggaaaaatcacacgcaagacttttacagaatgggtggtaacattcttcaaacacccttaatttttgtgttcaaagttgttttagatgactaatggttaccaataaaggaaaccctagataaaaacataacacatgtctatttagagaagttgttaagttaaagtaggtgtgttgtgccattttttgacaggttaatgtatacacaagtcggaaaactatagggcattcactgaacgacacaaaaacagcggttaagcagttggacaaacttataactggaatcttgaccgttatcacattcattgtttggatggtacttctggatatagcatcgaccaagcttttattggtcttctcctcacaatttttgggtcttgctttcatgatcggaagtacttgtaagaatatcttcgaatcctttatgttcgtctttgtgatgcatccttatgacgtcggagatcgttgcgttgtcgacggtgttatggtaacttactttgcaagtttgtttaatttgctcactattactactcagttaaaacatctaaatcattgaggtattttttttttatattattgcttgaagttgttggttgaagaaatagatcttttaacaaccgtgttcctcaagattgacaacgagaaagtgttctacccaaattcggttttaatatcgaaaccgataagcaacttctacagaagtccagatatgggagattatgtcgacttcggcatcgcattctcaacaccggccgagaaaatcggctgtctcaagggaaaaatcggagagtaagtattaggcatcttggttcttcacatatatattttagtcccctaactaccatataacatgaccttgaccacattaaatcactgacttttcattgactctaaatttggtgttgtaattggtcagatacttggtggcaaactcacaacattggtatccagaagcacaggtgatggtgagggcaattgagaatatgaacaagctggtattgaatatactggtccaacacacgataaatttccaagtatatgtagagaagagtttaagaagaaccgcgctgatcatcgcaatcaagcgaattctcgaggatcttgagatcgattacactctccttcctcaagatgtcaatctcactggtcacaaatgatcgtgttttccttctcttcttttgcattttattccactagtactagtttccttcatttgcttcggtttaaatttgatttgtttcggtttaattgcactcagaaactcgggtttactttaattgcttcggtttaatcgaaccataattggcctattcgatttctagatttggtgtggagaaataagtaattgaagatcggtctttcttagtaagcaatatagtcttgttaaaccggaataacttgagggaagaacaagaaaacaaaaagcaatgtagaaaataaaaccgaaccaaagtaatcaagattcaagacaacacccggttctgtgcggagaaaagaaaccggccttttgtttttgtgacatgggtttggtaataacactgaaactgaaaccggttcgtctttaaatatgccggtacgccacaccatgaccatgaatgaatctcgcattctcttcactataaacttcagtctccttctctagcctgctcaattttttaatttcaaaaattttgtaaataaatcgaataattatttattgtgttaagaaaagaaaataaaagagagaaaaatggaaattacgcgagagagatggttttgttgagagtagcagcagagacgaaagaaggagcgtttagatacatcaattctccgttaactctctcttcgattcttcgatccatttcatcaacttcaacgtcaaactcgtggtccgatgccatcacccatccccatgtgtccgcaaatgatggcacatgtgctgtgtaagccttcacgtctgtttttatatcaatcatcaaaaaatggatccaataatgtcattacaagaacacacacgaaacaggctttaatttgcttacacttgaagacttgcttcatggtgttgtagattgatgtgaagacttccttatgagtgaatattcctgctggtccagcctatgaatgatttaagtaagtaaatttagtcttttgttatcattcttctaaaattattaatatttatcaaagaataattagaagaaaaaataaaagatgtatagacctgggtgacaaaaatgccattagggctaagcttgggtttgagaatgttttggtagaaggatttggtgtagagctgataacaaggtccaccttccactggatcagctaaatctcccactatgatatcaaacttctcttcccttttctctaattcagccctttttcacatttcaaattatattttttagagattttaaacgtcagataaaaactttttttgttttgttttgttttaggttccttactttgcatctttgatcacaagttcaagctttttgttacagaaagcatcgctgttaacggtcagaaatcttctgcaaaaatcaacaacttcctagaagaagaaagaaaaaacatgtatttgttaagatcatgcatgaacgtatatttttgttaatacaattggaggtatgagattaacctgatcaatatcacacataacaactttctcgatcgtcgtgtgttttagtatttctcttgcagcagagccttcacctcctcccattataaacacagtcttggggctactcaatgagcaaatgttaagtaaatgacaattccaaactatgtttatataaaatgttcatgtataataataaacaagtgatataatttactaaatattagtagaatcagtaggctatataggtgcactgttcaaatctgaagtactcaatttgattactaaaaaatcttttatatatacaaaattttatttgtaagtgaagtaaaataaagtgcatacttgggatggaaaaggagagcgggatggatcaaacattcatggtagataaactcatctctctcagcactttgcattttcccatcaatcacaagcacctgttttaacttttactaattagtctccaccatataatatcactacaagaaatttgtagtaatcaaaactatacaaaataaacatgaactttaagtaaaaatattgtttcataagaataattgacaaaatgtacctttccaaaacgtttggtgtccaacagagcaatatcttggtactcactagttccttgatggagaacactgtcgacaaaaaagaaaattgtaaaataaaagacgaggagaatttaaaataagagcaagtcaacttgaaatggaagaaaacctgttgagggcaaaagaccacttgagatcatcatcgatggtttcttcataccaatggcagtcttgctggttagagtggagggtttgagtgggtgatgtggctttgtgaatctccgggaacccatttccgaacatgacctctacggcttcacccatatccaagttgaggagaagatatagagaaaaagtgtgagtgagagatatagagaggaaaaagagtgctacttaatgtttggtgatgggacgatattctatggagacaacctttgcgtttttatagaatcttgttggtgtgtagaatgttatatcgtgcgttatccacaaatgaagggaaaatgaaaaatgctagcatgagtaatgattgcgacagattacaactctacaatcttctgccaaaattccgtcgcatgcttatattttggcattttaacgtttcaacacttcctcatcgtgacatcataattataagagatttatggtagatatatagtaatttatataaacttctattcatatatgttctttagtgtttaagtttgaaataaatgtttaaggtacataacctgttcaactagtttttgaaactatactagtttacaattttcgtccgatcaatgtatatatttaaagtatgtttctactattttgatttttaggataaatcataccagagatgcttccggaccacgtttggaccggtggtttactttagtttaagacattacttcaactatcttagttgacatcaacctttttcccctcaaaccataacatcacttttaagttcaatcatgttttaaaagctatggctttctcccacccaaaatctcagtccttgtaacttttttttttttgttaaccaagaatttctgacctctcaacatattaatccactatgatctttctttgttgcacattattgtgctccataactactaaaacaaatgaagaatcaactatgtaactaaaaggtaaaaaccagtttgacgaaattaaaacaataatgtaattaggttctccttatgtttggttacgataccaagtggactgtgtaggatggtgcaaatatgaaatacaaatcactgcaaaacaacacgcgcagtctcagtttttagatcatggccctgccagaattttggtggaatccacagctagatacatatgtacacttgtcagttcccctctcgactatgatattttcacattacaatttttttatttatttaatcgtatatataataaatacacatcgaatagttaaaatattttgaatcgaaattcaaagtaattgtgttatattatttttttgactaatttccgcagtctacagaagaatttggtgtatctaaaattatcaacacatgattaagaacataactctgttatagtttctagagattattgtgaggttcaaacacaaatagatgaaattggaaataaaagttggaatattatcgtcattagcaaaacaatagtcccaattagtgacacaggatcataaatactcgaagaaacagaagaattagaatgggacccacatctggaggtatgggatatgcacacttaattaagcgtggagttaatccactcaaaagagaatgatatctttgttggagactccactcttatatgtatacccctttcttacttctcttttgcctctaacaaaagatatttctttagttgagtttaagtcatttagttcaagaaaaaaaaacgtgcattatcatcatcatgaccatcaccatcaccatgataacaatcatcatcaatattatcatttatcaacaagatccttgctcacatgtattgtgtacagaagatcttgaaatgaagccaaatccccacgacacgccctttgtatatatatatatcattacctatctataaaatctctcgttctgtgtgtatacgtttaatttttatacatgttgtgtgtctatatgttcacgaagagacgacgatcatatatttaaaacattcaaagaaatgatgcaatatatggtctaaactagtgataaacatcacagcaccaatcactttaaagaatagtgagtgacaaaaaaaaaagggtagcgatattagtgggtttgtaatatttcgtctgtgtctcggcagacaaaacacacgctacaaattggtttaagcctagaaaattcgttaaccatattataggttatagatttgtgatgggatgcctcatgcacacctcctgcaaaaaatgtatctacggactcatcacgtttacctaatccacatgcatgttcggatagtgtagaacagaaaagctagttatgtcgcatctattatccaaatggtttatgaggaaggccaataaatagatggtcttagcaccatatctctcggatacccaatatatatccaaattcaaatatcatgataagcaccatttaaaaggaatatgaaaacttctctctaatattctactgagagaacttatactattaagagactaaatactcaaaagtacactaaatcaaagagtattatctcatgtccatactttaccaactaatctcattttgagcattttctgattttagtgtcgtaaggtctttagaagataaactttacatgtatgcgcaaaaaactagatgcataccattcgatggtgggcgcatggtggaaaaacaaaatcaatggtccagataaatgaggtaataggtgaaccataaaggacaaccacttttattcgtgtcttcaaaagtggcctgcctaatgaatagcttgccgtcgagttgtcttccacaggtaatctagattatatatattacgcatcatttttgaaagaaacatttgatttgttagaaaaacatataattactgatgatatctaatggtgcattgttatacaacttggttaaaagaccaagaaggattgtgtggaagctgactttagaatgatgttaaattatttgtttaatgaaagcgtgactaactttcctccaacatctacgtggttaaagtggttccacttatgacttacccgaccacactcaacttatgcactgcatgtatcaatatagatatatgtgtgcacaaagttgtgggcactagcaaaggatctctacaaaatttgttattgtggacaaactttctctttcataatctctattattaattaaatatctaaaatatagattaataaaataaaatataaatacacccttcaaatcttttttttttgtatttttaagtttgcatgtaacatgatcacataactcatctaataagaaaagagtcctatataaattaaattgaaatttatatgaatgcagagaaaaaaaagtaaggagaagaaagctatacaaatgaataagttttcttacgaacaaaagatcattggtgagttatgaatatgaagttaaagacaaagaaaagctgacatgccacgggaaatgcaatgccaagaagagaccccgtaacccccatttaacttattattattcagcttattccactatataaaacttagcagttagtaccgtaatactccaaattaatagacaactaaaactaaatatgtactccaaattaatagacaactaaaactaaatatgtacttagtttgatgattcggttattatctctatatacttttagtctatcgctatattgcgtatggaacttcaaaaaactgtgtgacttttggtcataacatttgtatcggttattaatataatgttttaaaaaatatatatatattcaattggtcaaattcttgaatgtttgaacaatgcaaaagaaaaaagaaaaaaaaaatatgtacttagtttgctattccaaagcaatagcacacagcattgtatatgtgcgtcttcctaagttattgaaaaccaacatgaaatgtatgcatgcataagtaacacaatagtagatgttaccaagtctcaaaaaaactaatacagtagcatgctaactaaatgttttcagttataattacatcagtcaatagctcgattaaatggcaaattaacactcgtctaaccacttaataatgctcgcagattaggaagaatacaatcagaactcgaaaagaatgaaaagagaacaattgtttttgaactaaatcagcttcaaaacaactcacggtttgcatttagacttggtttactcgtgatatctcaacttcaatttttttctttgtggccgaattttaacaaaaaaatagcttttagcaaactcaaaatgaaaaaaacaaatggctaattaaaagatcccaacatgtttcgtgaactcggtatcagctttggccaagctctcttgttaacgactgatttcaattggtaatagttctgttccttcttatattctcttaacatgtttatattcttaagtttaataactaacagtagttcctttctagggatgaagttgagcttagaatggttatggagctgattttttttcgtgcttcagtctcaacttcatttttttctttatggccaattttatcaaacaaaattggcatttagcaaaaacccaaaatgaaaaacatatggctaatttaaaagttcccaatgatttatggtttctgttgtcccatatagatttatgaacaaggaatagaccatattttactctcttggtttagaactggtttggttaaatcatattcagttatttggttcggtttactaagtaattcaccgaatttttttttgtggccgaagtagaaacgtgtaaacttcctctggttgaaaaatggcgaaatatcttctccacatcacacactagttcttcttctgctcaatctcaactatcccgtaaaacaaaaacgagggaggaaccatggcggtgagctcattcgccgtccttcctccatttggttcctcatacagctccacaaccgatagatcttcttcttcttcgttttactcatcttcgaaacttctccgcatatctcaataccggttccagtcaaattcccgttgtccaaatgtgttcgtctcgtgctcactgaatcagccttctgatgatgcttccgacgccgccctttttctcgaatccaattcaattgctgattacatgcggttcaaacgccgtcccgaccccggaaatggtaccagcgagttgcagactgcaatcgtgagttacaagaaacgtttcccttggattcttctcaacccttttcttcaggttacatcaccatctctgttacttgctgggtttccatttaaatcgataaaggtaacatttttatcgatttcatcatctctatattgcaggtggatttggtctcaactattcatattgcagataaagagtgagtctttcttctattgctcgtaatttgtttatatcactagtgagtttgattaagttttaattagtttcttgtgtggtgatatatgtggattgggtttgggtgtgtaggtacttcacaactcttcagaaggagcttgaaccatatgattctatcttgtatgagatggtggctagtaaagagaccttggaaaacaggagaaaccctattgcatctaagaggctcaagagttctcgttcaagaggtttcagtattcttgggttcattcagcggcagatggcaagagtactaacacttgattttcagctagattgtctagattacgatactgagaattggtaccatgctgatctcgatttcgagacattccagttgcttcaggtttgtttccaaagaacagaagtgcctgtctttagttgttgcttgttctctgtcatttttgagtaatattctttggtttccgcattggcctgtatcatggttgtattatttgggagtgagaactatcagttgaatgatgattaaacctgtatcatatttgttgcagaaggagaaaggagaaagcttcttctcatttgccagggacatgactattagatcaacaaaagcaatgatacagccagctttggtaactgaaggtcgtgatacttggaggtcaaagcttctatgggtttcacgggtttttcctatgcctcttgtgggtcttttcctaatcggggctttttgtgctgactttggagatcagacctcagactatccagaattagaagcactttcacggcttgactttggagctgctatgaaggttttccttgctaagagattgacatccgagtaagtccggtcttgttcatgattctgaagttgtttttcttttgctgatctaaacttgggatatgtgctctacttgacacatttcttaccatttgaattgtgtatgtgcttcaaagatagggcaaggcagagtagtttttttcttattttcttagaacatgcaaatatatgtaaggctagtaggaagttaactattctattattttttgttgttgttgtgaaggctaacactagagacatcagatatagaggaaaaatctgtcatcattggtgagagaaaccgagcagctacggaagctttaagaagagcaatagagcaaggacacaagagaattggaattctatatggcggaggccacatgcccgacctgggaagacgactgagagaagagtttgatcttgttccttcagaggtaagatgggtaacagcttggtccatcagaaatccaacggacttggagactagttcatatccgattctgaggaaaatggcagaggctttgcgttggccactaaaccggtaccaaacattggcattgctaatattttcatctgtacttgcactggatctctgcttttgggagctcttctttggttcgacaattgactgggctacccagataggtgcagagttataccagtttatagataatacaaaaattgtatgacgcagcacagaatcatgtacaaacagtgtcaaataccttttacagtgtcccaagtctctctgttgtaaagcaaacatggctctgatgtcaaagaaatctattgaataggtaactctagttgtttttggtttgatgataatgtttttatgaagaaaaaaaaattacttaataaatggaaattagaattcagacaaagaaaaacgacaaaaaaaaaaaaagaagtcagacaaagaaaaaaggaattggaatatttctcgtataaaaaaaaaatgtaaataaaatttctcgacttgttgggcaagttcaagcatcgcccacagttgccaaatcgcaatataggcgcccacagctaaaagttgattctcaaaacctctctctctttgtgaacaagattaaaaagacgacttctcttttaacttattcctcctctgcttcttcaagatccattgtctgcaatttcaatcccttgtctcgtcatggattccgtcttctctaacgttgctcgtgctcccgaagatcctattctcggtgtatgtcgcttctctgtttgatctcctcttacttttttcgcgttttagttgattttttattccgtctttgcttcgatctcactcggttatccgaaatcatgacggttatatctgattttagtgcgtctctactttttttccgtctgatcggagagagttgggatttgatttctctgtgttttactcgatttggatatgattcttatttggctactgggaattagaagacatatgactctcgatgatctactggcacagtgaatattattagtctgtgtgatcaatgatttgattattagtttttagtaacgtttttgagagttaatgatttgttgaaaacaggtaactgttgcttacaacaatgatcctagtcctgttaagatcaatttgggtgtcggtgcctaccgaactgaggtaatttttcgatttctgcttaaactgttaagcaactttatggtatcaattgtttctactagccagtttttgaaagctcaggttttgattagtttgtttctctttttttcaaaggaagggaagcctcttgttcttgatgtggtgcgtaaggcagagcaacagctagtgaacgatccgtgagttgaagaacattgtcactaattcgtgtagttgtctcttcttattcttgttttttgctaatgcctaaattcttttctctacttctctaaggtctcgggtcaaggaatacattcccattgttggtatttccgattttaacaagttaagcgccaagctcatcttaggtgctgacaggtaatcatctatactgtttatttgttatcttttcatttgtgttttgctttgtttctcttgtgacataatatcccctttagttgataaagtttaatattttataaatattcttgttttgttggcagtcctgcgattacagaaagtagagttactacagtccagtgcttgtctggtactggttcgttgagagttggggctgagtttctcaaaacacactaccaccaagtaaacttctctctatttagttttttattatatttgacagtcattgaattatgtaatcaaacaagtgttgcttactatggttctcatccttccagagtgtcatttacattccaaaaccaacttgggggaaccatcccaaagttttcaacttggcaggcttgtctgtggagtatttccgctactatgatcctgcaacccgtggtcttgacttcaaaggttgattcttaactttccattaatttttgttttcatcttcatgtggttgcactgacattaatttagtcatggttattgcttgattatccatctactctacttttcctgtgttttccttgatataaccacaatgaaattatttctgtaagtttaatgatcgtattttgacaattctatgtttgaaatttgagtaaggaaagaaatctcaagattgcactctgtcaaagtaaaatggcatttgatacaaacattgacctttgatgccaaaaaaacaggcttgctcgaggatcttggcgctgcaccatctggagctattgtcttacttcatgcatgtgcacacaatcccactggagttgacccaacctctgaacagtgggaacagattcgacagctgatgagatctaaaagcttattacccttttttgatagtgcatatcaggtagcactcataaaggaagtcttgctttgttgctttattcaatggtggtttacaaacaaatgaaccccgttatagtgtatgcttgaatcttatctaatgtagaaaaatagcagcctgactcatttttcctaacacttttgcagggttttgctagtggtagccttgacacagatgcacaatctgtccgtacatttgttgctgatggcggtgaatgcttgatagctcaaagttacgccaaaaatatgggactttatggggagcgtgttggtgcccttagcattgtaaggaaccaaacttctcaatttcttattcgcttctattcatttgacattatggttagtcaaaaagttcatctaatggatagtacaagaatacagtattcaaaaattgcatctaatctgtgtgatataatgtgaaggtctgcaagtcagcagatgtggctagtaaggttgagagccaggtgaagcttgttgtgcggcccatgtattcgagcccccctattcatggagcatcaattgttgccaccattctaaaaagcaggtacatgattatcatgctttagtttacaattactttgaatatattatgttggagaaggaacctttaaaccggagttagtatagtaaaattacatttttagattattacatacaagatatatgtatacattgaaagctgacattaaaaattaataggcaagtggaaagagagatccctactgatcttccatacgcagtaatttgatagtttatgctgtgttgaaatggttatgccaagtttctttttctatggaatcatgcatatatcacaaacattttcctttgctttatcaagcttataatgaatatctatggaattaggttctgctctaagtttctaaaatttctttgtatatattggcagtgatatgtacaacaactggaccatcgagctgaaagaaatggctgaccgtataaagagcatgcgccaacagttatttgaagctatacaagctagaggtttattattaattcctttcctctcttatttttcactctgtttatcttcttttccatgtttgcagaatcattactctgcagttttttgttcttgacacgttgtctggattgcaggtacacctggtgactggagtcatattatcaaacagattgggatgtttacatttactggattgaacaaggagcaagttgaattcatgaccaaagagttccacatttacatgacctctgatgggtgagtcaacttatattttcttttcgataattttaggaatatgagtgagtttggtttctgctatgcctaaaaccataagtatatatgacatgaagtatttctaagaggtcctaaaatactttcgccaaactctcttagttgtaagagtattagcagtaataaccagatatatatagaactagatccacaggtttcattatgttcttcttaggcatgtgaaccaagatagttgctttgatattttgagaaagtgagatatgacatcatattcttgctagtgaaattatagttgcatgaagcaaaggatattagaaaataccagatttgtaagttttctgagcttcaaattgaaaaagggttactttgttgtattgcaggagaataagcatggcaggtctaagttcgaagacagtgcctcaccttgccgatgctatgcatgctgcagtgacccgcctcggctaaactagcgaccatacatttttttgctgtttctacaaataaaatgggacaaaaaaaaagaacaccgtttttgttggcttatatactatggtttttttctgatggtaccatatgtttcctcatgtcttttgactaaagatggttgaaccaaaaccaaagtgaggattgtgacattgagatctaccgtttctaagaaaatattggttactttaatttgccaccaacaattgttattttgcagaattttcaaatgtcctgttattttatttgctgagagatccttatagtttggttctcgctggaaaaaaataagttttgggaagtttggcacacctaagaagaagtatgatttgtattagaaaaaaaaatacttgtcggaatactctctaattggtccatctcttaaaatatcacataaacataattttcaaatgaagcaatcgatcgtttggaattgtaagggacatatagtgaacatgaaagataagaaaatgtaaaacggaatgaggttatatggttttttgtatttaattagttttcttttgtttctttaatgaaaacttgtttcaatgtgtccatttataggtagactcatttgtttaagccgcttgataaaaaaaaatgtcaatgcaatatttatacatcagtgagtggatgagaaaatggtcataaacaccacttttcaaagtgataaattacacgacgtgattaaacgattaaagcagtattataagatattgaaatcaaatcttttaaattagtaggataaacagaaatgtttagacttggtaaagagtcgccgtgttacatgcctccatgctactgttgcactaacgaattagtcaaaatctgattttaaaattcgattgtctctctttttaagttattaagtttgtaaattccagctatatttgatccatagtcttacttaattcgagatcaggcttaaacaataacgatccacaaaacataaattatccctctccaagtttatagcacataggattctaactcggtccggcgggtaactctaaaacatcatttttctaatcggttgagccagtcacatttttgtagacatattttatttagaaaatgttcttacaagctcatttaacgaaatgtggattagttcaaataacgaacaattttcttacacgaaattgttccagtgaatcaaaacctgagcagcgtgaggtaaaattctaaacaaatgaaagataaaataaattaaggaaaagtcggagtatctttaaccgcccttccactatttatcttttgtttgttttttgaaaacatggaccgcacgttgtctctccagccctagaaaactacttcaacatttctctgtttcattcattttgcaccaactaaaaaacaaaaacataaaacaactggaaagaaaaaagtacagaacataaagtagttttgtttcattcggtggtgaaagaacagagacaagggagagctaaaggactagttgcttgatctgtacgtctcttttgctttcttctcttccattttgtggatttcatttgctttgttttcttttatataatacgatctgagacaagaaaaaagaagagagaaatataaaaaagtgtgtggagagatataaattgagaggagtaaattgggaatggtgcggacattaggacgtaaactaagctggccaagatcttttagttttagaaagatgttcgatggtcggaactctggacattcatctttctcttctcgtggggatggcatgcatacacccgagcacgaactcgccggacatgctgcaccatccactcgtagaggcaagcaaaataggagatcaggtaacatattagtgcaagtttatttggtaaatggtaatggcaaaattttaatttaatggaaatgaaaattttatttcgagataatataatggtagaaagaaaactttaggtgaaagaatttctaaaaaatatccatttcatattttcgtaaatatatccattgcaccaataattaattaatgctccaattaatgataatgtagaatctctaaatcatttattacccgcttatatatattgaccgaaataagaagtcctcattttataaattatatatagacaggaaaatgatattattgcacggaaaaaaattatgtgatccgcaataattaattattgctaaatttgataaccacataaacgaataaaatgttatcccaaaaccacaatgaattagatgtattaatatcttcattagatgtattgtatatagcataatgaattgcatttagattgcatttgtgtaagatgcatgggttggatctgaaaatcaattggtaagagtagaattaccaatatcgttgtataaagatgagttctttaactaatatttatatatttttgataactatttaattaatattattctatgttggattccttacataatctttgtattgatatctgtttcagacatggaagtgatgaaggaaagattcgcaaaactgcttcttggagaggacatgtcaggcggtgggacaggggagacctctgcgttagctttgtcaaacgccatcaccaaactcgctggtaaacctttaacactactaatatgattaaaacattaaatgtctaataacgatttgaatggttaaaataagtcacaaactaattaatgtggctttggtattggcatgcagattcgatgtttggagagcagatgaaattgcagcctatgtatccggagacaaaagagaattggaggaaagaaatgggttggttattatctgtgattgatcacattgtccagtttgttccttctagacaaatgggtaaaaatggccaattcactgaggtgaatgcatgcaactgttagtcattaattacgtacatatataacaactactagtctactagtgacgatttttcttattaaccctaattttctcctttgtagatcatggttacaaaacaaagagatgatttgctgacgaacattccagctttacgcaaacttgactcggttcttctcgtgagtttaattactacttgattgtttcaaccgcggtttcaacgtttgggaaaaattaaaccattatattatatcaaacaccacatcgtttcaaaaatattttgtttgcaacaatatccatgacactaggacaaactactatatatactacaagtcatagtcatctttgcaaattataaagataaatataactgaaaacgtcataacaccaagagtaccatctcattaattaatttcatataggagtgcatgtattataaaatgatcatgatatatatatataacaaacaaaaatagatgagttgtgaccatttatcatactaatgcaattactcatttggcaggaaactttggacaacttcaaggatcagaaagacttttggtatgtgccaagagatatggaggatgcagatcacaatggagattggaggagggatgagaactggtggttaccagttgttaaggttccaacagatggcttgtctgaggaatcacgtagatggttgcagaatcagaaagattctgtggctcaagtccttaaagccgccacggccatcaatgctcatgtattgtctgaaatgcacgttcctgaaaactacattgattcccttccaaaggttacttacttcttcttcaaaagtgttctgtttctttacaatttccactaagctaggaagctgatgaggctgttggttatgtagaatgggaagacaagcttgggagattttctttacaagagcataacagaggagagctttgatcctgactactttgtctctttcttggatttgtcaacggaacacaaagtacttgatctaaagaacaggattgaagcttccatggtgatctggaagaggaagatgtgccagaaagagaaagacgggaaatctcagtggggatccactgttagcttagagaagagggagcttttcgaagtccgagctgagaccattttggttatgctcaaacaacaatttcctgggatcccacaatcctcccttgaagtctccaagattaaaaacaacaaggtaacataacataacaaagactaaacaaacatcaacaaaaatgtagtgagactgagtaagagtttgttgtgatttgatcttacaggatgttggacaggcgattttggagagctattcaagggtactagagagtcttgcttcaaagataatgtcaagaatagaggatgttcttgaagccgatcggctagttcaaagacagttgatgggagaggcagagacaagatcagaaagcgaggcagaatcagaatacgaggaaactgaaaaggtggttgcagcggaaacaccaaactcgaggaaactatcagacttcatagggtggagattgtcatctgatactaagaagcatagttcaatgagtgatatagaattcttccacaaagttgagcaggagaaggagaagcccatgatgaagtctccaagagctctaccgaagaaattttcatatctagcaaagttagagaacatgagaagccctagtgacagacactgatagtgaaaagagaaggtaatagaacagggcatagaagaagaaaaacacaaagagagtgagagagagagaatagaagaaggttaaagtgtgtgagaatgtacatatataacaatgcaggcattggttttaggatttggacatgagacttggtgtttgatcatgattgttgcttgttttgactattgcttcctgttgttttttctaagaaggaagtgtgattcagtgtgtaacaatattttggtatttttgttctttggtgttttgtattgtaacgtctaatctacaacattgtttcctaatggattttgaagctcattgataatgactagtagtgtagtagtattgtaatgaaacattatttgatgacgacatgtaatttagtggtttgtgataataccattgatctgtgtttaccatccggactattcaggtattcgggtccgttatttggatttttaaatttttcggatcgggtttagttcggtacctttcgggttcgggtcggttctggatatccaaataattcttctttttgatctcctttactcaacatttagtggttaaaacacagaacaacggaaaaggcaaatcgggatcagccaccggcgatgaaggaagacatggataagatggtggcggtagggctcgtatggggagccaccaatgctctgatccgtcgtggcgctcttgcctgggataaaacaaagtcttcttcgacaacagaatctcattctcctcctcttcagatccgccgcaaaatcatgattgctctccgcgactggatcaatctcctcctcttctggcaatactcaattcctttcctcataaacctctccgcctccgccacattcttcgcccttctcagtcacgctcccatctctcttgccgttccggtgactaacgccacaacctttgccgcaaccgccgcttttgggatccttttaggggaagaaactcaaatcggacttgctttgttaggtacgagctttattgtatttggaatttggctttgtgttctgtgaaattcgaattttgtaaaaccgtgactctgtttctgtgagatctattttgcgaaagaactatttgtgtaccatcttttgagaattttagctaactctctgcaatattatcgaaggtaattaacattactagtcaatgaaacaaacagtgacttgcaatgaacgcatcgaatgatttatacgcaaaaccgaactagtgaagaaagaatagagccaaaagtaataataaaagaatttctccaatacaaaatttagtcataaaaactcaccgaaaaggtttacatgaacggaaaagtttatagaagtgaaagaaaacacaagtaatttggatccattaatggtggcataaacaatatatatagaaggaaaaaaaaactgatattatgtgattgttttatattaagatgttacggtcataagacaaaatgggtaaaaattatcgtcattagacgacctgaatccattctccagtgctgggaacacctttgtagatggcaaagataagatagtaacccggtggagcgatgtttccatttggtggtgcaacggcctggatatcgtaaccggcaccagcaggtttgacattattgacacccaagatgagcatcctcatgttcattgagatactgtgtgttgtgaaggcaggggctaacatggtaaccttgagatttcccttggttgctcccttttctttaaggtcgaccttcacgttgaagaattgtccgtatttgacctgttttggggtgccggtggtgacgatctttggccttatgttggctagagccgggtcgaggtaaggtggggagaatttctcaacgcgaagctccgttgggaactcaacgttgtacttgtaaccgtcgttggtgttgctgccaccgacaagaaccttaccgtctggaagaatgatggcgctggagtggtacatacgtgggatggtggtgggcttgagctgtctgaaacgcttgccacgtgcagcatggggcttgtacaagaggggagcaaaggcagggtctttaccatatccccagcctgaacaaccacgtttagctccgttgactagaaggatgtctccgttagggaggatgacagtatcactcatgattcgtggggttggcatcatctccgtcttccatcgtggctttgcgctgttgatccttatcctggcgcagtcttgtagtgctggttcgtatatttttttaccagccttgtaatacgcgtcttgtttggaaccaccacagacgagaacctcggctgggatgaccttggggtttttcacgtaaagttggatggggaggagtgcggaagaacctgatcccgggtagttacgggcaccacctgggagctgagggaactccttgatgacttggtttgttttggggcttagaaggatggatcggttgttagcgaaaatgaagaggttaccgtcggtgttaagccagacgaaagggtaaaggttgttttcttccgggtcgtctgtttgcctgaggagcaatgagtcaaagagcttcctgttgttttgtccctcctcaggaatgtattcgtagttcaaggcgtctcttccaccaatcacgaagaactttccgtcagggagagttgcttgcgttgagtaccatctcttcgcggccaatgcctgagggtattcttcccacttgcagttttcacagctggataggtacctcgcggtgttggctcctcctccgtatcctccagtgctcaccaatgtaccatttacggtcagacctccggatgagcaccatgtatcggtggaaagctatcatgaaacatgtgaatgcaaatatttaattcaagttcgtataatatgattctatttaatgagaagaagataacccgtgtctaggcctaggcccaaaaaaaaaaaaaaaagatggtgtcgtgagtttgaacatacccctagaggcttaagggcgccggtgttgacatccatgagaatcgaatgagcccaacaatcgaccttgttagtcttagcgtccacgacatggcatggtacgcctggaggcaacttaatctttgaaattctccaaatggtggcgtcatagtactggaccttgttgataactggcataaggatcgcatgcatccctgacacacccgagttttccaagaagagctcccacttaccaccccaggttgtctgagcgtctaaaccgccgccacgctgccttcttgcggcttttccaccaactgctcctgcaggctgtggtttcgcaaccttgacagcctcattgtccctaaagccgttgttgaacccagggaggaacggtagaaacggtagagggaagatggcctcggacacagcagcgagcataaggacagatattgtccatatgactcttgttgaggctttcattttctaattttttttgatttttttgttttctttttttttcttcccctgttttggttggggaaataagaaaattggatcccaggcttatattgattgttgtgatgcctgaagaacaagctcttgtctctgcgtgatttataggtgttgttatttcacttacgtttattattagcaattgctatttttaaatgtgtggtaagaagacgtctccccaaaacagcctatagatttgtggagtttctgtgatagaagaaaacattggtgtttcgtatctgtctctcgtgcccttttttttacaatgacgtggtcatgcagacaatttcttaatttgatgtcataaagttaaggaccatttccttacaaaccatcatggggctgatccaaagggtaaaggattgcataatacgtacacataactatacatattacacatattttgaaaagtaataaagaaacgtgattggcaacaaactctcaactaacataattaatagatgattaacacattcccaaatgagccaacttaacaataatgactatgcatgtcacggacattgttaacatttaattggctgcagtggacttgcacatcaacaagcatcagagtagatctgtcccgacgttgataattgttttccttgttgagggaagtgactatatatctagtgttagtctttatgaaactgaaaacagcaatgtctataaagataaataattgcggtgacgtataattgtgtaggaccctattatttttcaaagtgaacaagattgtacttaaagtaattgtagtttaagaacataaactttctttatcaaacatagtgtaaacataaaacaccatgcattgaaaactaacaacaatctaacttacataatcaaagacttctaaatacatattatccttaactccataacattcaatctttctcgtaatatagtcgtgaccaatagtgtgtgttccaatggtctcttgaatttgtcgaggactcaccaagtcaccatacatgtcaaagtcgaggatcgagtaacactctctatgaaaatcattgtagttaaccttttggccacggtaaacaccagtagtgacaagaataccgggtttttacatgtctcttgagattagtctggatttccgtaatatacttcggttttagaaaatacaagtaatctccattagttagttatttatgtacactaatttcatggctttctagaaaatacacaaattggtcctgcttgttttagtccaataatatcacattttaacccatatttgattgacaacttacaagcctccatgaaacattgaaacccttagtttgcagagaacacagtcgtggttattgcggttttacattacaagctttgatttatctaatggagatacaatatattacaaaccattcttcacttgtcgatccctgccttcacagatctgcctgcaatgtagaacgaaaaccactcggttaataatcaaatcaaaacatccaaacgcaaaactgttgatacctagtgaaagcaatctccatagcatttagataccaaagaagaccataacat

SEQ ID NO: 1452 - DNA, 107392 bp, Arabidopsis thaliana
aagctttgatttatctaatggagatacaatatattacaaaccattcttcacttgtcgatccctgccttcacagatctgcctgcaatgtagaacgaaaaccactcggttaataatcaaatcaaaacatccaaacgcaaaactgttgatacctagtgaaagcaatctccatagcatttagataccaaagaagaccataacatcgtggtctaagaatatgtggcatcgcagaccaatacagaggaggttcttttcacgacagttagtattacagtttgccatgaaaggcttaacctatcaaaagatcaagtccaacagtgaaggaaagaagctagcaaatgccaaaaccataacaacaaagactatatctgcctctatatccgacggtaaggtcatggcgaagaactaagagcagcaataaagcatctattaaagcttggtatgacagactactaacaactatgaagaaagaaaacaaagaccaaggacttataggaagctactaacatccaacctttaaatccattgcagttccagagattcaaaaacaatgatccaagctaagtcaatggattattacgtcagaagtcaaattccacataacaaatagaacaaaaccctaaccaagcaatctaatccaaaactagtgaaccaagctaagatttcaactaaattcaaaagccctaaatttgtagaaccctaaagatcccaaagttctaacctttaattcaaattgaaatcaagaagaagatcgtttcccttcacaatcaagactctcatcgaaattcttcgaagggtatttagcagttatcccagcaacctcaaagacaagattatctccagaagatcgaatcccagtaatagaccacgacttgaaaaacgcccgaacccgaatcccttggagctccgcgatcttaccctgagagatccgacccgttactttgttagaataagtagcgatgtagttatcaggtggaagcgtgattttgcatgctccgttgaggaaaagagagaagtcgccggaggtttggttgaggaagtaatctttgacagataaaggtaggagtccaattgggaatccatgattcgtgagctctgcgtgtgcacgagttggtttcttgacttcaggagtaggatcttgtagggagatgggtaagagaatgaggatagagaggaggaagagagaaatcttcattttttttttgtgaaggagaaaagcttcgaaccacagagattttggcagacttttcgctttaaaaagtttgtgtttttggattgggtcaaccgtttgtacccgtttccgaatccgattatccaaaaaacaaatttggtaaaggtaattaggaattagttggaaaaaagtattaggaatttagttgatgacaaaaaataataattaggatttaggaattagcaatttcaaattactcgtttatgttaaaatatataaattctgattgctgacacaaattttttacttggtagtaagattgataagtttttacgaaataatataaaactgtacaaaacagtagttgtacataaaaattgtactaaaaaaaactgtgaataacgtttttaataaagttttaatatcgctttagtgattgtaactgtctaagtggtacaatacatattaaaaattgtatgatgttaccacttaaaaattgtatgatgttaccactcaaatccttaatttcaacatgtaaagatggtttagaaaaaaaattggatacttgagtcggtgagataactaaaaaattctaattaaatttcagggaactttgattgccacattaaacataattgtttcatgtctattaattactccctcaagatttcagtttgggggaggaatattaacaacttaatcattagtttttaggtgattaatgttgattaagcttaatgtgtttgagatcagaaactttgcacaatgattttttgttttagtcaataatactgaaattttcatttatcgcttcttgcttttctttctcggttacaactctttcatagccacgaagcaatcatagtggtctaattaaaaccatttcatgattttgggtccactacatttaattcccataattcaaagataagcagtttaacttctgttttttttttctttcttaatctatattttggttccactgttaagcagtttaacttccattgacaaaaaagaaaagattacgcattttattagaaccttcccactaataactaagaagaaggtcacacttccggcttggtggtggtaagattaaatcggcatgcttgaactgcatcgtcaatcgataagaacatatactcttttcctatcttctccacgaaatgggacaacatcatcttttccaagacttcaaatcttggatttattatcaccatctacaattaataaataaaatatgaaaagtttaatttaaattgtggtttggtataatattagaattagtgaagagtacaaaccttgatgttttttgatccaaggattctctgaatttcgagtagtgtttccatcccggtcatgtcaatggttgaaactcctgccacaacaatgttttaattagtaatcaaagaaaatatatttgtttggtaacattgtagacagaaatgcaaaagtaaaattaaagtcaccagagagatcaaggagaagaaactcgatggcttcaggttcatcacgaatccacctcaagatccgttcacggacgtaagtgctattggcaaaaaagactggagagcctaattgaagaatgatataaccaagcatctcctcggaggcagggtactgttctatgtctctaaacataaccgagtttggtatccttcccaatttacaagtggagggccttgcaacgtacaacaaagctcttacgatagaaaatccaacggagatgatgagaccgtagtccatgctaaggaatgaaacaccgaaaaaggcggacatgcagacgaggaaatcaaacttgtcaaccttgaagagatggtacatctcctcgtagttgatgagacccaacatggctgacataatgatggctgagagaccaactaatggtgtgtagctgaatagaggcgctaggaagagaagcacaagcatcatgcaaacgcccattactacattcgacatcggtgtctttgtccccgcgttgtagttcactgctgtctttgaaaatggccctgaaaattccctccatgattagttagcatcaacaccacaactatacattggtggaagtatgtcaatatatttgtaactatttacccgttgtcaaatagcaagaagtgaaggagccaattacgttcataagaccaaatgctatcatctctttgttcccgtccgtttgttcgttcttcattacagcaaagcttcttccaattgctatcccttcctgaaattatatatccattcatatttttataaaatcatatacacatacatagtccaatatgagctaaggaaaaaaaaatggtgaaaatatatagttatttacggccaaagcgatgagtcctgtgacgattccggccttaaacaccatccctagatacttggagtcaaagttcaaaagttgaatagaaggaggatttagtcctttctttaaaggcccaacctgtattaagaaacatactattaatagaaacccttgatgctcaagctttaaaacttgttcgcttaattaagtttaattatgtttgcatgtgattgttatttgttagtatataaatatgtgtatatgactgcattgctcacagtagcaatgccgtgtgctgttcctttcaccaaataagcaacaacgcaacccacaacgaccaccaccattggacccattgctgatacccaaaatagctttgggtatctttgcttctgcaatagtaacaaattttcaaacatgttaattcttgttaagcatttgagaagccatttgacttttaacatatgtgaaagggtggctatgtgaaaataaggacaaatcgtatctaaatcattgttattcaaaaaaatccaactcaaagtggtatgtgaaaagttgaggaatgattacaaaaataaaaagtgaaagattttgagagggtccaaatccaatggttttgtccctactaagtggataaaagacttaaacaaatgaaaaaaagagaagaagaaagttactatgtatcgagtggattgtagaaatacaagaaagcagacaccagccaaggtactttgccacttccactgcaccaagtaacaccctcccaggataacacaattagccactggtaacaaattcttagatttatatatttttttaaagaaaaagaaagagagatgacctcagcccggttgtctaagattgagtggagaactgatacgacatcggttttgtgcgtaaaatggactagtccaaagatgcccttaagctgttgtaggagaatgatgattgcggtaccgcccatgaagcccgttatggtcgagtgtgacaagaaatccaccaatatccccaacctattatttttgttttttgtttttttgttaaagacctattatttttgttgtttctttaaataacttaaaagttaaattttttaacgtaaggatagagattgtatgtagaaaaacctcaagaatcccatagcaaattggaatagaccggtgatgagagtggcggtgaagatcaaatgaaggtagagttcaggctcattttttatcatctcctcaccgaatgtctcagcgatcagcaaagagcatgctgcgactgttcccactgccagattgttcgaacttccgaacacggcatacacaaaaggcggcacaaaacttgaatctgaatttccataaagtttttaacaaaaaatggtattattagttttgttttttttaacatcaatggaattattagtaatatgttcaatattaaaattaaatttggaataattttacagccttatatatttgaaaaatacaaataattaaacttatatagaggagtttacttgttatttttttatatgaacaaaatagaaagagaaataaattgagactagtacagttgggcaacacctactgtcagtttgtgtagacaataaagcactctgccaatatcatttctattttaggttcctctactattttagttacacaagaaaaacatggaaaacttgtctagatatggagcatttagatttcaatttttaaatatatatatatatatatatatatatatatatatatatatatgaaaaatttcagaaatactttatgtaagaagtaataattttgttaaaaacaataagaaaatcatcttgtatattaatctttaaaaagaagacacttttgaaaaatcaaactcaagtggattcatactgtatattcagaatcagtattaattttacaatatagaaacgttttcattaatatggagataaagtggtaggtaacatagtagcatgagctgcatggctaaacggtagactatacatacatatacagagtaaaaccatatttggaaaacgtaaattcatatttaattaatatgaaaacagaaataagttttttgttgtattgcaaaatcgaaattacacctttctccgaaatcactttaagaaatatgattttatcattttgtaagattatatttcgtgatgattgttgatggatgatgcataattaaagaacaagaaaaacaagaggaagagatctcacataggcctatgatgggagggatactggcgagcttagcatagctgatgccctgaggaacagcaagactggtgatggtgattccggcgagcacatcatactttagtttttgcatatcatactttgggagccactcaaagattggcacaaaatactccaataacttctttgtttttagcaaacggtttggctcttgcgatatcggtttgaatggatcatcgggaaagaaggtttctttacattttgacttaaattttgaaccaaagcctctcggggtcgagaaatttactccccggcccttcggtgaggaggtagagctcgttatagtattctccatagttacaaaaaaacaattgtatgtgaatgagaatacacacaacaagcaaggaagaagtaaaaacctttctgtgtactttgttactttaaagttcgttgtagagaacaaattagactattagagagtatggtcgtttatatagaaggatggccaaggaaagtggagaatactgttacagaattattccacgttgacccatgttttaattaggcttgtgtggtctttgtctttttttggttataaaatctgctaatcttatctttactgcagttgattcggtatgtaattaatatccatgtatcttactaggttcattttcactgtcgattttttttttcttctccttttcttgacagtgttgatttttattgaaaagttgtgtttcagtaattaatcaaattacgaaggacaatagatagaaaaattgttatatatatgaatcatattttttggtgtgcttcacaattacataaatagtcaaaatactttaatattttgttccaaaggatccaattattttcttccattcaaagaatatagagtcaccacatcacatccaaaatttgttaccatttacgaaattagctaatcttatcttatcacattgcattgcttcaaatcactcttctatggagttaatgtgttgtctaaaaaaatggagactaatgtggtatgtggtaattgaatgagacttataagggtatatatatttaatatggattatttgccataaaattgatgattgctctatggaattagtagaagctatatatatccaaaatctcatgacttcttgaagttgatcatataatttgagcattaaatcatgaattacatagtacaataataaaagtctaaatctcttcatcgggaaataactcatccttgagcgctggagcaatccattgaatctgaatatacgtaatctcccaaaggtcatcgtcttccttctgcaccaaaatctctttctccttcatggtaccaatcatggtggtcaaaagttcagggacaacctcttgaagtttgttatctccatactctcccaaatccgccttcatacacgtatccattctcctcaacactcctaaccaaaaagttctaaactcagcactttctacaatttgttccaagtaaaccaagaaaacgttcatgagcactttcatagctatcttcaacgtcccctccatgcttctcatctctctttccgcgttttcgcgccttgaatagtcgagaagcttctcatgcaagtcatcgattgttgggaatatgacatggtctatgcagtatatacaaccagaaggtgtgaatccaagatcttcatgacccatggtgaaacttttctctagagacgtcactgctctgttccttatctcttctcggcgtgcaagggtcgtttttcgaaaagcctcggagagtttgaggaaaagatgatgaacaaagttaacccctctcaagttgttttcttccatggatgatgaactgcttgtgttgcttgccgggctatagctattcgcggtatcagtagaggcagttttgtaccattttaccaacattgtcactgaatctgccatgagatccaatattttcaagttcttctcaacagagctatttcttaaagcaacaaaactgaaggcgcaatcgatgcaataagcgtagcttgactgcgatagatgcgatgcgttaaatgacattaaaccgatgagagcatccaccgcttgctctttggtctctggatgtcttccacataaagaaagtagttgtaaaacacttttccaccctatattggtatgcagattcgcagagtagtctataatgatcttgctgacaaactctgttattgtgtcataacatgtttcaatgatttctttgtctatcttccacattattgtcaaggacctaaaaatcaactcctctggtagatggtcttgaaggttagaagcaagaatcttgatgcataccctaaataaacccgggagccctttttcgacaaacggaatgggtgaaaagagcggaaagtttgcaacgttgagtagatattcatggtaacttggccaaaacatgttgaaccggtggacgttagataatgcaatggttatgatcaaatcccaacaaaacttaaccgtctcttcttcttcgatagctgtactaaacttctgtcctttcccagcagctgcatagattaaagaccgaccaagattcaacaccgcaacatccggcaacactgagcttttgctgaatatttgaccgatcctgcattgttttatgactttaaggttttgttcaaactcactcattccaagagctacagattcttccacgttgtctaatgccaagaagtgtgaaaaccgacccattagactagaaccttgtcgtcggttaaattttgtgtcctggctcgaaacattgttcatgtcggattctgatccgccattttcttcatttatctcaaactcaataacagactgtggaagaagctgaagcttcctaagtttcaagaggcaatccacaatgttcctccaccctcctctgatagaatcaccaaatgtgttagcgagcgtgaaaaccgcgagagtagccattcgcggtttcatatcgtgactaaatgcaaacaaagtctcttcaggtgtagtgtaagggtttaacaacgttgtgaatttacaaaaggaagcaatgagctcatcaagaatgtcttcaaggccatactgagcaactcttgctatagagatcatagcatcaacacattcatgaagcacttcatcatcatctgaatgctcaaagaatgcagaaactgctgctattgatggacctgcaatggttgcaaacatatcccttcctattctacgatcaaactgacataaactaaaaggttgtgtagtctttgttctgttcattagctcaatccatctgtttggattcatttccaccggaccggaatgtgtcgataaagcgaatgcatttgttgcaatggactgaaaaagctcagagaggtattcctttggaaggtcatttcccgcgttaattgccctgttgttgcggataaactcatcttctgtcattttcctcctaacttgagggttatgttgatccgtgttgagcattataagcgagtaacacaaaatgtgaacagtatctttgcttgcaaaaatatcagatgattgttgatcatagaatctctcagagaaggcttcaatcatacgttcgatcttttgagactctcccggtaaccgaaatgactcaagaaatgtcctcaatgcggtatcaagattcataccagtgaactcaaatgtatgtgtaaagcttctaagaacactgagatgtaattcatcaggatctccaaggtaatctccaatcattgtcttatccaaacccggtgtgaatctgaaaaatgaagctaatgccattggatcaagaggatctgagactaagtagttatacttcaaatactccaaaccctttttctcatctctgttgaaatgatttgcagcgatcgctagctttctcttctgagctttccttactcttatatgatctacccacgtctcaaaatcctcttttggcttatctatccaaaagggtatgtactcatgaatctcaacagggcttggcttaatcacattggagttattatcatcttcttcattaccctcatcttcctctctatccatattgtcggcgatgttgtgaatcaagatcacaagaccttcaaaggcttggatttgtatagaggttaaaggaccagaggtagggaatgtatgtctgcatagaacttttccggtctcttcaaatatatttctacacatcggatcacagtcgtagtttacataagcttcgactatgaaagcaggttgtcgacaaaagttgattagcccttcaagagcaacttcttgtaacggaaggaagcctgtgaaagctgtaactctcaacaacacgaaggagaagaaagcttcgagttgtagcctcatgaacctaataaatcaacacattgttgttagacaaagttgagaataaacagagttttaggttttaatgttataaaaaacagaggacttacttgcggaggaagtgatatatattgagtatacaactacagatcattgatagcacaagagggcttgaagaagctccataatggattaaatggtgaaatagatcgtcctgaaccatccgaagaagcttagggtgttgcccgatcgcatcaccgcttaactcaatggcgctatttattaaaactaaagcaaaaatctgcacatcttcgtctgcagtgtgaacgtttgtcccttctaagttctcaacaacttcaacaacattgagcaacgaacataagaaatgaaaaatgtcgatgcaacatcggattccatatccgccgctcatgtcgatttcgtcagtatcagattctgaatcctcaccaccttcgtctcctctgacctcaaaatcaggtaatctggagaaaatgatctgaatcagctcatgcattgtgtatcttccatttcgttgcagcaaatctcctctaccggtagattgttgcactacttggaaacatgtattgactattgtgcaaaccgcttgatcttctaataactcctgttttaatacataacttattattactgtcttaaaagaggacaaaataaacatttgtagtaaaaagattatagttaatgaacgtacagaggatggatgtttcatgattccggttaaaacttgaagaatcctcatcattacagcatcttcagacaccaaatctgttttctccaaacgacaactagtaatcccggagacaatagaattcatagcatcttttgcaccaggtgttttctcatcgaagatctcgattttaaggatctttaagatggaggaaagagcgacagctgtggcgctagccggaatctcatcgctttgaataacttcgaggaaaggagaaagataaaccgaaggatctatggtgcgccaatcttgttgaggattgaaaataagagctctaagagatttgagagattgttggactgatgaatcacagtggtctgtttcttggggagaaaggtaactttctgaaaggggtctacgaatgacggcaaggactgcaccaacctccgtgttaagcatgcatgatatccctagctctttccgctttgctcttacggcgatacgatccatttctcaccttatcacactcttcttgccgataaagaagaaaaatcattcagcaactgttttttttgttgttcttcgtttttattctttatgtgtacggtgttgccttgccttggtttgatcctatatttagtatataagttttagtggctgagactcagtgatgggtgagtttcaaccatttgtcatcacacatctaggaaaactccatcatcagctaccgtcaatttctttaaggcttaagatagaaaactaatgtacgttctgcaaaaattcagatttaaggatacattatttggatcaaacgtatgtgttcaaggtttttttttcttcttcttttaaagtagaagcaaactctacgatgattggagtggaaaccatttttgtaggattaggcctcttcatactgatctgagtcagactttgcatagctgaagtttttttcctctactattcaattaaccagtagagaaaaactgacgcttaagaggttaatggagcttaaattttaccaaattcagaccataactctatttatgtactggtcctagtgtttccaagagaatatatctctcagcttaaattttactaaaattcagaccataacttatttatgtactggtcctaataagatgaatgttttaagggtttatggcttgcttaagaagagccaaaactctctataattaacaagtctaaaattgacaaaattaatataattggttttgttacatgtttgtgaccataactactaaaaaaattcacagaaaaactattcaataatccttgtttgttcatgtgtgtgatctattaatcaataaaatcaagaaaatggataggagaaatcaactaacgtttttttctcaaaaatctatttatttattttgattaacatgttttgaacgttagttaactaatttaccctacaaaaaactaatttaccgtcaaataaatgagaaatccccttaatgagaaattgattattttccaaaatatttatttgacgcaattttattttcatttttgaaaatccagtaattttacaaaacctaataatatactcaaaggaatgtttacataaaacattcaaaaaaataatttgttttttgtttgttcgtaaatgggctttaacatcacctccttttcactctatcatcttctactccgagtctccgaatcaaaaaaaaccctagctcttattttttgttcttagattttatctcttaagctcttcttcttccttgacatttcctcaatttcactcccgagtacgattaacaatgcattgtcacaacgatgatgttcgcttctcttcatcttctatcagaatccattctccatctcccaaagaacaacactctttactcaccaatctccaatcctgctctaaaaccttcgtctctcacctctcaaatactcgtaactcactaaaccaaatgctccagtcgctaaagaatcgccacactcctcctccacgttcggttcgtcgtcccaatttaccgactcagatgctcaattcagtaacccagcttatgattgggaagtcttctccaatttcattgtctcttatccaatccacccaattcaattggtctgaatcaagagatgagaacgttgagacaatccgtggactaagctcgcctctgctctgttgtgcctctttgtctctaactagacctaacgagtcgactcagtcagtggaagggaaggatacagtacagcagcagaagggtcactcggtgagtcgaaatgcggaggaacgagttctgattagtgaggttttagtaagaacgaaagatggtgaggaacttgagaggaaggatttggaaatggaggcattggctgctttgaaagcttgtagagctaattcagcgttgactattcgtgaggtacaggaggatgtacataggattatagaaagtgggtacttttgctcttgtactcctgttgctgttgatacacgagacgggattcggttgatgtttcaggtaatattttgattgttactctttttgttggaggagaaaggtctcgtttttatgtttctgggatgcaaataattctcattttcttgccataaggtagaaccaaaccaagaatttcgtgggttagtctgtgaaaatgcaaatgttcttccttccaagttcatacatgaagctttccgagatgggtttggtacgtatcctccaatttagcttgtttttttttcttctgtactgtactagacttatctgtcaattcattgatttacgttgggagtaaaatggattaatgatattggaacctgacaaatatttcgagtactaatgatgaagctaagaattttctaacacatggtgtaaaatgtgttagccttgaatgaagaagatagattagaggtaggtagtattctcaaaatgtatccatgctccaaaacagagcataatttgaagttgcatttagtttacacatattaatgtattgaggctagttaggtggattccttctgttcggtgtgtgtttgattggagagggtaatggttagtaaatgttggtgtcaagctgtgtagggaaagtgattaatattaagagactggaagaagctattacatccatcaatggatggtacatggagcgtggtcttttcggaattgtaagtgctctttttacaccataattactttttcaaaaaaaaaaatcatcctggattcagtcttatactttgtggttagaatcatcattctgttgtctgccattgtaggtttcagatattgatacgctttctggaggtatagtaaggcttcaggttgctgaagcagaggttaacaacatatccatccgattccttgatcgtaagacgtaagctggtgccaatccctcccttatgaatgtagtttatattggtttaaattgtaggcaattctggatggcactggtagcttccttttatttcaactattagattacgatttcattgataatggtgccttctatatttagtggggaaccaactaaagggaagactagccctgagacaatactacggcaacttacaacaaagaagggacaggtattttttgggcatttctcagcttagatgtaaagataagtcgctgactaaaacatcataaactatctgagctgtatttttatgctaaataacacttctgagtgcatcatctgtgtatgaaatcctttggagatcttatttttaattaaggttaatcactctttatggtatcatgtatgtttcttcgtaaaatttggccttaaagtctttatgcatgagcgtctaagtagggcctctacatacacatcttgtctaatctggcttttggtcaatttaggtctacagcatgcttcaagggaagagggatgtagacactgtgctagccatgggaatcatggaagatgttagtattattcctcaacctgcaggaggtgtgtaaatatatttctttcttttcagctaatacttttaattttcatcttgtgcttaaggtgcagtagtatgagtgaagaaagtattttccttgcttatccttaggcacagtaacaaaaggttttgacagtgtctgattctgaaactttcttcttttccttgttttttattcctgttagatagtgggaaggttgatttgatcatgaactgtgtcgagcgtcccagtggaggcttctctgctggtggtgggatatctagtgggtaagttttagtttgtttgctacttacagcgattcaatttttttcttttgtagcttgatgacaacttttgtccaattcttttgtaggatcacaagtggccccctatcaggattaattggaaggtaaaagtaatgtatattttatttgtaatgattttttttttatttctggcctaggctgtgtgtattacattactgatgtagttgaagtaatcattttatgcagcttcgcttattcccaccgcaatctgtttggaagaaaccagaagcttaatgtttccttagagaggggtcaaattgactctatatttcgtataaactacactgatccatggattgaaggagatgacaagaggacgtccagatctattatggttcaggtaacacctttactggttatctcaatgagattgctgagatgactaataaactaatgaacttcatcttgagttagaattcaagaacaccggggaatcttgttcacggcaatcaaccagacaatagtagtctcacaattggtcgggttacagcaggtgttgaatacagtcgtccattcaggccaaagtggaatggtactgctggacttatatttcaggtctctactgttcccaatattttctaagtttctgtaccaatccagagtaatattggtgttaaagcaattaaaatatatgttcttgtcgtttctgactagatccaaactggtaaattttttactttttgaccaatatatacgttacccttaatttcgttttgaatttcatgtttcagcatgctggtgctcgtgatgaacaaggaaaccctatcattaaggacttctacagtagccctctaactgcaaggtatatatatgtcccaattcccaaagaatgatttgtctttggttctgctcactgttttcaccaatgctgtatttggccatatgaatttgatagatgccattattaatgttttctcatgcagtggtaagccccatgatgagaccatgctagcaaaacttgaaagcatttatactggctcaggtgaccaaggatcaacgatggtcagtctgatacctctgttggtacatcttccccttcttttttcagtgcctaattctatctgtatttttataccagtttgcgtttaacatggaacaagggcttcctgttttgcccgaatggttatgtttcaatcgagtgactggacgtgccaggaaaggcatacacattggaccagctcgtttcctttttaggtatgctaacttcctttgaggcatataattttcttgaggtctctatttaccttttgggattcgaatcatcatttctaaagttttatatagtgtatcttaccttgttcatgtttatagtctgtctggtggacatgtggtgggaaaattttcacctcatgaagcattcgtcatcggtggaacaaacagcgtaagaggttacgaagagggcgctgtaggatctggtcggtcatatgtagttggttcaggggagctgtctttcccagtggtgggtttttctttgaacattcctaagatctcatttcacaatggtgtaaaaatcatgactctcattcttaccctattgtgcagagaggaccggtcgaaggcgtcatttttacagattatggcactgatatgggatcaggatccaccgtcccaggtacagactaggctttcgttttttttttctccttctgagcctttccatatatgcttgtaatagctttagaatctcagggaaccttcatctttgttattttctgccctttaggtgatcctgcgggggcaagactgaagcccggaagcggttatggatatggtttaggggtgcgtgttgattccccgttggggccgctacgccttgaatatgccttcaacgatcaacatgcgggaaggtttcactttggggttggtctgcggaactaaattttcctgtttcttttttagattcgataagtgttttgtcggcctttgtcgcacattcatctagatgatgcttgtctattttgataatttatatcatcttatgtaactcactgttttgtgagtggtttgtgcatggagagagatgtcgcgtatgaatgcttttcatgtagatgattttcattttaccaaactcccagttaaaattattaatagaaccaagattaggatttttattcttcatcctagtatgaacctgatttgtctccttaggatgtcacatgatcgtgagcaaactcttctcgatgcaattgcaaagcttgaagaaatgtccgatagagtgataataactcaacatatgaaaacaagtcttttagtgcgtagtgtacagggacatcaaactcctatcgtgctagtaaagatttatccaagtaatttccggacatacaccaacgtagttcgacgaggatgtaataatcccctaaggtctatcttttcatgtggtattttacagggatgaaataaatttacatataatatcggtcacctgagaatcatattcaggtccttccatctggaaatgactaacgccttcaatgaggtgtgtttcagtgcgtccgactgcagatttcagcttcttctttagctggctaacgctagtgaacccgtcttgtgttcccattacgaagagtttgggtttaggggatgagagaatggccttgtggtgtcgcccaaagagaatcgaggccattaggccaaatgggtatcccaaactcacatatcccaccacttgctctacttgctccaccgctgatcctgcgattggtgcacctgccaaagagtcaaaacttcaattatttttcctttaaccaatataaagaagttggcatgagatatcaaatttgtctcagaatattcatttgaaaagtaatgtgatcacttcatccattaaacacgtcatatcagaaagttagtcggtcactatgatcagtataggtaagagatgtgttagatgctgtagtattttatctacaaatttcttatttgctattggttctatgctcagcaagaaattatggaaaatacattatgtgtaacaaacacgcaaagagatgcaagtataccaataaaagggggcactgaaagcaatcctagaagaactgatacgttcatagtctttaaaaaactcctgaaaggactcatatatcatcaattgcagttttgcaaatatgtgtaagggacatcaaaacagaattatgacacacaaacaagaaacagagttatctcggtagataagaagaacaaacgagaatttcctttgggagactgtaacatctgataaagtctacctcaaaaccacctagacactctaaattgactctgttcaatgttaaaacaatgctaatcttcttctttccacagtggattgaactttcttactccattctcatcttatcagaccatcactatactcaaacatggaacgtcaattacatcaactaaaaccacttagagatacacgagagagaaaacctggaacttaacatgaccaacaccaaaccggaacaaagttatctcagctgataatatcaactaaatgagcaaacaaaagagcataagcataaacctaaaaccaattattctgtgtcaccaatccgttgtaatgttaatgagaagtgaataagcagcaaaagggtcacattttatcttaaaaaccaacagatcaaacacaaattttaacataaagcaatgcccagaatctgtatacgaatccatatactgaattcgaaatcaactgttacagatcaacttgtaagaagcaattaccagatcaaaaacatcagactttaacttgcaatcaaattcaaactaaaaccagatcaacaacgaaaggagcaacaaaatcaaaacttgaatggcatagaagaaccttaccagcagaagaacccacgagcaggatcctatgagcatcaacattctgacaaagccaccgacaaacagcgaccacatccttgacctcagcaaagccggtaagagtagctcttccggtggattttccggcacctctcgtatcgaaagtgacagacttgaaacccttagaggccaattcagaagctatgcctttgagcagagcttgacaaccacccaagagcgagaacgggtggaccaatactatcaccagattctcatcgtcgctgacttcttctccttcgtttctgggtttgaagattctcgtgtgaagcttcaccccttcttctgaatcaacgctacacgattccactataaagtttgacgacattttaggagagacgacgaatgaacaagtaaggaacttttttgttttacacttcttccagagttattaatatgttgataaccactactccactagcacgaagccaaaattttctcaatatatatatatatatatatatatatatatatatatatatatatatatatatatatagattactaatacttgcaaaaaaagttctttacttttaaaaatcaatatatttatatagtaataattggctaataaatttatatatttcaaaataagattttaaaaattatccacaaaataaaatcaacggttagaagttctactcaatgttaatactcttcattacggtgtgcttttggaccatgtttggttttaaataattcttgtaaaattatacttgtggggcttttgtttattttagcccatgtttattggttcagtttaataatatcagacacttgtgaaaaaaataaagattataaaaaattttaattaaaaaaaatattcgataatatatctcatatataaatttcttatttgatatttttctgttgaagtgatgatttcatatgtcataaattatattgtaagaaaatgtgcatattagttatttcatattcgcagttcaaaattatatacttattaagataaccctttttgatattatcataaaacaaaaatatatttggttttctatttttgtttgaattgtatatgatcagaatggcgtttttttgtttgttcaataataattttattaagtcaccaccatattgactaattaaaaaatgggattgtgacacgtttaggcactttttgataatattattctttttgagacacttatgagagagtgagcactttgccatctttttgagagaaaattggaccaatttacccctaaagtagtgattacgcaataattttaactcattattgttgagatcgtgtgggtgagaaattttcttctttttatcatctctctcttccatattcttttgtttttcatcattttcaattctctctttcaaaatcattgttgttctctataattcttacaaaatcatggtcgttcccattaattttctctcctttccataagaaatcaccaatcttcattataccatatataatctcctcataaactttcgatttgtcgtctcctcataatctcttcataatctccaagtttgagatccacgacaacaaacccaggaagaagatgatcatcatccttgcgattctcagaatcctctaacaataagtttctttgttattgtctctactgattttttctgtttatatcaccgtgaaattctagatattacgatgttacagagattagaggtctttgttcatcgtgaatttacttgcgattaaatcgaacaattagtggattaggcttttatagtttgctagtcatgttttttctgaaaatattgaagttatgggtttaatttatttgaaaactgatagagaagcccaagttgatatatcgaacgttgatggatgtgtttggtaaatctttgttcgtggataaaagtgtgtttgtagctcgctctgcttttgttattggtatgtgcattatggatggcttattatggattgtgaattatggattgttatggtgagatttgtgaatcttttcatgtttgattaataggtgaacaatcccaaaaacaagctatatgtggtgattttgttacaatgatgtccatattaattggtggttacagaacacttgctgcaaaggctacagaacagtggctgaaaagcggtggatagaggacattgacgagtgtccaaaaaatcaagtccaaatggtcacctagtaactcacatgtcgtttcatatcaatgcacaaatttagacatgaacagtaatcgtcgataaaaaattgttgagcttttggggttcttcctctatttaacttttagaggttcacttctcttacatctctcatttctcattaatgctttgcttaactcactcattttaacacaagcacaaaaagaaccttcactctctttctctctagtctttggttagtttcttgttttgacacgaagacataaaacgattagtaagagagagaaaagagaaaacattagttgtcaacatttttgtattggatctaaagataaattcttataacaagacatacacacatttgtggatggttataattgttaaatccaacttttaattttactgaaattacagaagatctctacaaggtctcaaaggctcacgttgtatccatgaagctaaagttcatgaaccaaaattagcaaaggctgtccacaacactgactgtcattatgatgtgtgtccatatatccaacgttttatggtagagtttatatagtatagtatgtgaatgtattaaccttgtggatgtaattgtatggttaattttgttcatttaataagattaaccaaattaattggtcatggtttccaaaataatctcgaatcctttgtaaaaaaaaactaatctgcgaaatataagtgaagagaatcagagctagatccacgtttgagaggataacgtcctcttgacggagatatgattgttggagcggcaaaaagatagggtctagaacttcgagagaaagagagaaacgtaacttgcccaagtggttacaattttgatgcggttgttgaaattcgggagaggcttcacgatcatggaatcgaaatcgaaagagagaatgtcgatagcgttgttgtaattttcgaggaaacttctgacggaaattctgtgaccggagactttcacatgttttggaatcggatccagcagacaaaggtggatttgagaatatatttgaaaaagatctcgagagagaaagaagaagagaagcaatagattgttgagagataaggaagatgatgataaaccttaagagattcaattttgaatattaagagtgtcctaaaagattggatttttattctggaaagagagatgaagaacaagagaggccaaaattgtttttgtattcctaaaaaaaaagataacgaagagatattactagagaatattacgtgttgaggcacttttctgaaagtttagccgtaattaggcacttcacaatcattagacacttttttgatgtgaattgacatcactaccctttaactatctcttcctttgcttagtaatatctcttcgttatctttttttttaggaatacaaaaacaattttggcctctcttgttcttcatctctctttccagaataaaaatccaatcttttaggacactcttaatattcaaaattgaatctcttaaggtttatcatcatcttccttatctctcaacaatctattgcttctcttcttctttctctctcgagatctttttcaaatatattctcaaatccacctttgtctgctggatccgattccaaaacatgtgaaagtctccggtcacagaatttccgtcagaagtttcctcgaaaattacaacaacgctatcgacattctctctttcgatttcgattccatgatcgtgaagcctctcccgaatttcaacaaccgcatcaaaattgtaaccacttgggcaagttacgtttctctctttctctcgaagttctagaccctatctttttgccgctccaacaatcatatctccgtcaagaggacgttatcctctcaaacgtggatctagctctgattctcttcacttatatttcgcagattagtttttttttacaaaggattcgagattattttggaaaccatgaccaattaatttggttaatcttattaaatgaacaaaattaaccatacaattacatccacaaggttaatacattcacatactatactatataaactctaccataaaacgttggatatatggacacacatcataatgacagtcagtgttgtggacagcctttgctaattttggttcatgaactttagcttcatggatacaacgtgagcctttgagaccttgtagagatcttctgtaatttcagtaaaattaaaagttggatttaacaattataaccatccacaaatgtgtgtatgtcttgttataagaatttatctttagatccaatacaaaaatgttgacaactaatgttttctcttttctctctcttactaatcgttttatgtcttcgtgtcaaaacaagaaactaaccaaagactagagagaaagagagtgaaggttctttttgtgcttgtgttaaaatgagtgagttaagcaaagcattaatgagaaatgagagatgtaagagaagtgaacctctaaaagttaaatagaggaagaaccccaaaagctcaacaattttttatcgacgattactgttcatgtctaaatttgtgcattgatatgaaacgacatgtgagttactaggtgaccatttggacttgattttttggacactcgtcaatgtcctctatccaccgcttttcagccactgttctgtagcctttgcagcaagtgttctgtaaccaccaattaatatggacatcattgtaacaaaatcaccacatatagcttgtttttgggattgttcacctattaatcaaacatgaaaagattcacaaatctcaccataacaatccataattcacaatccataataagccatccataatgcacataccaataacaaaagcagagcgagctacaaacacacttttatccacgaacaaagatttaccaaacacatccatcaacgttcgatatatcaacttgggcttctctatcagttttcaaataaattaaacccataacttcaatattttcagaaaaaacatgactagcaaactataaaagcctaatccactaattgttcgatttaatcgcaagtaaattcacgatgaacaaagacctctaatctctgtaacatcgtaatatctagaattttacggtgatataaacagaaaaaatcagtagagacaataacaaagaaacttattgttagaggattctgagaatcgcaaggatgatgatcatcttcttcctgggtttgttgtcgtggatctcaaacttggagattatgaagagattatgaggagacgacaaatcgaaagtttatgaggagattatatatggtataatgaagattggtgatttcttatggaaaggagagaaaattaatgggaacgaccatgattttgtaagaattatagagaacaacaatgattttgaaagagagaattgaaaatgatgaaaaacaaaagaatatggaagagagagatgataaaaagaagaaaatttctcacccacacgatctcaacaataatgagttaaaattattgcgtaatcactactttaggggtaaattggtccaattttctctcaaaaagatggcaaagtgctcactctctcataagtgtctcaaaaagaataatattatcaaaaagtgtctaaacgtgtcacaatcccatattactaagcaaaggaagagatagttaaagggtagtgatgtcaattcacatcaaaaaagtgtctaatgattgtgaagtgcctaattacggctaaactttcagaaaagtgcctcaacacgtaatattctcttaaaaaattgtttgcttgtcctttttatgtcaacctcttataaattctttctgaagagtgaattggaccttgactcaatcaatcctcctttttctgccaataaattgggtcaatttgctcaaagatctactaatatcctcctctcttttttcctacaattcaaagacgaaaaaacgtttggttaataattttcctagaaaggaagaagtcttttgttcgaatattcccggggtaaaaggagagtgaagtttactctctctaatcaaaaaaaaaaaaaaaaaagaagtctatcgttaattaaaaaaaaaatgaagaagaagtctattgtccaacaaactcgaagcttttactcccttaatttctcaaggtaagtaatattttgtagggccagtaacacaaaacaattgcaacaactagattagggctctaacttctcatgataactatacaagaacgagccagcttcttatattagttaagctctattgctagattcacttgtatctctctctgtttctttgagtttaatactcgatttcaattttgatcaaactttgagaaagttacaaaacactaatccttcaacctaaatgacaaaaggtgtttctagtttctccccatcgacagtgtttctccggccaatcctgatcgtcgacataacgtcttctccttccccggagattgttcgaaaaaggttatattttgatacataaattactacatggaattgttttagaaatgaacaaatttttgcttaccccatatattcatatctacttttaaattagtacaatttttattgattttctactacttttgttagtgatgaatttggaaattggcaggcttaaaacgcttaaacatatagaacaagacttcttgcatcatatatgaatactatatcaagtttagtcgttaatatatacacgtacgtgtacgttcttcactaaaacctaattcaatctaaaattcgtacagatccctaaaatggccgctatggatccgagaaataatggcaacgttgctccgctaaatgtatgtaaacaaacctttatgactttaacgaatataaataagtaatagtttgtggaaatttaatttgaatgagacattaattattgcaaggagcgggagagagcagaaaatttggaagttcgtgaagtggtagaggttcaagatgatcaaagtgtggtgtctcttatgtccaacgattctgaccttcagaaaaagatgatgaagaaagaggagaagaagaatggtggctggacaaacgcaatcattttgctaggtatgatatataattaatactaaaattaaagattttgtatataagttcaaataatcttacataattcatcattatctgaacagtaaatcaagggttagctacattggccttctttggtgtgggagtaaacttggtgttgttcctaacacgtgttatgggacaaggtaatgcagaagctgcgaacaatgtaagcaagtggacaggaacagtttacatgttctctctcgttggggcatttcttagtgactcctattggggtcgttacttgacttgcacgatattccaagtcatcttcgttatcggtgttggcctcctctcttttgtctcttggtttttcttgattaaacctcgaggatgtggcgatggggaccttgaatgcaaccctccctcttccctcggagttgctatcttttatctatctgtatatttggtagcttttggatacggaggccaccagccaacgctggctactttcggtgcagaccagcttgatgatgataaaaactccaaagctgcgtttttcagctacttctactttgctctcaacgtgggagctctcttttcaaacacaatccttgtttattttgaggataaagggttgtggactgaaggtttcttggtgtcactaggctccgctattgtcgcattggtggcttttttggccccaacaagacaatatcgttatgtcaagccgtgtggtaacccgttgcctcgtgtggcgcaagtatttgtggccactgctcgtaagtggagtgttgttcgaccaggagatccgcatgagttgtacgaacttgaaggtcctgaatccgccattaaaggaagtcgaaagatatttcatagtaccaaatttctcttcttggatagagcagcagtgattacagagaatgataggtaaaccatatataaacaacattatattattcgttttcattttgttatcatgcaagttttattccaaatatatacttcatatagttgtcatcttttaacttatgaaatttcggtatgactgtatccaggaatgggacaaggagcaatgcatggaggttgtgcagtgtaactcaagtagaggaggcaaaatgtgtgatgaagttgcttccaatatggctatgcactataatctactcagtgatcttcacacaaatggcgtcattgtttgtggagcaaggtgatgtgatgaatgcatacgtagggaaattccacatccccgcagcgagcatgtcggtcttcgacatattcagcgtctttgtatcaacaggaatctaccgccacatcatatttccatacgtgagacccacggaacttatgcggatggggatagggctgatcatagggataatggcaatggtagctgcaggattaacagagatccaacggctgaaacgagtagtcccggggcaaaaggagagtgagctcaccattttatggcaaattccacagtacgtgcttgtgggagcaagtgaggtgttcatgtacgttggacagttagagttcttcaacggacaagcaccagacgggttaaagaacttaggaagctcgttgtgtatggcttcgatggctttaggtaactacgtgagcagtttgatggttaatattgttatggccataaccaaaagaggtgagaatagccccgggtggataccggaaaatctcaacgaaggtcatatggatcggttttattttctgattgccgcgttagcagctatcgattttgtggtttatttgatatttgcaaagtggtaccaacccataagtcatgatgaagatagtatcaagggcggttctggtggtagtctgaagaagaccgtttctgagttggaacaagtttgattttttttctttttctctttagattttaagttttagccgcaagtcatcttttgagatgtttctcttttattggtagaaccgtagaagacgatctttttgttagtttctagaaattttcaattgctcggtagggatacttaaagcagagcataataagtaggtagttgctaaaaaatcttccgattcctttgcgttagtaaaaaagctagtcgtttgaataacatgttttgttatcttcaatagttttataagattaataacaatgaaaatcttgtgtctatgaatggcaatgttagccaatatgattaaagctaatgtgacatttttttgtcaagctttcaactaaaaattaaatactgtactatcttgcacagaagttatgtcgcaatagaagtttttttaaaaagacaaataactgtatttttctattttgtttttaaaattcatgctcctataaatatggctcgtggaaaaacttggatttattttaaaaaaataaccgttgtttcgtcacattttagagaaacttgtttttcttattaattttgttttgtgaatggacacatttcacaatactattggtaaagggacttgtgatttataagatacagtattgatttcttatataaatatatatttctttgtaataaatttaattttgatactcatgatatatatctatgagaaaaaaatgatgtgtattcaatctatttaaaaagtttgaattttcttatctatgtctagtttatatattgttttttttaataaactgtacacaacaatatatgcagaaaattctttaggtcttgataaagtgttcaatgctttaaatggtatgtcgctgtctgtttttaaggcctaccgttttcttgtaaagtaactcaatttggttcatgaaaatcaaaatacagagaaaggctaagacaaagataatctgaaaacaaaagaatctagtcgaaaaaaagaaccaaccactaaagcaagattcaagactcaaaatagtacattttagcaaaagatgttaaaaagtagatatagaaattagggagagaacaaggtggcataaatttctaagaacacttggacaataactttgtggtgttgacgagagtttaacgacaaaaaacactgaagaagctgttgtaactcagccggtgcaaatatctgtctctcaacaatcatctccaccattgacgtcctgaaatcttcatatggatcctttgacttcttcaccaccgcaaaactctccgcctttgaagagtccgaggagaagcttctagaagaaaagagagtatcagaatcatcatcttcactttcttctttgtctccttcgtcttcttcctcactacaagaccagtaccaagacccggttgacttaaaacgtgaggcaaagagagggtcagaaccaaactgcgatctttgcttcctgtttgtcttgaccttcttccttaaatctcgaaatgaacggctctcttcgtagaaagggtttggtgggaatataggtgacgcacgagggcaagaagaagcatgactctttggtcgtgatggagttttggttttggctttggtaacgaagaacctctcggaagacgttgctttacttgtaacagcacaagtctcgacgacgtcgtatagatctcgtggtcggcaagagcttaaagatgaccggactattcttgaaacccggagcttcattctcttctccatgtttagagaatatcgagagagactaatgaagatggtgtattaaagtcgtgtgatataagacttttgagggaaggagagataaattctctgttgtgttttttcttgtactagcattcatttttcgtaatatttatgataatttaatgattacaactttttacgtttaactctttctgcaatgtcttttgtcatttcactgtcgtctttatcttaaactattcgaattgctgacacaaaaattaaccattggaatttccttgttgcttttttctttctgtttttattttaggtagagacgcttgaccttgctttgctcgtttttcactaattttaaaatattttaattttgaaaatttgacatgaaactgttttgtaatgtttgtcatcttgtagactagtaaaagtcagtttctctttgattttttttatttatataacagtcagtttctttagcttttcgaattcctcattatcaggcaacttaaaaagtagagtttgttaaaacttcttctacttggaagattttatcattgttaacttaaaggatttgcattgtagtaccagaagtaattaagtactatagtcaatcttacgttaacgttacaaagttttggtgatacaattctgaattcttttttaacgatgcataattgaaacttctccccggaattcgtgcatcggttttggagaatgaacgttttttcaaaaaggcaacttaattcaaaattaaatgattgaaaatgacaattacacagaaaggttgtgcacgatgatcaccaaaagtcagattatatctgcaagtaaataaaatagataacattgactttcgtaacaagaaaaaggagagattcatttaccaataaacaaaattttccaaaacttgcaaataagatttactttttgaaatcatcaatggtagtttgatgaaactgaaaacattccatctatcctaatggacttttgtttaataaaatgaatatatattgaaaatcttgaaatatgatcattaatcaaattgcatgtttagtcgtcgcaaggtaaagttttaaaactgcaatgtctataaagattaggtattgttgtgtccatccgactactaacatttttcaaaactaattttcattaatgtaaccatcgaagtcgaacactgatgtataaatcttctccacaatcgtttctttcaacatgttgaagaaatgaaaaaaaaaaaaaaaaaaacaaagaatgaattttcttcctctgctccagtggagcagcccatgcatataatcccactatggggatcgaaccccaatgaaaacagagaacctggccaagtggaggaccactatagcctatatagtcaatttagcatgatttattaattttcagctgctagagcagacttcctaaatgcaaattcctaaggacaattgaaatatttcttataaagaaaaaaggaggaggaatgataggtctgatgtttggaagtgtatatgcttattggctaatctaatttaccttttttacgttattgttaggttttggtgtggtggcaggttggggaccatattatctgcctcttcctatttgaatttcaaaaagtttacactaatttgggtatgcatgatacatttcaaataaaattgttttttttagtggaggctaatgtttttagaaattagtatttcttcctacatattttagctctttgaatgatgattttaaaaatgatttacctaaaacaaaattgccagttttccaagtaaaagtgagactacattctgtggtcagtgtaaatgacagtagaaaaaagactggaccccagacacggctatatgctaggctaatcgattcgaccctgatgctcttctccgcctacccctcttctgcctgattctccatatgcttagtagcactagaactcctacaacacaacccgaaaaagtttgatgacctactttggaaacaagaatcatactgatcatgcaatgaaaggttaagcaagagactaaatatcttccaaaagttttcgagtatattaccactagctacaacaccagcaagtacgatccagcgagtaggaacaagaaatggcatgtcaatctgtaaattgagagcaaaatattagaaaattatttggtccctccaaaattaattagaaaaactagaagattacatgaattacctcgtctctattgaaaaggcctcccagagacttgctcctggaagaactaagctcacctccttccttggctgatctccaacgcgttggtcttttactctccactgtgaaattcaagcctctacccaaatcaatgccatgataaccgggtaatctacgattccttcctctgacatgtaagttatatcctttagtcccccatacttcaaatctggagtcactctcacagattagctcctttccgatcacagaagagtatgttgaaaaatttacatcagttcttcgggatggcagttgcttctcgtctatgattactggtgaatatctcttagcaaattttgagaaaagtacagggtctttgatatttgaactgctaaaatctagcattttcttcaggagccagtagcagttggtgaccatgtggctactatccaaacaatttgagtctccatatacaccaacccgaccttcaccaatctccaaaagcccaagaacagcagggtcttcctgtaaacacagccacattatcacaaacaaatcactgcaatttaattaagaaaatccaaggcacagttagaagtggagagaactggtttctcattacctttgatgcctcagttagcagtagattttgggtagcgccactctcagagctgtctaataaaggaaaagtgtgcaaaaacccaccagcaggaaaccggactatgtttgttccagaagcatatcgactctgctcaccgtcaatactgaaatccccattcagaattttgtccccaaacgcaatcccaaatgatgcaagaaggttattaagtgctgggatatttgcacctccagtgactggagtccaccaactgcgtgtgttatcatcgaagaatctcatcttcaccatggtatcgacattataccactcagcaaacacaaccagacccagtccagtattgataacgtcatctctgagtttttcaatttcttctggaaagtaatcatcttcaaggtcaaccatcaaaagggttccatattgctgagcatcaaaacatgtaaggggcgaaccaagagtctcgatatagtacccagcatcacgtaacatgttgtacatgatgtgaaagtttgtatgcaggtgatcaccatgccaatcaagtatgtcattgcggacatccaaagagtctcttggaatataaccaggaggatatttaatgctgtgaaattgatcccacaaaatacgtttcgctcgtggtggagtgggaatcactttcagtttcaactgaagagaacaagtactccttctaggcccactttctccagaggctggtgggctatagactttcacagttacattaccctctatttcacctgtgaactgtgcaccttcttccttgatctgcatgtgtagagctagataaccagtccacggccatataacatccgggtacttaaagtgaatgctcagaagatttccttcctcgtttgcagggtgccatgttggtggactttcaatatagccaatgacacccataccattaagaattgtcgtgttgaaaatgatgggcatagccccggcatatagcggctgacgacaaaagggccaggaatatggacaatcattataatcaagaatgctcgggaaaatgcttgcccgggggtggtagctctttagaatttcatatgattctaatctgacaaagagtcgaaaaattagagactacaaaaataaaggaactaggattaaaataaaaataaagagtacaatggtgataaccaatatggataagtaacttacagatcaactcttccagcaccctgttcatacatattaggacctgaaagcttagcagcaccttcgaccaatgcctgcttcatgcttgctggattgagcagatccttccttctagcttcaggaataacacttacaagtaggcaaacaataccagcaacaacaggactagccacacttgttccagacaggcttttacaaccagtgctgatcttggaccccataatgtcgcggccatatgcaaccacatctggtttcacacggccatatctgtaagcaaaactttgaagttaggaattgcaagaaaacaagctattttgtatctttacgattgtagggtttgtaaaagggaatgtagaagcagcaaggaaatacagtacccatgaggaagttcccaggtgctcatgccacgagatgagaatgaagctatgtgatcatcattgtcaatacctccgacacctattacatcactctggtcagctggattatttaacgttccgtaaagtggcccatcatttccaattgcagacaccataatgatattgctggctgttatttcccaaacctgttagaagaaaatcagtgcctctggaacacacgactgttcatatatgctagagagaaacatccccaccactcgactcaacaggataagtaaactccaaccaagagattaaggaacaattaccttctctacaaaaggcagatccaagtaatccggtcccccaatgctcaaatttaatacatccatatctgttgctatagcataattgaaagcatcaagaaaccatgaggtgtatgatacctgcaacaagctgagcgcaaacttatcataacctatttgattaagacaacttgcgtatctgggaaagagaaaaggaaggcacacagatttatagcgctcaattacagtgtctcgaggacaaaataaagatcactgtgtaaccaatatcagtatcttagcaagtgtaattagggaaacagaaacagaatttactggaccatgagtggatttagtttagttgaaggaatgttaaaccttatcccgcatgagaagaagtatctgttgtgtgatcatgcattacctgggcatctgtgaacactcgaaaagcatagatttccgtgtctgaggcaaaaccaagacattctggatttcgaccagcaataacaccagcaacaaacgtcccatgacccaggttgtcattcaaagtgtcctcatttgtccaattcgtacgctcctgaaagttactccgtcaataccagcttcagagcttaacaaggcaagtagataaaagaaaactagtaatttaaacacttcacacttctcagaaatctttgagaaatactatggtttatcagtttctccaaaaagtgataccttgatcttacgaaaatgagggtgatcagctcttattccagtatcaaatatagccattttaactttagcgccggtgtaacccttcttccagagatgatctgctccaaacatggacgtgacttgagtcttctgcaaattagaaaacaaatgtaacttattaaagacctcacttacagtttacgataccaaaaattagcacatagatcgatagtgagcagagaaaaacagatattgactatgttacttcacaatttctcacctgagcgagaagatgtcgactccagtttaacgtggtgttacttgtatcggccataggagaggactcagttccttcttcgaaagacatagaagtgaagatcttccccggacgtttcttcccgtcgggaaaagatcctccaagcaaaactctctggtacttaaactcaacgttcacgtctttcaccatctccagcctctcaatctctccaaccacggcctctttcccgctttcctcgatccatagaacaccgaagtcagtcggatacttcgtcgccgggttaatcctctcgatccaaccccaaccaccggatcggaccttcgattcgaggtaaattcgatgatctttcgccggcttatactgcttaaatcggattatatagttagtcttcgtttcattctcagactccaaacgagttacgttctctggattgagattttgttgctggggatggtaagtgctgggacggagccagaagagagaaacggagagaaatacgacgatgatacaggatctgtaaggatatgaagaagcttctccgagcaccttcatggcgatggttgaattagggtttgatagcgagattcattcacatacgtccatgtcgtcgccgggggaaatttgcttcactcctatgtaactaatttgattttctgacctctgatgaacatactctgatggtggagcgacttttgaaccggcttgttggtttagcttaagcaaccggttcttaagttcggtataatcttttcaacaattcggtttattgttcagatctatgaattttggttcggtttggtttttttactttctttttcagttttatcgtcgccaaattagtcaaaggtcgtcaaagagaagagaccaacaccaaaaatacagtacagacacttcttcacttgggtcggagttgttttgaagattctaccgttggtgcatcttcatgtcttttccacttcaagagtttcaaatttactctgaattgagcaacgaatgtttccgatttccaatttaagatcaagatcgttggaatttatgtctttccagcttttttttttgttctcgtgaatgtgtcggcaggattagtttttgaagcttgttgttaaatacttgaacttgaaggttttgtgggtttgaatctgtatagttccttctgtcatggaggttagatctgagctccgaaaacagtcacgaagtggaaagaggaaatgggctattttagttgggattgtggctcttactcatatcttgttattactttcatatggtgacgccttaagatatctgttgcctgatggtagaagactgaaacttcccaatgagaacaatgcgttgttgatgactccatcacgaaacacacttgcggttaacgtttctgaggattctgcagtctcggggattcatgtcttggagaaaaatgggtatgtttcaggttttggtctaaggaatgagtctgaggatgatgaagggtttgttggaaatgttgattttgagagctttgaagatgtgaaagacagtatcatcatcaaagaagttgctggaagcagtgataatctttttccttcagagactactgtaatgcaaaaggagagtgtttcaacgagtaataatggttatcaggtgcaaaatgtgacggttcaaagtcagaagaacgtcaaaagctctattttaagtgggggctcctccattgctagtcctgcatctggaaatagttccttgcttgtttctaagaaagtaagtaagaagaagaaaatgcggtgtgatcttccaccaaaatctgtgacaacaatagatgagatgaatcggatattagcaaggcaccgtagaacttcacgagcaatggtatgtgtgcagctgtcatttctattttcttttcacctgtggaactttagttatgatgcaattaagagatatactacttccaatgtagcgaccgcgttggtcttcgaggagagatgaggagatattgactgcaaggaaggagatagagaatgctccggttgcaaaacttgaacgggagctctaccctccaatattccgtaatgtttccctgtttaaaaggtaaaagtgcagaacttagagctaattctgaattaaatttgctggtaatgaaaaagagtaatggtatatacacgaattgatgaatcctcagtagtatcattagtcctatgtggatgaaactttagcactactcctactgtaaaatccgcatcatatggtcctatgttgagataattttctgttcggaacttagtactgtgaagagagtaaaaagaaaaagaaagcctgagttcatattatatgtttagttcacaaattcgttctgtttggtagtgtcttcttataaaaggtaatcttgacatatccgattcagttatgtgcctcaggagttacgaacttatggaacggatactcaaagtttacgtatataaggaagggaaccgccccatctttcatactccgatactcaagggattgtatgcatcagagggatggttcatgaagttgatggaaggaaacaagcagtacactgtaaaggacccaagaaaggctcacttgtactatatgccatttagtgcacggatgctagaatacacactttatgtgcgtaattctcacaaccgcactaacctacgccagtttcttaaggaatatacggagcacatcagttccaagtaccctttcttcaatagaaccgatggagccgatcattttcttgttgcttgtcatgattgggtaggcatctgtttcattttttaaagttaactaatcattttttctataggtaacaattttctatgttgaatttggcttcactaacaggcaccatatgagactaggcaccacatggagcattgcattaaagctttatgcaatgcagacgtaaccgcaggctttaagattggaagagacatctcactccctgaaacatatgtcagagccgccaaaaatccgcttcgtgatttgggtggaaaaccgccgtctcagaggcggaccctggctttctatgctggaagcatgcacggttacttacgtcagattctgctacagcattggaaagacaaagacccggacatgaaaatcttcgggcgaatgccatttggtgtggcgagcaagatgaattacatcgagcagatgaaaagcagcaagtactgcatttgtcctaaagggtacgaagtcaacagcccgagggtggttgaatcgattttctatgagtgtgtccctgtgatcatctccgacaactttgtgccacctttcttcgaggttcttgattggagtgcgttctcggtcattgttgcggagaaagacatcccgaggttgaaagatatcttgttatcaataccagaagacaaatacgtgaagatgcaaatggcggtgagaaaggcgcaaaggcactttctgtggcatgctaaacctgagaaatatgatctgtttcatatggttttgcattctatttggtataacagagtgttccaagcaaagcgtagatgatgttactatggagtgctgatggtgaaagtttagacccaatgtgcttgtttgttgtgtgagtaatgaatagctacaaagttgactctacctttgtaaatattgactcataattttgttctaattcgacttgatgttgggcctattcataggttttcaggcccaccataacaaccctacaggcaacaatgttacaagtgtgcctgaaacgttgacgtttaagtttaagagaacttcgctttagagtttagaccagttccccacaaagctcgttgtcgtcatcgcgcgagcttgaaccaaaaaaaccatgaacagtgagaaggaagacgagccattggaagagatcggcgattcgaataatgttctcgatctcactagctatcagctccacagtctcgatacggtcgagttaccgccgaacctgattgagctggaccttacggcgaaccgtttgtcgggattggactcgaggatcgctcagctctccacgcttaagaagctttctctccgccaaaacctaattgatgattccgccgtcgaaccgttgtctcactgggacgccttgtccgatctcgaggtgattctcgactctctgatttatcttttgagtgattttgtaaatggtgaaatatctaggcatctgattttgtttttggccgtggaacgttatgattttggctaattgccttttgcatttcacttttgattttcactagaattgaaaattggcattgatagtctgagaggcatagttatttgtgggcagtggataaagaagagtgtttcttgctataatttatgcaggagttagttctcagagataacaagctagcgaaagtaccagatgtcagcatattcacgaagcttttggtttacgacatatctttcaatgaaatcacttctttggaaggaatatccaaggcctctagcacactgaaggaactctatgtgtctaaaaatgaagttaacaagattatggagattgaacacttacacaacttgcagattcttgaactggggtctaatagattgcgggtttgtccctccctcctctttgatatttttttattctctttacagtgcttcagcaatgaatttgaaagcattgaggtttcaggtgatggaaaatctggaaaacttcacaaaattagaagaactatggctcggaagaaaccgtatcaaagttgttaacctgtgtgggctcaaatgcataaaaaagattagcttgcagagcaatcgattgacctctatgaaaggatttgaggtgtgcttcatttacctttctgcagatatactcattcctcatgccagcatttttatttcttctgatgcttgaaatattatgtacccaggaatgtgttgctcttgaagagttatatttgagccataatggtatctccaaaatggaaggcttgagtgcattggtcaacctacgggtattggacgtgtcgaacaacaagcttacttcagttgatgacattcagaacctcacaaagtatttcacctttcccttgcttcagaccgatttttgtcttttggtgatttattttctccatcctgactttaacttaacctataggttggaagatttgtggcttaatgacaaccagatagaatcactggaagcaatcacagaagctgttacaggatctaaagagaagcttaccactatctacctcgaaaataacccttgtgtaagtttaatcataatctttagtcacttttcatcaaagtcttgtcactcagtatcgtaggatctcctatctttggttttgcttttgctttttgatatggaatgtcaatttaatggtacacagagtgatcccattgctggtcttgttcaatgtgcatcgtaatttagattattttttttccgtatatattgataatgcataagaaaccttgggtttttctataaagtttcttatgcatttaagtaaacttgagtaccacaacttggttgtagttttttgcataagtcaattcatttatttgggtgagtcccagtgtcttctataaattatcaatttctttggctcagaagatgtgaaaagtaattattttactgagagccattaaacgttatctaatataagtgtatcattttctgttgtccatctcctctcaggccaagtcttctgattatgttgctgcggtcagacaaatcttcccgaatgtggagcaaattgattctaacttatttgcttagagatggatatattccttgtcgtgctgtttgtatgaatgtctgcttcctcatcccatgggcatgggcatcgaatttaggaaatcaggtacaacacggattcctcaaaatatacatgtgtctgctgtttatcataaagaagtgcaaatgagcaaattaaatcgctctcgtcatggatatttattaaaacgtttttgaaattctagtgttcccttgcaagtaaaccaattcttgtttttggtctgtaatagtatgtggactgtgtctgtaaaagggaatccccgagtctgaagttgtctttgtttcaagtttcaaccgagaacactaacttgaatactttgatccatatttttgactttgccccttgcttttttatctttatagtttcatgtgattgttcagtattgaaaggttgctatattacatattttactactttttggtaacttgttacaagttttgggcttctaatctttctttccgacagaagtactttttgttaatgaactgaagaaatttgctgtataaaagaaggtacaagagtggtataaaagaaaaagaaaaaagtcatttcaccaatacagatctgcacttctgcaatcacattctctagagagttagccgcaaagtatcaccttaaattatcttacgtaccaaaatattaatggaagtagtctatgtttatactaaaccgatttgaaccgaaaatgtttataataatggtggtattttgaattgaggttttggttgacctgatatttcatcggtttggaaagtcaacttctcttttatagtcgctcaccggtttgatttgattgatatttacatcacgcaagaaaaccggatatagcttaagatgacttgtagcgaatgaacacatgacatgtgttaattccacgaaggctgggtcagtcgtttgtttactagttaccgcagctcaaacatgtaattcccgtgagagattgttttgccggagatagtagttttcgcgtctccaaaaacccttcgacctttgccggagatagtagttcctcactctctttaatccgattcatcgagccggagagctcaccttccgccgcgtaaaatggcggctctagaaagcccactgccgggaacgccgactgcgatgaggaatgctttcggcaacgttttatcagtcctgatcctcgtcctcattggtgtcctcgctttctcgatccgactcttctctgtgagttcactgatgtttctgcttggttgattcatttcagtgttcttcaatttgttaggctttagatccgatcggactagtttagatccgactaatctagatccgatctcatgatttgagattgattggtgtaacttcgtttctctcctcactgtctctgtgttaaagaaacagattgttgttgttacttgttatttaacgctgcgtcggagagatattgttcctcgtcgtagtgatggttcatgtatcttaagagtgaaattaagtgttttagctttgaaatgttaaatcaatgcttgttccattttatttgacagttaggaaaatacttggaattagttaattttacttctctagactctagtaaattcagtaatgtcttatctactctgcagaagaggctaattcttgtttgattctagcaatcatctcatacttttcatttttattgcttttggtaacgttcttgatttatttttcaggttataaagtatgaaagtgtgattcatgagtttgatccttacttcaattatagagtcactcaggttcactctcttttcttatttccaggatgttaatcttagctttgggcgagttctccttttaatttctgagattgcggtcctatttaatttgttgtttatttcagttcttatcgaagaatggaatatacgagttctggaattggtttgatgataggacctggtaatttgaggatcagaaattttggtctattactgtcttcaatagcattgtacttattttgtttcccccattttatttgatattaggtatcctcttggccgtgtgattggaggaactgtttaccctgggttaactttgactgctggaaccatctggtggtgagtgtagtttcactgttatcagcaattatttgatacacacgtatgggtcagttttgagttttaattatttatatctatgtgccacaggggattaaattcattaaacattcctctgtcagtagagactgtctgtgtcttcactgcacctgtattttcagcttttgcatcctgggcaacttaccttttgacaaaggtttgtcttttttcttacatgatttctctagtaaattttagaaccaataaatgataagtacatatttgcattctaacaggaagttaagggctccggtgctggacttgcagctgctgctcttttggccatggtaatttagtcaattagtatacgtgatatttttcttcaattgatgtttcgggaaaattctgaacagcaaacgttaagtttctagaacatcatggctatgataattaataggttagcgtttggtgatttgatgtcatgtacactattcagcattggtgcattgtttactggaatttaccacaaaattttattgatgtgtttctttagagtgttagttctttttactgaatggttacttttgcaggttccctcatatatatcccgatctgtagctggtagctatgacaatgaagctgttgccatctttgctttgatcttcactttttatctttacataaaggttagggttttctccaatggcatgtaaagttgttttgattttttcaccctttggagcatgtgtataagaaaattccttcagcaaccaacatcaaaccttctcttgtaaatctctgtttcttagttgccaattccttttaattatttttccagtgatccttatcatgaattttatgcagacattaaatacaggttccttattttatgccaccctgaatgctcttgcatacttttacatggtacgacctgcgataattcaccattttttctccttttcctcttcagtattattttctgctcagtttttacttgttttttttccatcattaggtatgttcatggggaggttacaccttcattatcaatctgataccaatgcacgtgcttttgtgcattgtaactgggcgatactctccccgactgtacattgcctatgctcctttggtaagaatcttcttccttctggagacagataaaaattattataacaacctataccagtagttgtatatatcacgtaggatgctgaaagatagctaaaattacataatactgaaagttattgacaccaggtttgctcatgcgtatgcaggttgtgttaggcacgttgttagcggcattggtgcctgttgttggtttcaatgcggttttgacttctgaacattttgcctcgtttttggtgagttttttctcaattatttctcaattattttgttatgtatgcctcttcatttagtgcttagtttattgaatcggattttgcgtgttgaactgaccatggattagtccttttggtgcatcgttttctggacacgagtttactagttgatgcctgtagagttattcaagctaaaaaaaactgaaacctttttaaattctaagttttcacttgtgagataagttaatatatgtacgaatattgggtttaaacttaatgtttctgcaaatggacaaaaaatttctactagttattctcttcatttacttctacttttgttaagaaatttttgtctataacttatgcaggtttttatcatcatccacgttgtagctctcgtatactacatcaaaggcattctttctcccaaaatgttcaaagttgctgtgacacttgttgtgtctatcggcatgtacgctttcttatactgtttctctctacatgtctacaattaccacaccttgataagaggagtttatctgcttcttatccaacttcacaaagctagtacagatgggataacctctagattttctggattatgcatcattgggtaaaatgtttatctatgctcgtttattctttacagggttgtgtgtttcatagttgtggcaattcttgtggcattggtggcttcaagtccaacaggaggatggagtggtaggagtttaagtttacttgatccgtgagtggttctagtttttcaatctttcttctcctagccatttattttatgtctttgtccacgtttcaggtattccgctttatcattttataattattaacatacctgacactctttttctttgttttatctatcgtacaacagaacttatgcaagcaagtatattccaattattgcaagtgtcagtgaacatcaacctccaacttggccatcttatttcatggatatcaatgttttggctttcttggtccctgctggcatcattgtgagttaaattttgattgtagttactaattagattttgtgctgaataacattttttgtccatatattttgtgttgattctttcctcttttcttatcttctgttggtaggcgtgcttttcgcctctatctgatgccagctcttttgtggtcctttacattgtaatgtctgtatacttttctggagttatggtaagttgtgtgtctatgaattgccgttgcatctttctgttgcctagttattttattgaaccatgtattcacctgtcttcctgttctcttaggttcgtcttatgctcgtgcttgctccagcagcatgcatcatgtctgggattgcgctctctcaagcttttgatgttttcacgggttccatcaaataccagttaggcgcatcgtctaattccacagatgatgtaagtatgcttctctgtctactttgttctctgatctgttgaatcatctgtgttgacaagttctggacaaaaatggtttgtgtttcgactgttaggcagaggacaacacttccacgaacaatgccccaaaagatgatgtttctgctggtaagactgacaagggtgaagagattgtaaaagagcggtcttccaaaaagggcaagaagaaagagagagaaccggctgataaaccttctgttaaggccaagattaaaaagaaggctcttgttttgcctcttgaagcctctatagttgcgcttcttctccttataatgttgggtgctttctatgtggtatgcagactttcttcgagttgttattttatggtcccatcttttacagttagttttgtcgtcaacattcaaatgataggagttcgaaatgcatacctttgttttgtagatccattgtgtttgggcagctgcagaagcatattcagctccatcaatagttttgacatctcagtcacgtgatggcctacacgtctttgatgattttagagagtcttatgcatggttaagccataatactgatgtggatgataaagtaagttttttcaacaaaaacaagtcagtttttagttcctgttaagcatcatcctttggtagaggtataagctgtctttaatatatgaagttgcctgagtttgatttgcaaaaataaaatcttggtaggtggcatcatggtgggactatggttatcagacgacagctatggctaatagaactgtgattgttgacaacaacacatggaataatactcacattgcaactgttggcactgcaatgtcatctccagaaaaggcggcgtgggaaattttcaactccttggatgtgaaatatgttcttgtcgtctttggtggtatgtgtttggctcatgacattgccatcttgtgtattatctctgaagtatattctctgatcggacaatcatttcattaggtcttattggttaccctagtgatgacatcaacaagtttctgtggatggttcgtattggaggcggcgtctttccacatataaaggaagctgattatctggtacttatttgttttgttttgttttgtttctttcggtcttagaacaagttgtgatggctcaataattttgaagactttgaatctgaacctggttacctaatatttgctttgcaaaagagagatgggcaataccggattgattctgaggccactccaacaatgttgaacagccttatgtacaagctctcttactacaggtatgatactttctcgtaactgtaacctcgaactctgtttacaaggctgagttttaatattttttctccaggtttgtagagacggatggtaaaggttatgatcgggtgaggcggacagagattgggaagaagcattttaagcttacacatttcgaagaggtgagatttaaattatttactacaaaccagggtgcattgattccactaggattctggtaaatgtaactggttttgtcatcaggttttcacgagtcaccattggatggttcggctatacaagctgaaacctcccaggaacaggattcgtggtaaagcaaagaaactgaaatcggtaagcacctgacaattttgggaaaatcctcctacatattattaaaccccattcaaccttgacttcaatgggcagtacacaaatgtgaaataatgagtttcgaagctaagagggaccgtcatgactgttgtgttgagatgagatatactaatgtagcttttgctgtgttgccagaaaacaagctctggattgagttcaaaatcagcgaagaagaacccgtgggtctagaaatcctagaattttcaatgttggatggtgagctatatgtcaactcttaggtctctttattatcgagaaagttgttgcagacgcagtcaagtttctggtgtaggattcgtaaaaattttgttaactttattcgaatttcatgtttattgcggagattttcaagtacggtagctaaagtatccatattacatccactctgggtccctcgcccctccctctctgtcgactaacctctttcctatgtttctcttcgcctccacaatatctctctcatttttcgaatctaaagttttcttttattgatttcacttttttgtcgggtggaagacgtcgtgtttacatgaacatccaaagtatagatagacagcgagattttagtaatcgatgagcttaaagttgggtaagtattatatgctttgtgcaggaaggatagacaactagtaatatttagtaagtatatgaatggaacttctttttattcttacaagcatataattgtatatgtgcaaggaggacacacgatagggttcgccgtttgcaccatatttttattacgaaaaaaagatagtcataagtagacataattttatatgatttgacgaaatagttgacaacaagtttttatatcgccatacgaaagcaaatacgtctagcaatcaagtcattttacgcaaccacatctatagtttactggttcaggagagaaaaaaaaaagagaggtaaaaactagaatatacatacataaagatgaattggtaatcaattattttgtataacaatatatacaatatttataaagtaatttaactcaagaagatgatttaccagtaaatattttagaatataatacaaagatttgtattttacaagatggagaaaagatcagttttggaaaaagcaagagtagaaaaacaatcgacgcctaaaaacgtggactggttgtaaaacaagcatgcttcagtgtcttctggacatgactccaatcgaaaaacacgtctcttgagaaaagtcataagtcgaaacataacttttaatatttttacgtgggttaaaagtaaactataagcctagaacatgccaatagtgtacaaatgctaattgaccccaagaaaacaaaaaaaaaagacgtacaaatgctgtttaaataatttactactaatttttaaccaagtaacggctaatcttcaaaggaaaaatgataaaatcagctattactaactatacttcttgggtagtatttgatattttttgctttgtaagctatttaatttgtatacattggagaattctaatataatattaaaatttataaaaagtcaaatatatacaacgtaacaactaaaaaagtcatactgatgtaaaaaaagaaaagtcaacggtgatctttaggcaacatcatggattggcccaaaacatgtgttggaatgtttggggacaatgaccaaatcaagtgaaaagaggtttaacactcttaagaaaagggacaggtttattcagacaatttctattacatgtaacaagtaaacatgactccaagaacctttgccaatatatataattacaatgactcgtcattgataacaaaaaatattatgtagttatcgatgacacgaacattttaaattcaggaagtgatcagagttttttttttttcccgtcaaattgatcagagttttattatataagaatacccatatatgtagatctacaaaacttatttttgtatatatattttcgttaacaacatcaacatgtaatatgcgaaattaaattttaagtagtgacacatctaaatactaatacaaatcactaaagtacatctcatggacgtcgatgtatagctacattaaccatgcatacttaagtctcgtttttcgtttttttttacttgtatttgatgttaaacctaggtaaccaaacagtatagatgtcccctccccctgtatatttaattttgagaagcaaaattttgtgcatacgtgttgaaaactggaatttaaagaacttctttcaccatatatttttttaaatagaaaaattaatgagttgcagtaataccaccaagagtctgactggagaactaaccagcacaaatagctgtaacattttgcggctgtaatcgaattcaaatcctcctaatgcttttttttgacaacaaatataggttgatcttatatttaataaatcaaagtaaaagaaatatatttttaaaaaacataactttttatacatgaaaaaatatatacaattaaactgaataacatacataatcattatataacgtgaacacatgtttagtcatgatctactacttatacaacgaaaacacaattgaacacatcagaaaatgttgcacaacaacttgaattcgaattctggagcaatcaaagccgattatatagaaaaagaaaattctctaaaatagcatgaagtacaaatacttaggacacaattactttggatcaaaattatgaatcagattctttttggtaactttctcgtttaaaaatacaaatgtctcccaatgccctcccaaaaaaaactgatcgattcatccacaaatattaagtaaaataaaataaaacaactcaaaacaccgatcgatgtcagtcagtagcgacagtgacaacgtaaattaatggttccgataagtctccgttggtttgcgttgttgttattaccacatcaacgccttcagtacacgttagctttctggctctaattgcttctttctcccagtccgtagtagccacgacatatagcatcatggcagcacaacatatctgagcagctaaaagacctacccaaagtccgcaaaatccatatgcggcccaaaacgttagcccaacggctacaggcgttccaacgaggtaaaacgctcctaggtttatgttcgctgccatggacggccgtgcagtgcctctaacaaccccgcaacctactgtttgcgggcagttcccgagctcgcaaagcccgagaatcggcaacgcggctgcggttaatttgatgatagcaacgtcgtttgtgaagatccatccccagacatcgcttacgccccaagcaaacgcagacgccgtcagacccattaccccagcaaaggaaaccgccactatggctgataacctagccttgtttgggcggtttgagccaagttcgttaccaactcgggtggagactgctaaccctagagacgatgggaaaatgtaaagcaaagacgtcgtttggataagaatgcccattgatgccactggagtactagggtctatgagtaaaccacatagaacggtcattatctcgtaccaccaccactctaggcataccccgatgcagctaggtatggctagggttacgactggtccccaatctttgaaacattccgagctggggcgggtccacgttggctggtgtagacctgcgatccaaacatgggccacaaggaaaatgacaacaagaagatttgaagcggctgcggccattgaaacgcccatgaaaccccatccgaggtaagaaacgaggaaaaagttcatgggtatgtggaagatggtgccagcgagtgttgcgagagttaaagggcttgtgataccttgtgctcgaaggtatatacgaagagggtgaagaaaggaattggtgagcagatcaggaatagagcagaggatatatgtttgggccaacgatgagatacttggatcttgatgaagataaatcatgatcttccccaggttgagccatagagcgacgattactaccgaacttgtgagtaagaaaagtacggttcgttgaagcgttaaagagaggagttttggtctgccggctccaaaggcttgcgaacagagtgggtccatgccgagtgcaagacctgctagaacggagtagccagtgatgttagcgaaggcaatggccagggagccaccagctagctctagttcaccgatatgcccgaggaagagcatcgagatggcggagcgagcgtagaggatgagggccgcgaggattgtcgggaaggctaaggagaagagagacctagcctcacttttaagctcagtgattgtcgggaaaatgggggcagggttttgtttttccaggtctatcttcgatagaagatttgtgtggctgatgatgtttggggtttccattttgtctctgtgaaataaaagacacaagacgattatggttacaagatatgattaccagcagaacacttctggtttatatacacaaattacctatatgtccgtcacgtcggacttagcgaaggagtcaaatgataaaagtcaaatatttattaaaaggatagactttatgttttaatgtttaaaaaaggttaattacagaaagaacacttttcttttagaaggtgctgtgaagataagacttcttaaaatgttaaagaagttaggcatttttgtaatcttttttttttgggtctacaaggttgttttagattattatctttttaattttaatagtgaaaaaatcccttttttctataagaacatctttaatttgtatgttttcacaatacttttatgaaaatgcctaattttagttctgattttattaaatgggattctggtaacattaattcaagtttatcagatttattataaaagtttggaaattagaaaatcttatccttgaaaattttgtgccatatattgccgaacgccacgtgatattttataaattactatattagatatgtattttattaatattttttttcaaaaattttaaattaaatttactattttcaacatttacattttgttttaccttttactaaaattcatatgtatattataatgtctagatataaaatttgacgtgtcgtgtttttatcggtatgtacttttgtttttttcttaagtattgcttattaagttagatgtaatcttataatttttttttgttttttaatcaaagttgtgcatttcctagattttttcttaaaaataactttgtgattgaaaatgattcaaaaaacgctaaccagaacttgagaggaggagaatgagcggtccagtttttctagttaaaacaaatttagttatagagggccagatcaattgatcctcctttttgattgattgatatggaaaaaaaatcataaaaccaattggaccagagggacatgatcgatatgcattaagatctatatttttgaacaatatatgatcattttttacgtgctatgaccatattgcaaccattcatatgtgtaaatgtcaaatgtcactaaaccaagttttttgtattgtgagctatgtagaatattttttcaagaagaatgtattgttagggatatgaaacatattaaaaaaatagttttggtggcgtagtctcctatgaatgagctgttttatccaatcggttagatgagtttgaatagctccatggcttcttcttctttttcatcaaaaagattctattgataaggtttaaagtgaattacaaagagccggcaagtacatgaacacttccggaaacattagtcggcgagtacaagaacaccagaaacaatgatcaaacaaagtaaacaaagggaaaaaaacccgagcaaataaactacacaacatccattaatactttctggatcagaatctggaaattcaaaaaaaagattaacaaaacctaaaccttgcaaattaaaacaaaactgagacttagaaaaacacacaaacagattataatacaagaatcttctttataacaagttaaaaccaaatgaaagtgtcgtgtgaccctctttataatactctcgagaagtcacagaggcggtgaaacgcatccaaaaaaatagagactcaaagaacgtctcttgaagaaaggaagaagatctagatttacgatggcgaaatttcttaatctgaggcagagaagaaccgattgaagactgcttctacctaccaagaaagatacaaccagatatgatgctgagaatggcggagacaaaaaagcaaaacatcaaaaaccaaaggaggaggagatttaagctttaaatatttagatctagaaaactagaattgattccgttggaagaaaaatcatggatgtgccgaaaaaagagaaaaacaaagaaagagaaagaattttaccggctctagtgctatggaagccactatgaatataaaaaatctaggtggcggttccttttgtttttagagagaagggagagatttttaggtccagagagaaatgtgtgtgtattcacatcacgacatggcttctttttctttttctattttttctattttgggtttatgtaattataagacattttgtttagttcaattttctaaattattattgacaaaaaaaaagaggttaatttgcagcaatatatttatcttttagacgaaatatatattaatctaataaaaataaactcgacatcataacataagttaacaaataaaacattcaaaaattaatacgatcatgatcaactgataacgatcaatggtagtaacttgggtttgggcaggtagaatatttgtcgtacgaaccaaactatcctggtttacacattctcagcttgaattcacagctacatctgttggaccagcttgtctcatcaactgacaaacacattgaagaagctagaatcagattccattcgagcacataaccatacgttattaacaatactttaattaagaattttataaacctggaaataagtctcaaactttgcccggagttcactgtgctctttcttaatatcaggcagtgctccttttactctttaaagtatacatgtatgcaaaaacaaccatttgcatcaatatatatatatatatatatatatatatatatatatatatatatcttgttaaagaacattctcatacatatcttagtttagatgcataaatgacaaacttatgtattctatttagaactaaaattatgcaaaggaaatgaaaaataaaataaaatgaaaaggctgtacttacccttctatgttgccagctttgagaaatgtgtttgccttcttaagttccttaacaactttgatagcaccgatgctgtattaaaaaaaaaaaaaaaaatcagcaatttatatttattaatgttacaattcttatctctatatttcaaaacacattacaaaaatattataactagcctggcgctgctgctttctagccgaagaatgcatcgggtaatcatgggtacctctattggctctcgctccctgtcaaaattaaatcaacttaaaactttagataccaaccattaggcattagccaagtttaaattaaatcattatattcaaatataattcttgtattcatatttataggtgcggcccaacattttatatgcccctatgcaaacaagatttatacggcctttagtaaaatgcataacaaattacaataacttgggccctttttttttctttttttttgcatctactttcaactaaatcttggtttttcattcgaactatgtttcattacattatataagttcaatgttgatgcattccatatttccatggatcaaaatttcatatgaagagagataggaaactcacaattcatgttccaaagaagcaatcacattaggggaatccctaaaataaagagttattatctctacaataaagttagggttcgtgtctttcgccagagcctcaagctgagtatactgacgatcaaggtacccctgcgtcattatttactttgaaagattaaacgagattccttagaaaattacatgtttttataaaaacaagtaattcaaaatataaatcaaccggattgatatgtgtaaatcatcctctatacgcttaattatatgtgcattagtttgaaatatactaacctcgtcaaagaaagattgtctcatctcttcaacttgtacatggagggatttgatcaccattttaactaaaatatttgtttggaaataagcttttgcaaattcaagaagaataatatagggtcaaatagagagagtgaaatgcatgtaaatgttgcatctacatcaatccatatatatatggcaataaagtgaaagcttagaattataatttaatgagaaaatcttgaaacaacctcttgttggtcaacatttgcaagaaaattaaaattgtatctgtgtttcagtgtttgcagtaaatattattttctatcaataatgtatgttagcttagagattataataagttttctcttagagtaataatcgttacatccaaggagtcattggtgcaatggctctaaacatctgcgactttaagaagctctgataccaaatcttgaaaagtaaatacataatctggaaataataaagggttttacaatagttttctttaattagatgagctacaaaattattaaacgatttacattgtattaaggtgaacttgtaagttcctataatagacgtcccgatgatttggaaattagtttactgtttacgagtaattaatattagttttatacagaagattgttcttcaatggttaaaatggtttatggaaaaggaatttgattgtacttttaaacttctagactcaggctggtccatacaacatataaaaaatagaaaatggtttacatttaattacaaaataatcttattttaaaggttattgtgtaagatttggctctagggaaaagagtaatagagattttaggaacttttaaaggattcatgataaaagaatcaaggtacgataaattgtgtaatactttaaccgcttttgtctatatagagatctttatctttcggacattggattatcggacggtctgatttgctatgctaaaaatctcataagattaataattgtttttgtagctacacatggatatatatttttttttgacagcacacatggatatattttaccatatttcttttactataaccaatatctactgatacccaattaatttcccctatatgtgagatttttaaaaagcgtgaactttccccaatcttcatttttttgaatttttcgcattcgtataagttggagaattgatagatttattctttttattataaaagagattgttgcccgcttggactcggaaggaaaccagaggagatttatagtttctcgcgccatcaacatcaatcatcaaaaccctagtttctcggcgccatggttcccgaaaatgatatagtagaaggtctgctatatatatatctggaggctgcagtaacttatacgaattggcatatgctacttaaattttctatcttttgttgtttattgaagtgatggtagccttatgtaactatatacccacatgatactatacccacatgaggagttatgtaactatgtaactatatacccacatgatacatgtgactcgtcttgagcatcatattagagaggagttaaattaaacagctccccgcaccatggtggtgctgaatcctcttaaggtggttatcaccaatttttggaagcagacaaagttatggagcttgatgctaaaagatggcctgatgctccgaatgatgatccctcagcattctacaaggtgaaataagtttcacaaagtacgaatttcttacacatagtggaacatttacctcttttgctgatccttttttttggttgggttgttgatctaggttccgctctctagagttatatacatggagcaatctgacttccaaaatgaggattcgaaaaattattatggacttgcccctggtaaatcagtcttgcttcggtacgaaccacacacttatcctttatcatcattacttttggcattgaatttgattcatctgtgactcattgaactttctgctgtttgcagatacactttcccaatcaagtgcaccaacgttgtctttgctgatgacactaaaactgtttgtgagatttatgtggagtatgatcccgagaagaagataaagccaaaggtccattctttaaccatctcaatacattctgcagttgtgcggcacttgttaatcgtttcttttatttgcagggtgttctacactgggtccctgaatattcaccaggaaaagagccaactaaggttgaagtctgttcatttgagaacctctttaactccgaggtaattgttgtctcgcttttgttgtattgtacttcctgagtaacaaagattttccctgagctaagacaatttcttttaccataacagaacccagctgaactcaatgatgattggctcactgacattaacccccaactccaaagtggtagtttctaatgcctatgctcgttcaaccattaaataaacactgacaccgttgaatgtgatgaattaggttattacacggttgacaaagactctatcccgggaaagcttgtgtttaaccggacggtcacactcaaagatggctacaagaaaggtgggaaatagaaacactcacaccaaacatatgaacatgtgctggtcaaaaactccttaaaacccctaatagagttaaataatggagaatggaatattggtagaaaggcacattgtggcaacaaatagaataaattttggtttggttcgatataggtggttcagatatctcggtattcttttaagattgaaactaaactcaattggtttataaacttctgatgctaaaacttgtgaccaactcttccttttggattatttactttggtgtttggttgctttttctttttcagtaacggaaaattgcattgagtgcacttgaatctttaacttataaaataaatactccgaccattacatcatcttgaattgttttattttattttattttatgattgcttttttcctgcaaaagatcattgtggttaatggttatgttaatagttcaaaagaattcgaaccccgtagaattcgcaaggaatttatggtacatttattttcttcctttcaactttattcatggctacagaacatatatttccccataatttaaaagtataatcttgaaatccatataaatgaaacttcccacaaatagataaataaaataagcattgatgggaaaccacagttcacgagaagagtgtttgtccctaccacaaagcaacaagaaaggattataagagaggagtcacgggcactgaaagacaacatcaaattcatagaataaaaagccaccttaattagttagttgtgcacgaaactattcacaacacaaaatttaaatgtgcacctctcagtggactctcatcattcatcactcgtcaccaattcgccgttgcaatattttatcttcacttccacatttcataaatagtttttgttggtggcagcatgcgactttggtacgcagcagtgcaagcaactaaaaataatgctatccacagtgaatattttatcccgcattaaactaatatgttatcgtttatttccatcatttaaaagccatatcaaatgtatactcgtgaacataatcaaagtattttgtggtatagcacttgtcgtgttagtgcattaggtatttagtaaattgcattgtatatgtattaatgtacttatgtaaatatgtgttgaacaaaaaatttgtgcacatctaattaacgtcctaagtaaatatatgcatcccacaaaattatgtatttcagttttataccatcaatgtatccaactacatccacatccacatccacgtccgtttgccaattaaacagaattaactccatgtggagaagtggagtctaactccaacgtccaaaaagagagctagacggtcgtgaccactaacataggcgctcttccgcaggtaacccatgtgtttaaccaaagaaaagtgctcaaattaaatcgcattttaggttatatgaaagtgtcaaaacgcatgaaagtccaaaaaaagttatatatatccaaatatctttttatttttattttactatattttcgttctaacttagtttttgctcatgttcaacacctctctcctatttgatgactaaatagagcataaaattgaattcacatatggtataagtcgtgtctcgtgattaattagcttttgtttctcagtgtaataaacaagaaataagcaccacatcaatgtgggttgggtttcttttcttttttgtgggttggttccttgtctttatatttggcatttagctaggcttctcattctacgtggatgtgagtggaaccgccccgtgacctcttcccttctgtctcttttcacctaattcccttaccaaagtgccaaacactcgaccgcatctaacaacatccacacacatttatatatatacacatacatattgagaattcacatagccatatatttttttggtcgtactttgtatctttggcaaaacacaaaaaacaaaaacaaaaaaactccttatatttttgtatttgatgctaattgtcgtatagatgcccaaactcaattcaacccaagctcccaatttattccttctccttctcgttatccttctttgttcaacgcaaacacaatgccacaccaaaggtctccgattacgaccaagaaaccagaagaatatgaacacgacgagtgatcggacacaaaacccggaagatgagttcatgaaatgggtgagattcgttggaagccttaaacactcagtgttcaaggcagccaagaacaaactcttcccttcttatacattaactgtccacaagaaatccaataaaggtgacttcactaaaatccaagacgccattgattctctccctctcatcaactttgttcgtgtcgtcatcaaagttcatgccggagtttacaagtaagcacaagtactctttcttccattacattatttttacataattaacagctctgatctatatcatgtaattagtggtgtaattacattataatgatcaaaacatattttaatattaacatatttaaaaaaaataaaaataaaaataaaaaatactatcctccttcgttttcaacatttcgtcattattttccaaccacacatttttttggtaatgaggtatatatagaggacatgatatttattaggttgatcttgcagatatataattaaacaaaaaaaatagtgttttgtacagtttgcaaactgatgaattccgaattggtaccacatctttagatatattttcattttttatttcaatgtggggatgcaagtatgtatattccaacagccatgatcaaccgtagattctagagttttgtctatatatattttgcagttttgcaatttgttttcattctattaaagtagtatggggattccatatttccatatcttttttgttcgtccttccctgcatttgcatgagccaaaattaattatgaaattgaaagagagtctaaaaacgtattgccaatagaaaaaaggtagcaatcaatgatctctcccttggaatcaacactatatgatcacgtgaactcagaattttgtaagctggatgtattatgaatataatctttagaaatttgacttttatagtgacattttgggcctttgcgagttataaagcgcataagtggtccacatacgcttcacgcttactgtccatttaattttagattttatgcgaactatttcgtactatagctaagactaagaactatacaaatttgagaaaattaataatactaatgaaaaaatgtgggaaaatgtgtctagggagaaggtgagcatacccccactgaaggcatttataacaatagaaggagaaggagcagagaagacaacagtggaatggggagacacagcacaaacccctgactcaaaaggcaaccccatgggcacttacaactcggcctcgttcgcggtcaactctcctttctttgtcgctaagaatatcacattcagggtatataacttattaacatatacactagttgtcttaaaatttaattggacgtataagttttatatccatcttagcgatcttatatgtatgtagaacacgaccccagtccccttgcccggtgcagttggtaaacaggcggtagcattgagggtgtcggcagacaatgccgcgttttttgggtgtagaatgcttggtgctcaagacactctctatgaccatttgggaagacattattacaaagattgttacattgagggatcagtggacttcatctttggaaatgccctttctctttatgaagtaagcattctcacttagaatactatttaaagttagaacttttagtttggtccttgctctaacaaaagtggtgtttaggggtgccacgtgcatgcgatagcggataagctaggagcagtgacggcacaggggaggagcagtgttctagaggacaccggattctcgttcgtaaagtgtaaggtgacagggacaggggttttgtatcttgggagggcatggggtcccttctcaagagtcgtttttgcttacacttacatggacaacatcatcctccctagaggctggtacaattggggagacccttcccgtgagatgtaagtttactttactcctctttggtctcattttaattatcacgtataaccaaagttagtcggtatagctatgactcaaaaagcttgagagaacatgccatacttgatacttgattacaaattgaacaacacatatcagtccaactttacaaaacattatctcgttgcttcatctatttcagcgtcataggtcccaccggccactacatatttcagaccgacttcatttttgtctttttaccccgaaaaagttgcttttgagataatagtaaattagtaatactttgtttgtgtgcgcatgcatttgtatagatatattggaacttaaggccatcaacgtacgtaggcgtgcatagtgtcttttagtagctccaaaacgcatacatagaagaaatgtgaataataacttaataggaaaaatgaaaaaaatgtgcaggacggtgttctatgggcagtacaagtgcacgggagcaggagcaaactatggagggagggtggcttgggcaagagagctcaccgacgaagaagctaagccttttctttctcttacctttatcgacggctctgaatggatcaaactctaaccatatacacctttttttattttctttccacctaattaataatgtacattttccctttaataaaataaaaataattttttaaacatttcatatgcatgcacacctcattccatgactcgacgcccatattgaacaaccgaacattgccgaccaagtcccatcttgcgatacaccacttagatatgtttttgccaaagcatgtaagaattccggtgtagtccaatgtattttgaaacagattggtgtatttattttaattattttcatatgagtttcaaaacgatacaagtcttgttcagacaaactaacctggattttaccttttatgtaataataagttagggttgggggttgtgttttaaaatgacataatttatcagtggtcatttttgtattttccactcccctgaaggctgaaaagtgtgcattttattggtaaaagctgacaaattaatgttcaattatatgtttaattagtaagactgatgatatcaagaagagaaggataatacaaaaacttggaaagtgggtatattataattttaacacttccaacattagcactaaaaaactttatatgtttgtcacaaatgggacccaaaatcagtatgatgtggtaacaatttatgtatcctaatcaatattctaagtgaaggtgacatactgacattaaagtaaaaagattcctccgaagatcaataattgggaacatcaaatccttatcagaaaaacaacagcaaacaaccaactccattgatgattatctaagaagaagccccattgatgtcgaaatcaaaatctctagccttcgtaatcgctgctttatcttactccttcttctccctcttctcttctccaccaaagtctcactaccacgagctcttcatctccacttccttctccgacaacgcttccgtcgctctaaacctccacaccctcacgcgccgccctcatgtagccggtacagtggccaacgctgaagcagcggaatatgttcgctctgttttcacctcctctgctctcaaatcacacgtcgttgcttaccaagtgtctctaacttacccagttcatcgctctttggtactaacgccgacagactctgcaaagccaatcactttcttgctggaacaagaaaaactcggagacaatccttatgctaatgaagtgatgcctacttttcatggatacgctaagtcaggtaacgtttcaggtccagtggtttatgcaaactatggacgagtggaagatttcgtgagactcaagaaagatatgggcgtgaatgtctctggagccgttgtaatcgcgaggtacggtcagatatacagaggagacattgtgaagaacgcttacgaggcaggagctgtaggggttgtgatatatactgataagagagattacggcggagatgagtggtttccggcgagtaaatggatgccaccgagtggggttcaagttggtactgtttataatgggttaggtgatccaacgactcctggatgggcaagtgttgatgggtgtgagagattatcggacgaggcggttgaattgagcggtgatgttccgcttataccgtcgttgcctgtctcagctgctgatgctgaagtgattctgaagacagttgttggagatgtttctgatggagatgtttatccagtggggcctggacctggggtcttgaacctcagctacattgtgagtgagtgagtttctgtttgagatgtgtgttacttacttggatttgagttttgttgggtcttggtttcagggggaaactgttattgccaagattgagaatgttattggagtgattgaaggagaagaagagcctgataggtacattttcaatagtgagtggcaatagacttctgattgtagtaactaactagggattgtatatgaatggattggttagatatgtgattcttgggaaccatagagacgcttggacttttggagctgttgatccgaacagtggcactgcggtacttatggaggcgagtaaaagttatctgcaacatgtatttggtgaaagtttccaatgtttttattgcaatgagagatttttgaaactgttgtagattgcacaaagactagataagctgcagaaaagaggatggaagcctcgaaggacgattattctgtgtaattgggatgctgaggagtatggcctggtctctagtctctacctcactgtttatatgtgtgcttttgtgatgttgaaagaagcagaaatttggggtttgatgttttttttttatgtagattgggtcaacagaatgggtagaagaaaatagagagatgttaagttcgagagcagtggcctacttgaatgtagattgtgcggtatctggccctggatttcatgcctctgcgactccacaactagatgaattgatcaaagtagctgctcaagaggtactttcaaaggcagttttatagcaatcttttgagcaaggaggacacataatcaagctttttggttaactgtgtgcaggtccgggatccagataacgcaacgcaaacaatctatgaatcgtggataggatcaagcgactctgttgtagtaagtgaagagactagcttagataatgaattttgtcttatggttaaactgatttgtttacttggtatgtgaagatcaggagattagggggcggaggttcggattatgcatcatttgtacaacatgttggtgttccaggagttgacatgtcctttggacgaggtaaatatctgattcagccacttacatgaaccaaatatcattgtctgttgtataaacgccgagtcaataagcatttttactaataggctatccagtatatcactctatgtatgatgacttcacttggatggaaaagtttggtgatccgatgtttcagcgacatgtcgcaatggctagtgttcttggtttggtcgctcttcggttagcagatgaggaaattataccattcaactatacttcctatgcattagaactcaaggtaactaattgatatcctataaaacatatggccaaagcaattaatgagctaagaggttgctgtaatggtatttgtcaacctgcataaaacagaaaagcgcggaagatttggagaatgagaagttaggacataacatagatgtttctacgttgatcaagtcgatagaagatctatctacggctgcaaaacatatatccctagagaaagaggtaatgacactagtttacatttgacaaagtgacaagtatagtgactatattgaaagtagtcttgaatgtactgtgcaggcaattaaaggagctcttaaagtgagagagcttaatgacagattaatgatggcagaacgagctttaacagaccgagatggactctctgaaagaccatggtacaagcatttgatatacggaccatcgaagtacgatgactacggatcgaaatcattccctggagttgatgatgcaattgacaatgcaaagaagctaaacacaaaagcatcttgggaaaatgttcaacaccagatttggagagtctctagagctattagacatgcttcacttgttttaaaaggtgaactgatatgagatcaagaatgctcttgttgcttcagcacaatgatgtgaacataatgaaggcagataagattctgtcacaagtttattcagttttggtgtttacattttgtagttcctctatttcttttgcttaaaatttgtttcttttgattaaagttaaaccctgaaacgctttgaaaacctccggtgagatcaatacactccggcgtcgcttcgatgcatatcagcatatgaagacccatataaaaccccattactaaagcccatataaaagcccaaaatacaaccggaagctagattcaggagttctatacttgtaaaagctagagtcaacgccgttcagtctcagaccagacgaaacaacgatgcttaactctatcactttaacccggaaaccaccactcccgttcaactctgttgggttttcaggtaatcactcttcgtcttttggtcgaagaactataacggaaggtagttcgagcaaggctctttcgtttgggtacaaaaatgttggttcactgaagtgtggtcggagcaattggccggggcgttctgggactgcgtttgggcatctagtccgggtctctgcggtcccaggtgggaattcaggtggctctggcgggttaggtggttcaggcggtggtggtggtggttccggcggcggtggtggtgatggaagcgacggaaaaggaaagaagtggtcacttctctcatggtaatttttcttacttgctcctgtcactactcctgttcttgtgtaaagatgtttctttgaaaagcaattcattgaagcagatgttggaaatttttcttggatgtgttaataatttactcacggaacactttttttctagtatgattctttgcttttgacttgagcataaacacactttgtgtgcctttttctatggtgcttcaggtaccaggctcttctctcaaactctcctgttttgaccaaagctgtgaccgcagcacttttgaacctcgttggagatttgatctgtcaggtaactctctcatttttgtgctatctttgaagtttggattcttcactattcaggatatatcgagataaaacagtattcatgagctgctgcattatgtatttctgaacagacagactttaacttgaattgtgctatctcttttttaaagttagaatggaagctaatagacccaaaatacaggataatgtagtaaagccccattttctttataatgcttgatcgtattctgctagatatgtgagcgacattgcttattcgtatcacttttggttgcagcttactatcaacaagacctcatcgctggacaagaagaggacactcacctttaccttcttgggcttagggctagtcggtccaacattgcatttctggtatttccgtggacctttcactcgtatgacaccgcaaaagctaactatattacgtctctgctagtggttcttcagttgaagagacttatgcatccattggtatattacttatgcttattctctgttctctgaaatctctcaactccatccattaggtatttgtatttgagcaaagtggtgacagcttctggattatcaggcgcagttatacgacttctactggatcaggtagcaaagtttcctgttcccagtctaacaattatgttcccatcttgcttcctctgtgttagcacttaacaccaaaatttgtatttgcagtttgtttttgctcctatttttgttggagttttcttatcagcagttgtgacacttgaaggaaaaccatcaaatgtcataccgaagctacaacaggttggattaaaacctaactaaacttaatatttccggtgcaggaatctaaatttgatactttgtatcttttgcggtgttctaattgaatccatgaattgctggttgtataggagtggactggtgcaatgatagcaaattggcagctatggataccatttcagtttcttaacttcagatttgttccacagaactaccaggtttgatactaaactctgtgactacatgaaacgggagtctgaaaaaaaatacaattgggttaagatagatatgcttcatacataacgaataacgacccacacgctgttaatcctctgcttagtataatctttgagaatttattacgcattttcatgtttttgagcccttgttaaaaacatctttgacatgatgagcttgagatgaattacgcttgaatgacattagcttctagctagtatgcttagcaagattttctttggctttgaggatgaatcgatgtcttatatatgaattattgcaggtacttgcttcaaacgtagtggctttggcttggaatgtgattttatcattcaaagctcacaaagaagttgttgcaaagtagacatgtttcttacctggagcctagaggtggttgctggattgttatcggcagagttttggggaaacggtcttgtctgctgatgcaaatgtttggtgtttcgaaacaattatttgggaaccctgcacttgacattttcttagagttgaaacaagcttttcttcaagcacttcaaatatttccccatcatcaatgtttcatatatttattgtttcctcattcagagaatttttttagttcgtatgaaaattttgaaatctctggctatgtgtcttaaacttccaccaaagaagaaaatttaaaattcaccggaccaatcaccgaccgaaacaaaaaattaaagttcaaacagctacaataatatgcttttaaggcaggttatgtatatgattaaaaagcaaatgaacacaattccaattgtgttttcgttcttctcatcttatttttttgctgctgtatttgttcctcacataccaatcttcttttgaaatttcgtaatctggtttaggaagatccatgtcatctgccaaaagaaaacccgatcaacaactatcttagaggcaatcacgaagtggtaattacaataacataaacaaaaaagggagataagagctattataccatgacgtgaggggcaatcctgacacagtaaactgggaaacccgagtaaaatttcagaggtcctccttcttttaaggttttcatcgcacaatcgagcgaacctgtgtatggatactttccttgagcatccggttgcattttctgaatctgagttttgacaaagtcaaatggcagactgcaagccgcagcgcagaacccagaaacagcacttgctcctgttaaagtaaacaaaaaccaaactcagagatctattttaactacaatttatcatacagagattacatgaccatatgaaaatactgataaaggtttcttgttaagtctagtgcagaactagtgtaacaagcctaggaagttgagaaaagtgtagttttgccaactgagcgaccttacaattagtagctcttaaaagggagtaaggacaacgcaatgggatccattctggattggtcttagatctgggtttgggcaacggttgagagtttagagagtcctctcattaataaagtattttccttggtgtagttcttggatagattgtattaagtgaaatacacatttaatttatgacaatctaacactcgtgtaatcaggagattatatgctacaaatgtaaatttccaagacgattgattcttaggatccttgactctaactgctatctacctgctcacagaaaaaatatattcttactgtatgagaaacttggaagagcagcttacctacgaccgtagacatctccccgaaaccaagattatctctcatgtattcagcactttgatcataagatgcaagcattcccatgttcaaagccatagctctgaccacagtgggcccacaccctttccaaagtgctaaaactccctcatcagcgctaatacgggtaagcgcatggaaagcattggtataattcctgcgctgagctagcggcaaagtattatcggcctgcattctgataagtgctagatcggctggactaccgacgcaagcaccaatagcaccagctgtcagaccacatagtgccttctgatacagcggtagaggctttccatcattagactcaattgcctttgcagtcagcaacctaataagattgacagaagagaggatgatttatccataaccataaggcaataaaaatctattcatctggatgggctcaagacgaaagacgaatgactaacttacttgaatgatccaagacgggctgtcgtgtaagttgcttgcctcagcaacccagcagataatccctattaaaaaaaattaacatcaaataagctcaggagacatcttcaatggggtataactaatgttgttgttggaaagactgttagataaggaaattaattctttgaatagctgagactcagatccggaaatgcagaaatcatatacattacaaatcaacaaaagtcatgaacatatcaatagaaaacatactacacaaaacgtacatcttcaagataagtaatgcatccagaaatgcaatttataccttgtagaaggcaccaacgccctcattcttaagcatgttggtggttatactggctgcagatccctgaccaagttgaatcctcaccttcaccaaccagaaacaaaacaaagtattagttaattacattcacatcatttaaaaatcctatgaacacaggcgaagaatcacacattgtgatgaacctaagaacgttattctaatcaaaatccagatctgaactagaacatttcatctaaacatgtatcaatagcaacaattcacactcaaacgagtctgactatgttccgagcaatgaaatttgattataataagccaaaacaaaaactcagatctgagagataaaatctacagactcggatctgatgaacaacatttacggatttcgtaggtatcaataccagcaaatcaagcaagaattgttaatactaacgagcttagacatagagatgggtgatacagaaacgtgtatccgtaaacatttgacagaccttaatcatgtcgatcggctggataacgcaagtagcgagcataccagaggcaccgccattgacgaagggcttcacggtagtccagacactgattggagctttcttctcttccgccatctctctcttttcttttgttttcgtacggactcaaacgcaaccagaagaagagattccttccgcggagaaaaagagagagagaaagagattcacttggtggagaggagacgatgaagtgtgaagcttatgggccttttatattaacaccacccaactgaaactaaattgcaccaaacccttgcctttttaatttttatttttttccatttgcatatgagatctgatctaagccagacatattttctaaatttattaatttggactttacttttcaccattcggattttacgcaatccaaatatttagagttatttattacgcattcatatgaattttagatttgacattcgtccatttctaattttctagtatgaagttgaaaatcgttagtattctgaattttttgggtccaataaattctaattttttaaaaaaattgatcttctgtatttgtattttgtatttgttcaataatttttggcatttttcacgccgtattttagatagtggaccagtggagcagtatttctgatgcaatttgataattctgatgcccttttgtgaagatcaacgtggtttgttaacattagttgaatctcataaatgtattattagctgatacgacaacaaagcatatacagaacgttgataaacgttagcgcaccgatagacgagattatacttcaaggaaaaatggacagttgtaagaagattatcaaagtttggtacaacaaaagcttgataatgaactcgggaactcgcaatggtcgctctaccaatgaaaatgtatccaaccgagataaaacacgaagaccgaacgaatattttacaggatttaaacaatcaacagaatcaaaagtgaaaacagataaacgaaaaaactttttttggttgcagtttttttgagaaaaggtgtcaatagtcttcaccttcatcttcttcatcgtctccaccttcagcaccaacttcttcgtaatctttctccagtgcggccaagtcttcacgtgcctcagagaattcaccttcctccattccttcaccaacgtaccagtggacaaatgccctcttcgcatacatgagatcaaacttgtggtcgatccgtgagaacacctctgcaactgctgtgttgttactgatcatacatacagctctctgaaccttagcgaggtcaccacctggaacaactgttggaggttggtagttgattccacatttgaacccagttgggcacctgcaaaacaaaacccatgccaaaggagttattatataataacaacatgaaggtagaaacagtagcagctttatccatttctagatcataccagtcaacaaactgaacagtcctctttgtcttgatggtgccaacagcagcattaacatctttgggaacaacatctcctcggtacatcaaacaacaggccatgtactttccgtgtctcgggtcacactttgccatcatgctagctggctcaaaaacggcattggtgatctcagggactgatagctgctcgtggtaagccttggcggctgagatgactggtgcataagatgacagcatgaaatggatacggggatatgggacaagattggtctggaactcagtgatatccacgttgatggcaccatcaaacctcaaagatgttgtcaaggatgaaatgatctgtgatatcaacctgttcaagtttgtgtaggttggcctctcgatatctagggatctgcggcaaatgtcatagatggcttcgttatccaagaggacagctacatccgtatgttcaagaagggaatgcgttgagagaacactgttgtaaggttctacaacagcagtagaaacctgacatcacagaggaatatgcattaaaaccaagtttcatccaaattagaccactatagaaacatgtcatgtaagagtttctacttcagtgtctagcaaaagaaagagtacctgaggagaagggtatatggtaaaaccaagcttagacttctttccataatctacagacaaacgctctagcaacagagaacccaatccagaaccagttccaccaccaacagcattgaacaccaaaaacccttgtaagccagtacagttgtcggcaagtttcctcacacggtcaagacatagatccacaatttccttcccaactgcaattacaagaagcattctaaggaccatttcaaaaaccctaacaagttagaacaagcagaaagtggattctcaccagtgtaatgtcctctagcgaagttgttagcagcatcttctttcccagaaatgagctgctctggatggaaaagttgacggtaagtaccagtacgaacttcgtcgataacggtaggctcgagatcaacgaagacagccctagggacatgcttcccagcaccagtctcgctaaagaaagtattgaacgcatcgtgtgcaacaccaactgtagtatcactgcaacaacgcaaaagactcgtatctcaaaaatcttccgatccacagaaacagagtacaaagagtgaattagggtttatacctcggcatcattccgtccggctggattccatgttcgagacagtaaagctcccaacacgaatttccgacctggatcccagcttgtccgatgtgaatgcttatgatttctcgcatcttctctcagtagaaaccctaatttcgagcgattcgcttcttcgacggacggagaattgaggaaatgagagcggtgagcgagatcttctttttttcctaatttccatgatttttgtgggaaattgattatttattgaatgagatttgataattggttggggtccgccaagttgtgacagcctgcctttgggactgggcatagacaaaatacgtgagattcgatctggatctagatctggaaggtgtcgatttttatccggtttaaataacttaccggaatttaggtatttcgttagtatgagtgaggtaaataatagcttaaccgacctaaatcgatattataggttaaattagggtttagtggtttaaataactattggttatagtaggatgtttttgtaagcgccaaacagaaaagaaacgtcatgtaaggttgtctttgttataagattttgattctcttagtgcatttatttattaattaacttacataaatattgactacgtaaaacgtgttttcaagatttgaaatcacaagttctgagataaccccgtataatccttttaatgacataagtaggagaataaaaatttgcaaaactataaatttgtagaatgaaaaattgcataataaaacaaacaaatatatgtgtctaaaattaaatatacatataatatgtatttacataatgaatttttatttttattttctatgaagaaaacaaaaattctgtatttttgcgttttaataaatattatgttaattttcttaattggtaacattcttatatactcgtattaaaaaaatgtcattttgcaattacgcgtattactaatcggagccaaatatttttatatttttcaatgagtggataaaggtacgaccaaaatgatggtttgataaccaaaatgattgtaatgatacgaaagataaactcatataaattgatcattctaagattgtattggatgaattgagatagtcagctagattaattctctaattgctaagttaagttagatgaattgagacaatcagctatattaattctatatagcatatttttcctaagcggtttcagattaaagatgtcaaagtgggttaagcaattgtttagatataatggatcaagatttcaagataaacgattatcaaatccattgaattcatgcatgcggttaggaagatagcttaagtagcaattcaatcctataaatataatgttttaagggaattttcatccattcaaactaacaaaaagacaaaaaaatgcatgatcctaaagcaattgatagttaaccttaagactaaaaaattcccaaagagagtatacagtaaagtagacaacggtcgagtgaaaccgtgaatccgaagagagtacataacggtcacaaagtttgcgagtttacaaaaatgctagttgatatgattggaaatgggttgggttaaggaattgtttgattaaatatgtcatcaagacaattatttcatatttccacatgacttggtttgtttatgaacacaaataatgaatagagagatatataactattacataaatagttatttaaattttttgcatgtaatttattaaaacttcagttatgtattgtggtggttctcattcacacaatatcatgaaaatgaatagatttcagactagggacaaatctttttactttacattcaatatcctaagaacattcccaaatcgttttaagaaagggaacaaaacaattgcagaggatttgaggaagatgaagtagaatgtggatgtgagaacccttacatctccaagaaacactaaacaatactaataatctactcattcataggtttacattattttcttttctgcacataagtttacatgattacatccatttgatctcactcccgttaggtgccgactgccgacccaataacttcacataatcttatacatatattattgagaggttcatattatttttactagtatatataatcgaatgaccctgtatattttcatttgtgcacccactttttttttgtttccacctaatcaattttttgattaaaaaccattaaataccaaagagttgtccattatgtttttttttggtgttttaaatgtccatccataattattaattcataaagcatatcactaaataaaattgatgatataaaaacaactatagtatgatcatgaccaatagttttatgtgacttttgtcattatgtagatcaacacaactgaatctgttaaaacgtgttcaaaaaaaaaaaaattgtagaatctgtttgaacaaacaataatgaaaaaaacattgaaccggatcgataaaccaatccacgattcgatcctatatcctaaattgacgtaaaccaatccggtccataacaataagtaacatgtatccgccgaagatatttatgccagccaaaattgagaaactgtagaatgaactggatcgtgtgggcaatattgtaaaatgaactcattttcgaacaaaagcgaagccgtgggacccaaggcaggctgtcacaaaatggcggaccccaacaaattatcaaatccaattcaataaattaatcattttcccttcacaaaatataaacctaatttgccaacgaagttgaaccaaaaaaagaagatctcactctcaccgccttcatttcctcgatctccgtcttcctccttctccgtctgtcgcagagcatcgctcgaattagggtttctgctgagagaagatgagggaaattattagcattcatatcggacaagccgggatccaagtcggaaattcctgctgggagctttactgtctcgaacatggaatccagcccgacggaatgatgccgaggtataaaccctaattctctcttttatactctgtttctgtggatctgaaggtttttgagagacgaatgttttgctctgttgcagtgatactacagttggtgttgcacacgatgcgttcaatactttctttagcgagactggagctgggaagcatgttcctagggctgtcttcgttgatctcgagcctaccgttatcgacgaagttcgtactggtacttaccgtcaacttttccatccagagcagctcatttctgggaaagaagatgctgctaacaacttcgctagaggacattacactggtgagaatccactttctgcttgttctaacttgttagggtttttgaaatggtccttagaatgcttcttgtaattgcagttggaaaggaaattgtggatctatgtcttgaccgtgtgaggaagcttgccgacaactgtactggcttacaagggtttttggtgttcaatgctgttggtggtggaactggttctggattgggttctctgttgctagagcgtttgtctgtagattacggaaagaagtctaagcttggttttaccatatacccttctcctcaggtactctttcttttgctagacactgaagtagaacctcttacatgacatgtttctatagtggtctaatttggatgaaacttggttttaatgcatattcctctgtgatgtcaggtttctactgctgttgtagagccttacaacagtgtgctttcaacgcattcccttcttgaacataccgatgtagctgtcctcttggataacgaagccatctatgacatttgccgcagatccctagatatcgagaggccaacctacacaaacttgaacaggttgatatcacagatcatttcatccttgacaacatctttgaggtttgatggtgccatcaacgtggatatcactgagttccagaccaatcttgtcccatatccccgtatccatttcatgctgtcatcttatgcaccagtcatctcagccgccaaggcttaccacgagcagctatcagtccctgagatcaccaatgccgtgtttgagccagcgagcatgatggcaaagtgtgacccaaggcacggaaagtacatggcatgttgtttgatgtaccgaggagatgttgttcccaaagatgttaatgctgccgttggcaccatcaagacaaagaggactgttcagtttgttgactggtatgatctagaaatggatatagctgctaatttttctacctttatgttgttattatatagtaactcctttggcatgggttttgttttgcaggtgcccaactgggttcaaatgtggaatcaactaccaacctccaacagttgttccaggtggtgacctcgctaaggttcagagagctgtatgcatgatcagtaacaacacagcagttgcagaggtgttctcacggatcgaccacaagtttgatctcatgtatgcgaagagggcattcgtgcactggtacgttggtgaaggaatggaggaaggtgaattctctgaggcacgtgaagacttggccgcactggagaaagactacgaagaagttggtgctgaaggtggagacgatgaagaagatgaaggtgaagactattgacaccttttctcaagcaatgtgctaccaaaaagttttttcgtttatctgttttcattaatgattcttgttgattacatgtttgttttaatcctgtacaatattcgatcctccttcgtgtttcatctcggttagatacattttcattggtagagcgaccattggggaagatcccgagttcattatcaagcttttgttgtacgaaaccttcattatcttcttacattgtccattttctttaggtacaatcttgtctattggaacattgtagagatgtgttctactttacaatcatggatcattgatccaaacattacatgaattgatcaggaaaagtaaattggaaatcacgtagggcagaagagttgggagagtgaagggagatcccaaatgggatcggtaggatcgaaaattgcatattctgcattcatgttgtcatagtaactgttagctccattcattgcatatagggacgcagatatctgtctttcaatttctgcaagacccaaatgttgatcggttgagtagtgatcgttgagatgtccatgtgtttctccccctgcctgagccaatggaatctgatggttgaatccagagacaaggggccacgaataaggaagctggagaccctcggtttctggttgcccaatgaccgatgaatctggtcggtacacattattgagcggtatggccgtggtagtggtggtggtggtggttgtggtgagactagtagcagtcgagatgtagttgatgttgcaatccgttaaagaagaaactggtttgtgttgttgttgttgctgctgcttcatgctctgcttctggtgaagaagatttctgatcttcaaagatagttgtgagttgttaggaaaatggtttgcgaaattggtgcgagtattggagccacgtaagagacatgcagcttcatcgtaggctcgagcggcttcttctgcggtttcaaaggttccgagccacatccgtatcttttgtgtagtgtctttgatctctgccacccattttcctgaaggcctttgcctaactcccacaaacttagtcttgttgcctttgctcttctccttagttttctgctttggagttgtttgatgttccatattttttttgtatgaatctgtacatagacatagttataggcatatatatagggatacataaatttttccattttgtgctcgtatgtttgggtcaaatcttagtggttgtctcgtctttctgaaaacttgttcttgttattttagtgatgatacggattacggatatgaattttataattatgggcttttgggtactcttgagaatcattcagaggttttatgtgggttccatgtattaattgagtgcgcaccattttctgattttcttagtattaaaaagatttgtacagaagacaaatatgatgtgtttatttctcagcttggaactgcgaatattttacccaacaaactatattttttaagacttacgtatgcttaatgtttagagggaggcctcaataatgagaagaagagattttttaaatgctaagccgaccaatttatactttaaaaacaatgatcttgacaagatcttacaaggttagtgggaaacctctaagttagagcttacaagaaaaatatcaatctatatatgtcttaagaatattaacaacaactttagcaaagaaaaagagaatattaacaacaataagtagacaatactgacctgaaataatggtgtcgcaaaggttttccttgaccctagtttttctattggcaatcttaatcacagttgctaatggaaacgacaacagaaagctattgacatcttacaaatattctcctcctccgccaccggtctattcacctccaatttctcctcctcctcctcctcctcctcctcctcctcaatcgcatgctgctgcctacaagagatattcaccgccgccaccaccctctaaatatggaagagtgtatccaccacctccccccggaaaatcattgtggtcgttccttaacctctaagaagcatgcaagtggctcaggagaagacatttattttctgccatatattactcactgatggattgttatgtagcgatgactaaagcttcttctgtttttttttaaccttcttctttttattgtattgattacttttgcagtttgtatattcaaaatttctgactaaacatcaaatgggccatctttcgtttattgattggagacttcttttacaggttttataaaagatgatcattacatatatatacacccacttttgacttgcatcaaaacagtttttctataaacaaaactagatcgaatgtaaccatcatctagattacatggatagatctaactcttaagtacgtaagatttatacaatgtttaaggttacatggcatttatcctttaacaaatacaagtagtggttaatttagaacaaagtcattacatccatcaaatatcgaagagagaacaccattttcgaagcagatgccacagagtctttaaccgggaaagggtggttcatccgttgatacgatacctagccaaaagtggaaatatgggcgtctacattgtgaaaattctttgtgttcgagagaatttagaaatttcggggatactaaagagaagctattacacatatctctctctaagttttctttcaaaaggggtcatattttttgttagaggttaattgagtttggtcgcttgttttatttaattatgtgtatgtttgttaagtttatacattaggagttgggtcttgtcctaagggtagttatgttaagagttaaaaggggagagttacaaatcttgttcttagtgttgtttggtcgggtctgttgaatattataagaacacgttgtctttgtttggtcgggtcagattttcaataataagaaacttcagttttaatttcataactctgtttctgtctctctcgtcgacaagtctctctgtttcttatttatcaaagtccttcaacaatccaacatttatcacaacctcataagcgaaaggtttttgatgacctaggtgtcttgggcaattaggccttaccattggtgagaggccagctcaagtcaagcatacgatcaccggagtcattcttaatgaggttggcagatctgatacgattggtgtatcaagaagaataagaatgagagacaaagcaaaagaacacacgtgcaagtgaggaggcacgtgagaaggaagcttacttgaagaataagatatttttaggatctaaaaatatctttagaaaactctgttctagtataaatactggctctgaattttgagagaggtttatgttgattgttgttgaatctgatatgagtatgagtctctcatgacagacttaagagaagagctagtgatgtgatagtctctcccgtatggtgtattgagagctgacctagtgatgtgctagtctctctcgtgtatggtgtgttagtgaatagtgagtactggtttggttaaggaataaaggtatcgatattgaaaacttagcaagatcaagggcaattcagagtgaaattgtcgtttagtttatccagtttgaagacaggggtgattgaagctacccaaacaaaacttgagagacgcttagaattgcttttaacatggatttaacttttaaactgtaaccaagtcatgggcctatatctttgagacagaaacctgaagcgacctttttgtagtgagtgagaacaaagacatatgatataaatgagaaatgtaatgagtgggtccaaatattttgtagttaccatctcttggcctgcgcaccaattcttccaagcacaaacttaaaaacattttattaaaatgcttaggcttgctggctgacatatttatcgtgcttatacgacaatgaaataataaaattaaatattttactcaacaaactatacctttttaagactttagcttaatgtttagagggaggccttgataagaaaagaagagattaatgctaagccgaccaatttatacttaataaacagtgatcttgacaaaatcttacaaggttagtgggaaacctctaaagggagcttacaagaaatatctatctataagtctgaagaatattaacaacaatgagtagagaatactgacctgaaagatggtgtcccgaaggttttccctgatcctactatttctcttggcaaccttaatcacagttgctaatggaaacaacaacagaaagctattgacttctgctccagaaccagcacccctggttgatctatctcctcctccacccccggttaatatatcttctcctccacccccggttaatctatctcctcctccaccaccggttaatctttctcctcctccacccccggttaatctatctcctcctccacccccggttaatctttctcctcctccgcccccggttcttctttctcctcctccgcccccggttaatctttctcctcctccacccccggttaatctttctcctcctccaccaccggttcttctttctcctcctccgcccccggttcttctttctcctcctccgcccccggttaatctatctcctcctccacccccggttcttctttctcctcctccacctccggttcttttttctcctcctccacccacagttactcgtcctcctcctccacccacaattactcgttctcctcctcctcctcgacctcaagccgctgcttactacaagaaaactccaccgccaccaccctataaatatggaagagtgtatccaccacctcctcctccacctcaagccgctcgttcctacaagagatctccaccgccgccaccaccctctaaatatggaagagtgtattcaccacctcctcccggaaaatcatggttgtggttcttgaagctctaagaagttagaagcatgcaagcggctcagaagaagacattaattttctaccatatgtatattattcactgatgaattgttatccgaaataagtttttgtaagagtgcttcagcgtttaactttttttttactgtctctcagcttctaggtatttttttttctcgcggtttgtagtgtgactgaagcttcttctgtttgtttttaaaccagcttctttttattgtattgtaaaatttctgactcaacatcaaatgggcagtctttcgtttattgtttgaggactttgttacagattcttttaaagataatcattacaatatatacaccccttttgacttgcatcaaaacagttcttttgtaaacaaaactagatcaaatgtaaccatcatccaactctagttacgtaagatttatacaatgtttcaggttacatggcatatttatccttaaaaaaatgcacgtagttgattaatttagatctaagtcattacatccatcaaatatcaaagagagaacaccgtttttgatgaagaagatgccatgcacggtcgtttcccttcaaggcttcagaattttttggaccgggaaagggtggttcttcctttgatacctagcttaaagtggttcatcctcaaatatggatgtctacattgtggataattcttaaatgctcaagaagaatctagaaatttcggggatactaaaggattttattctctaataatttgctcctaaaagttcaaatatcattcattaagaatatctttactctcggctgttagattgttattagttattcttcatcgtctgttttggaggtgtatttttattaatagggatcatatccttcatatctaaatcatggactgatatacaaagaaaaagctattacacattctatcgctaggttttctttcaaaatgggtcatacttaccacaacctcataaatcaaagttttgtgatgacctaggtgtcttggccataaggcctcaccattattggcgagaggctcaagtcaagcatgcgatcgatcaccgaactcgagattcattaattaggtttggcagatcaaggacaattcaggtgatgatgacgtttaattcattcaattcgaagacgggaagcaaaacttgattgctttaacatggattaacttaaaacttcaattaaggcttcttctcattgagaaatgcctaaatctttaagatacaaacctgaagctaccttttgtagtgagtgagagaacaaagacgtgtggtataaatgagaaatgtaatgggtgggtccaaacattttgcagtgaccatctcgtggccggcggcccggcgcatcaatttttccagacaaaacttaaaaaacattttattgacatgcttagctgctgtctgataaatttatcatatgacaacgatataataaaattaaataaaaaagacatttcttttattaagaaaaggccaaagaagagtgtccaaaagagtacaaatcaacaaaggcaatgagagaaaagaatcattcttccaaaattcccaattgcatacaaaaacaaaaattcaaaatcaaatctttctgttttgttccttctcgtataaagcaccaaaacttcatcccactctcaaacccaaaccaacaccgacaccaacagcagacctgtgtatttggggaaccatacccaatgacacatttcactaacaatttcatccttccctcctaatatacacttcctaccataaagatagaaattttcattttgtaacttctgaaggatggaccgacccatcatcatccctcccaaaagaattagatgaaaaatgcaaaagaagaagaaacacttttgtaaacacataaatgcaaaactgacgacgctttgtggtgaaaacagagctcacaaaactgtaaaaataaacagagagatcggattggattgaatttaggaggaaagcatggattggagagcgagctgctgttcgggtttcagcgttgaccatgttgaggccaacgccgatggtggcagtgtctgttgaagttgccttaatatatttatcatacgacctgctgtctcttgtgtcaccacatctttccctgtaagtacctggccaacgatatacacattgattttctctatgagtaagacaataatgcaaaagatcaaagaatgaaaattgtctatgcaaagcgtaactaacaaacctcggcaaaaactattaagattttcggaagatgctggttattggggcctaaaaggtctacatcttgcctgcaagtttatcatcaatcaaagctgttttagatagtcataaggaatgaaaacgaaagtaaaattagaatctaaacgcaattgcttacctttcaaccattgagcagagctgatcatgaaccactttggcttcaaggacatcattgcttataggcaaacagttcaaccacgcaggaagtacctaataaaaccaaaacaaggtaacttgtgaatcatcaaaaccaaccacatgtatgggtacgatggcgaaaccaaaataactattataatctacctgagaagaatcaatactatcacggtgaaattggcagatctttcccacggctgatacagcattatcatatgccatggcattttcagattgccgagcatttggcagctgtatcacaacatttaatcttgacagagcctctgttgacataaaatcatgtgttacttaactgtcaagtatggatcaaagcccaaaaacctaccagtgggcaaaggtatgtcatacctccaataagaggcttgaatacagagccgccaaactcagcacaaacgccaagcccataaacagcagcctgtcgaacctctgggctctcgtcattgcaagcttccagtacaaatggaagataggtatcataatatctgccaaacaaatataaggtgtcttatcagaactctaaaactggaaacctacaaatgtaaaatgatccagtggatgcgtatccttacttaaaggcagcttcacggcattgttctgctacatcatcaaaaatgcatatagcaatccttctctcttccgctgttttatctcttccctgaattcatcgaatacacataaggtgaacgaagactaatattgtaccagagacatggtaacagccacagaatttagaaactacattcacctgaaccagagtgccataattttctacactttttcactaatactatatcacttcagttatgtacttatatgttagggaatctacgaggttctgtcaataacaaaaacaattcaaaataaaagacttgggtgatgatggccacatacccacataggagttaagtaagaggacagttcatcgaagaaaggtagaaatgaggccttgaatgtcttaaccaatgttcccaatatttcaccgacctatttcaaaaacaaaaattagaacattgaagatagtatactttcaaagggtgaatcagcgaaaactgacttgatcaaaaatttcttcctcttgctcattttcctctttaataagctctccctcttcagcgtcaaagtcttcagcatgggccctctctcccctctctcgcttcctactagagcttgcggtcataacttgctttatctcatcaactatggatctaattttcccttcatccaaaagatttccagagatctggaaacaaaggttataagataacattttccattgtaatgctacaatttactccaagagggcacacaataaagacttgttcaacgtaacatctctatcacataccctaaccctaggaaaggatgaaaatctatgctcagaaggaaaattgacaagtgacgaagcaaagaaaacaaaaaaggccaccatgtcttctttagaggatttcaacaacaagaaaccaaataggtgacctaattaagaagaaaaaacagcacgactaccaaggaaaatgcagcattcaagaagcacataaaaaagaagtcccaacatctggtaatgaaaatttacctgcaagcattcattgatagcttccaacatactcacacagatctctgtatcaggttcctacataaaatacaatcctccgccccatcaaaaaaagtgaatcaaagccaaaaagagaaaagtaaaaatgaacagaacacacactaactttatgcaaagcttccagcatggctggaataatgtagtcagaaagctgcttcaaatatgatagatctcgcccttgagattcccctttctctattgccagcttggctgagcgcattagttccggcatggctagaaagaaaaattatccaaattcttagaaacttgtgttctaatgatcaaaacagtagattatagatgatatattttctgatatacctgaaacagctgctcttctaacttcttcgtgaaaatagaatttcagtaaaggaaccaatgtaggtgcaacctacagtataaaaatttactctcccgaacccaacaacaataccagatattgacacaatttggagttatttaacattacaaacctgatcaatccaaggaaaaaatccttcttttaactcatcagcatagcaacaaagcatgttacaagccgtggccttttcctctagaacacttgttttgatccctattcttttgtcgcccaggataatggtctccatgctgtatcaagagagggaaatagcccagatttatgcatgttatttatgaacatatcatatcattatatggacagaatctcaacatcgttaaatatctcaagaaaaaaatgcagggcagctgcacccccaacaacacagagaagaattaattttctatgcaaaggcatagagatatcataacaatcagataagtgtcaagaagaatggaaacctttcatcatcagaatcctctgcttcatcttctgaatcagcagatgtaattgttacatctggcttaagttgagctgactgaagcaaaggaggcatcacaaccttcatgtatgggaggaaatcttgacctagacacttgcaaagcctagcccatgcctacgagagtgtaaggtaaatgtaagcaagcgaacttacctctctatgtttataaataacagatagacctagcatgttgtaggaaatcacctgtaacatgtaacttgttattggatcgtctgcctccatctgagaaccttgcaatgacattagcacttccatgacctggcatggatatgtgaaatattttcatgcgatgatgaatagaactactggatatagatagcatcatgatttgaccctcgcatataagcatacctgtctagcatcttccttgaatctgtcctttccaactgccattccaacaagactgatgcactccatggatttggcacgaagcatccgcttagacttgtcagttgcattcatcaaaatagttttgagataaggcatgacagtatcatagtacttttgaaagtgttcctacaaatttagattatgttagacttagatcaagagttgcatgtagggaaaacaatagatgcaacacaacttctttacaaatacctgtgatgaatcagccactgaagcaagagcagttaaagctccttcttgcaccatttgtttaccattctgtacgaaacaccattataatccaaagttaatcatttaaaatcaatagagtgcaaaatatttgctcttttttagctatttatcttaagaaataatttacacaatggacttacttgtagtagcacaagtaacttgctcactactccgtctaaataaggtgacaatatttcaggagtacaattttcactgaagttgagtactgctgaagcagcatgagcctacatgaaaaggtcacaaggtactgctttagaaagtgttagaagattatattcacagagaaacaggggatcttacctgcactcgtggattctggaaatcatccatagcagcagcaagtgcggggagcactctctcatgatgttggttttgcaaatctggacccaaatctgtagacaactgtccaatcgcatttatagcagcccaccttacgcgaggatgaggactttgaaactggctcaaaaccattgacaccacttggtctagattttttatcatcacctacatcaaagttcaagatattcactatcagattgaaaaccacaaagataaatcaactcagaatcaatcattatttaacatccaattgaaagtaaaaacaatgaaacaattaaggaaaaagttcattaagacatgttattcactaaaaattatacctttgaacaaccttcagcaatctgagcaagtgcaatcaaagaagcatgatgtttctgccactcagaggcagccaagtaagcagaaaactgctgatatgcaaccggaacaatggtgtttcctcccagagaaattgctaaccgatccaaacactcttgacccatgctgtagttgcttgtctcgccagcatcttcatcctcagtctcagcgctgtaccaagcaggatcgtcctcaatatcctcgagcatcttcataagaacagcaaacaacctgtcaataaactgaggaagcttcctgaccataccaggggcacgctcacgcgcctcagccagagtaaccaaaaactcaatcgcaagatgacgtgtactctcctcgagggaatcagcctctgcaatctgaagcatcgaaccaactatgtcaacaagttgccgtctaaggaaccgtggctcggtaccagccaattcaatcaaaagctcaagtgcctcctgtgcagttgcttcattcccattgttcagagattcggtcaacgtcctgatcatcgcaggcaaaacatcttggaatctatctctctccgttgagttggccagacactgaacgaaactaatcacggcgttgagagcggcgattttaacatcggagctagcagaattactactcaagcactgaagaaacacgccatggagttccttgatgtgaggggtaagagtctccccaacgtactgcgacaattgagccaagattaaaaacgccgattcctgcaatttaggggtaacagaagtaacacactggaaaacaaacggaagcaactccggccatccattctccggtaaaatcccggatgcaagttcagagactgtatcgcaaatcttcttagagatcgatttagcctcctcatgttgaatacaatacaacatcgaagatttgagggaagattgagtggagagggagagacgaggccatagataagcatcgtcgcgtgttaacaacttccggagaaggacggcggccatagcacgaccttcgggatgaggagaaagctgaagaagatgagcaagcttcaaagagagggtatcgggattgctttgtttagcgagattgaaaagagactcggcggaggaacgttgctcgttggaagaagacatgaggtgagagattagcgtctcgaagggcgcggaatcggagccgagaaccatcgcgagttgcgcttgctgaagctgattcgcctcggaagccatgggggatggtggcggcgggaaaaactagggttaaaaagtggctaaagctaagaggaggaatgaggaaggtccgaaggtagcgaaggagggatgaggttgtgaagggataattatatattttatttttatttccatttattttccaactattatgtattcgtaatttggggtggtgtggggccgccgtggtgtaaattaaattaaggaaaaataaaaattaaagcaaagcaatgataatgtcattagctgtattttcaagggtggattgataaattgatcaccaatacgtgtttccttttttttttataaattaaagtttctattatttcctaggtataactatttaagaatataaatttttgattattatcttatattattttctttattaaaaaaggtaaataataggtggcattagcttatatatttttctaatgacagaatctcataatttcacatacctagggtatatattaatatatttataaataagtacgtaaaagtaaaaaatatactatagttataaattatcgtaatatatttaatacgcggatttaatatgaatatatgatttattaatatctaatttttatatcaaaaatgttattgaattaatgtatttgaaacgagtgaataacgtattggttaatattgatttaaaattagcgaatatatataaactagattttaacccgcggtatactgcagaaacaatttattttttaaagttagtatacataaaagtttgcaaattgtatatatctataaaatatttttattttataattataattgttattaagtaacgtcctgccaaacccgtcccgccaacccgtcccgtaaaaaaaccatttattttattaatattgatcttatttatgatatgtttatgaattattgtctaaatattttgtaattttgtagtaattaaatgctatcaaatatctctatggtttgatgatattaaatattttggaagttttattttagtaactaatggtgtagttaatgttgagtgatttaagaaagattgttaaatgtcaaatatttaattcgaagtttttattctaattatcaaaaacaaacattaaaatctagtggcaaccattgtaactaagtcccaactacacgatttatttcacaaaatggctgcaaaaatgtatatatagatatataatttttaaaactatgtgaattttatattttttgaaaaaactctttattatatactttcacacattactattttgtatttaatattaagtaaagaaaaaaaagcataatcctattaggtcagattgggttggccttgggtacaattactaaatggccacatgcttgtttagtaatggaaaagacatagatgaaagtgtgtttcaagatttttcctttgaattttgtggaggatttggaaaatagagattgacctttgcttttatttaatgatcagttttatggcatgagagtgttggaaaaaaaaacactatatttgatggacaagaatgaaagtaaacagaaagactgaactacctaagacgttctgaacaaatcatgtaaaactttaatgggctaaggctaacatcccaagctttggaacatactacatactacaacctacctaggtcaacaaagtatgaaagtaatcagaaatggtcttcaccttcaccatcttttagcgttttaaaggatgaaaagcgagtttatgaaatggaatggaacaaaagcatatctaaaattaagaatcattgtaggtagaggccgaaactcctgcaatgacatagtgattcttagatggtactcgtaattggttaacaccaattttggaaaccggtgcattagtgttggtacaaacctaaacccctaattccgattaaaccgtgagtcgtcgttctctgtttcctcctcttttcaaatccttctccaccggtcatctcctcttgcaatcactacgactccgtctgtttcccggacaaccgcagctctcctctcatcctataaagtgtttcagcttctatgtttaaaattcacacagagaagcctaatttttaaaacactactctgggaaatctttctttgggaaattgggtttagggatttagaccaacattgattggcttggttaatccttgaaagctatgctgagtaggttgtcaaggcgttgctactgcacttcttctgttcatcggccatggctgtttctaggactgggcaatccaggtgacaaatacaaaggaactagacacaacgtactcaaatgttctttttggtgataatgcatttaaaacaactaggatctggttgtgttgattttcaaatagtttcgatgtgtgctcttgttttgttgtgctgcagattggattcgaaatgattgatgttttcgctgagtcagtggggattcaaatgaacttggtaaatttcaaggctataatgggacaaggtatgtcagtaacatgagtttttttttttttaactttctcttgtatgaacaaaagctgtgttagtttgatgttgaattaatggcttccaattttgtgttgtcccctctcaggtttcgtggcagatcttcccgtcatccttgcaaaaccgcaaacctacatgaacttgagcggtgaatcagttatctgcttctcctattctttactatgagtcttgaagtgtagattattgcatctagtgattctaggcatatgaaattgtgagtcttaaaccaagattaggcattctctacttgtacgtaaaacatgttaaagtcctgatgagaagattcctcgttatgacactgttatagttttgtagagatgtatggttataaaatctattgcttggtatgtgcttattattccactcaaattaagctgcatttacctagtcttatcatcactggagcttcattttgttgcattttagctttgcttgattgtgttagtaacttcgcctctccttaaattgtgcagagtggacctctcgcagcttattacaagttacctctcaatcgtgtgcttgtggtaatcctattactgtttctggctcaaggcctaaccatccttacgatagtgttttgccagaagacgtataattccattgttactctggggtttggtgatgtaggttcatgatgacatgcaattgccatgtggtgttcttcgtcttcaagaaaaaggaggccatggatgtcacaacgggtatgagaatcacatttttctcactgggatgtggtcatttgtaaaacagtgttcatatcaattaagctcttaagctttccgtggttctcctaacacaatatttgtcacatgtgtcagaccgtagtatctaccatcattatatgcgaatcatcttaggtttatacttgtttggggtatcattgacattagtatatatggtagttattgttcttgtgttcttcgtaggttaaaaagtgtaatgaaccatttccgaggcaacagggaatttgcaaggctacgaatcggttggtttcgacctctgttcctttgaacactttctctttctcatgaacatctttaattctaaatggagatattattatcatatccaacaatggcaaggaattggaaagcctccgggacaaatggacccaaaggcgttcttgttgcagaagttcagcatgccagctcgtgaacgggtatgtctttgagcctatattattggcatcaaacattgtggctttatataaccattaggaattgtatttatggctccctgtgtattgtgtgtttctcggaaagatggataaagctttagcagaaggggtggatgctctgaagctcgtcttggctaaagactttggagaaagctggagattgttcaatgtggaacagaagtacaaacacttaaaacaacacacaatactatcagcttgaccaaatgcttcggataagaaagacttatgtatatatttttcatcttggtgcctgtcccttgttcgattttttttgtacctgtatacatttatgattttccaataataagtggaaagactccagatttcagattgttagcttaattacacgaatccaattcccaaaaacgtatatatatatatatggtcgtactcgttattgactattggagtttcgagtttgacaaaaagttccggagggtaaaatatgccgacgggatgcgagtttccgatgatcaaaaccttcgagaatgctcttactgccgccgacttcgagtctaccgtcgagctcaccaacttcccagcagtaattcaccggaatatacctctctttctttctcccgctaaatctgattagtcgtctgattcgtaatttgctctttcttcttatggaggtttttcggggatgtgctagtgtctgggatgcgtattctaagtggaatccattcaacagtggcctcgattatctggaggtactgttcttagttcttacccctcacttgatttcgacggacttcgtttcctttttctggtaattgaagattgtataaccttcttatgcgttattatatgaaggaacgtgcaggttcagttgaagtggaggcaatgctttcgaggacggctccagttttcaatggtgatatcagaagccatgagagggtaacaacccccctcatttctcggttctttaacagattattggctgatttgagttctaattgtttatggttctgcttctataatagttttgttgtatccaccacaatatgttttcgttgtactgtaggtgtcattgcctttctcggattttatcagattctgcaagcagcatatgagaggcaaagggaatggttctggtgttgatgctaagtctgcagatttaaatcctatgtgtgaggactatagacctggacaaatatacctagcacaggttcagatgatattcagttttatctattgtgcttctcgtgtatgaatatgtttgcctttgtgttgaacttacatgaatatgtatttctttttccagtttccaattctgaatgatgagaaagaagagaaggttctacttaagattctgagacaagatatccagacggtatgcatacttctttcaactcttgtttttgcaaagctggttacttgaattatcttaatatcaactatctgaactgatgcagcccacatttttagacgcaaagtcactttcttctatcaacttttggatgaattctgcagaagctcgatcaagtacccactatgatccacatcataaccttctatgcgtagtctcagggcgtaaaaaaggtcaatccattgtttttcttcgtgataaactgtcaggaacaaaaacgttctgttgtctgtttttagtggagtcaaattggaatcgtatggtccaagtataaattaaattgcttcgtagaaatttagggaatgtggtttatagaatgttaagtcagctcgtttgaggtcagtttaaggttcatttgaaatattggctgattcgatgattaaactatatgttttgtcttcttacatctaaatcaatttcaactttaaaaatcatcaacagttgtattgtggcccccttccgccagtccctcgctctacccgatgcctatatacggagaagcatcaaaccataggtatcattcttggacgttccatatgatttgctttgtggttacatcatgagtacgcacttccgttactgcaacttagcggtatcaatgattcttctatgccaacgtttatttacgagatttcattgcattttatatttgttgtccatgtagttcggttggtctagaaaatccaaatttatcagattatccaagagcagagcattcactgaagcagtcacaggagattactcttaacgctggtgatgcagtattcattcctgaaggttggtgagtatactcgtattttctcattaaagctctcctagtagcgcatagctttgcatttcagaataagctgaatattctaagatatcctgcatcatctgtatcaacctgtttttcctaatcacttgtagttatcatgtctctgttatgtagctttttctagctgagccactattttagatgctgcaattatatcaataacgtatgcaaaagaaatctcttttttcttggtctttctttagtgtgtgggtttgtatatagtttatgtcatatcgtatgaatatgcctagagcctctaatctagatgcttgacatgagttcctttaggtttttattccagacacaaacaaagatgcttgaaatgtcattttggttagctagcttactcagaaccatgctaattaaagtgacacttctttggttaccttgtaagagaattgtaagtatcgaagctttgacactttacttaaggcgagaacaatcagtaggcaggttgatggattatttcagattaagttttattttacttatgcaggttccatcaggtggatagtgatgaactgactgttgctgtcaacttttggtggcaatcaaactatatgtctaacatgcctgaacacatggattcgtattatctgcgtcgaatcacaagaaggtcttgattacacatcttggatttttatataggatatctttctgcataccatatttgttttgtttcctgactttgttcttttttcttgcatgtgctcctggattcttgtgttatcaattaagattgatagacagagaaatggtgtgtaagttattctctctcatcagtaaagattgttggaattatgatatatttcttacccatccttattgttaaaatgtgtatgttcgtcttctcatctttgcttgcatttacgaagttttctacctttctatttactggtgtaacatggatattgacagagcctgttagtctcgaagccttcttcaactgatttaaggcacctgtctgagcatattgaccaatctcgcattgagatggcaggtaagactctgatggttaaatcctgagaaaacgttataattgtttacctgacttggccggtgattgaaactgcagaaggtgggaatgataatataggcaatgaaagcattaaaaagggcctcagcacattgcatgaaaaagcgtcgctgcacgatctagatccttctgcttcccaggcgcttcatgatcttatttctttagtccatgaccacgttaatgctgttgatacaagtaagggactccaacacacttcacccagttgttcagagggcggcgaaaaaagcaagttcctggtgaatgcaatgtcttgtttagaagatgatcgcgttgcccatttgctttggaatcttgaagcctctagacttcgggatgttctccttgcaatggcagtaagttaactctaaaaggcattactttactgtgtttatcctcacatggtattaccttagctggagttaagttacctaaaactattggtcaaaatggagattttcgttttagttttacataagatttttgagtgaaaatcctttgaatttatttggtcctatcatgtaacttatttcagcgttatttcccaagaactttagaagcattaatactccacatgctctcacccattgctgcggaagttctaacacagaagtttgatgagattgaccaacagactggtgaagaagataggtttgttctgaagcattgttgtgtttttatttccatactttaaaactggagagtaacttgttatctctcttctttttttcgtttccaattcttaggacccagttctttcgggaattttatagtgcattcgatgatgaagcagctgcgatggatataattttaagtaggaaagaggcttttgcatttcaggtatgttctctagcatcactttgtcgactgagaacctaccataaactcaaaggagagaaattttcggcatcatactgatatctgcgtaaacctggttacataaatctctagcatctctttgttgagtgtgaaccaacgtaagatggaaggagataaatgttttggcattaggctgatacttgcatataatcagttacatgaatcaacattgttaactcggaattctccttacccgagaactttatctgactagctgatgcagaaaaaacttatgaccaaagtctttgaaaatccccatggacataaatttttaattacatttgttatacaggcatttaagaatgtactagacaagtttttgggggtcaacattgcttcaccaacaacaaacatttgaagggtcttgggtgtggtcgtctgtggtggccaaaatgtatgtgatcgggcaagagagagcgtattggtattgatatggtaaaggtagtgtcgtctttgttgggaaactgattaaaatgttgctgttgagattggaagctgctctgttaactctcattggccttaccttctaccatcgaataggattcctacatttttgcatggccaatagcggagggagcttttgaatattacagccgacaacatcagaattttggttagggaattaaggaagtaatgtatggtttccaaatttgttagataggtcttgctagaaaatgtgtgttggatggaaaccaatcatgaattcttgtgttgaaacatgaaagtcttgtatttccattgagtttggaagaaaaaggtttgtttctcttatcgacctctttactctatcaacatctgtatccttacaatcacagttttgtcactactgaaaaatctcacctgtgactgttcatgcacaactctgagtgttcgtgcaggtatactgtttctgtacagatatattaaaaactagaaagatcaaatgtctggggagatggatgtattggactttcaatgtctcgcaacgaatgattcaataagtgggttcaccatctccggcttctcgtcctgcaatttttttatagaaacataataatatgaaaacaaaggttccttgctgcatttccatcttcagaggaggtagagagagatacctgaggacagtggccggcatctggaagaacaacgaaatcttcaaccgcgtcaaaattgctatatgctcgtccaagctcgatgggctcccatggatctttctctccccatgcaattagaaccgggcactgcaacagttagagaacttagactaaggtttagttttaactatggccaaggaggagaccagagtaacgaaccttgactagtgggagtaaatcctctggaagtggtcctccggagtaacagataaattcaaggaagacatcaactgcaccaggctcaagccctggacgtagaattgcctcaactagttcatctgtcacttgcgagctatcatggtaacactaattgcaaattcacaacaacgaacaagattgccttaagctcactataaaatataaaactcattcttgtgttttcagatgcaaccaccaatacctggcaaagaatgctctttactgtctctggtttagcaatgctcttgaaaaataattttccaaccggagtgttcctgagaccgacatgataatatattcagctgcaaccccagagaggatcttgttgaaacagctatacaatacctaagtaaattctggaatgatttgatgaaaggtcttccaatgaatggttgtttcttgatatgaagcatccggagggatatgttaataagcataagccctctgcatatctctggcttacttactgctgcctgaagaccaacaagtcctaatgaacaccaatctctctgtcattactgaaccgaaaggggaaaaaagcttaaatctgaaagcgttggaacttcagagctctacctcctatagagttgcaaataaagaaagcttcatctttgaccacatccagacagaaatcattgagttgctcaccccatgtctcaaaagtgtagaatggttctccaccaaactcacgaggattcggtttatcggagtatccatatccgataagatcgattgagtacaccctatgtgttttcccaagaataggtgtgttcttcctccaatggtcactgataacataacaaaaatgttactgttaaacatatggttctcaagtccctatcagctaaaggggcaatgatttagacctgttagcaccgaaaccatgaaccaagaccaaagcagggccactggttccagcacattgatatcttatcgaataacctttccacttccatgtcctgcaaatacccacatttcgtcaatccacggattttaatcagaaaccaagaaagaccagtccaatcgttagctataagtttatatacatagattgcagaagaaacaggaaggtgatattacaaggttcgaacttgtagctcttcagaagaagcttcgtccgtgacggaagaacatgagacggacacaattcccctcttagtcggagatcttacgattgcggtcgaaattgattgtcggagaaaatgggtttcgctgaaactgataatcgaagagttcttgacacggaacagcgacgggaattcgaagttggtaaagggtagagctgcaaaaatgctagtcttcgccatgaattttcggcgtggttccgtgatgagtgaggactgtaatataagtcaaaccaggttttgaagttgttacgaggacaagtgttacgatttggaccaaccgctgttttccttaatcatgaccacgtcattgcattcaagcctgttgttgcttgcttataaaggttgtcaatactcaaaactagtaatcaatttttattattttcttttctttatttgcaaaatgagaagattggcattgtgattatcattttgagcctaccaatgttaatgtgagtggtgtgagcgtaagagatgactgagaaagtaagtttaggagcacaagaagggtgttgttttttgcccctaatatcatatagtacatgccaagaatagacatcatatacacactgctctttcactatagtaatatgtaatcaaactaaaaaactcgaagtcctaaaaactgagaagcaaattgacaaagcaaatgttgtgctgtggtgtgcgctgtcttcttcagcctattaccttgagtttgtgtcatcggaaggccatatcacggtctccatcaggcgttcacgcatcaacgccaagttttcatccgatatttcctggtatatcttcccatggtcgcatttctacacaacaaactatacaatattaacttttgagtcttttctggttcccatggcaggaagggaaaaacacataaaccaaaactggagcgagatatagcaagcgattttaccttgatccatttgccatacaagtgaagacgcgtgatcatcactctttctgcaagctcctgactctcctacaagtagttaagacaaaaaaaatcaaactcaattgtctgtgtttaaataccaagctctaaacaaggttgaatcaaacataatttatcacaacacagtgtgattgtaataagaacaaatctatggaactgctatctctgttgcaatacaccaaatcagagacaagtcttataaacttcagccctcactaactgctcattaaccaactcaccacagctacaatctgctacattcagtcctcggctagttatagtataccagctgaacttgttcaactagacctaatgcatcttacagatgatgcttgttcatgtgagatataaactaaacttgtttaccttgccgagggcacggaggaaacgtttgccatccgtcggtctgtttgttatgatatgactgttttacaacaaaggagaaacataattaagaccacaaggcaaaaatgatcggagtaaagtgtttttgttaaatctaatcctatacagaactttaatcaaatgataaagcataagaaacttacttatagaaccaagtgtattgaggaggattcatttcgtacagctgatgaagaaccgtcctcacagctttgtatgtaaaataattaacaatttgctacaaaatcgaaagccagccatccataataaggttattgccaaaggtcaaatctttgtctatgaaaacaagggttcatgcaaaagttctctcaccttttgtacatcaccgaaggtatcgtcgtaattaccagcaacatcctcattcacaatcaagagctttttgctctttcgattcgcaattctcgatacacgcttcggagaaagcctaaaaacaatgcgtgagccagtgaaagagcttcctaattccagatttcttgctttgccaaggatcttcttcctcctgatggtacccgtcgtgtgagcatccagacataaacatggactgctcgaagagtccatcaccggtgagccaacaacaaaccaagcactcaccattactccaaaccaaacagcaagatcaagacttttcccaccagaaattaccaaacagttcgtagattcccttagatcgattgtaagaatcagtgggaaaagaatatggaagataaaaccctgaccctggtttgttatagcaaaacagaaaacaagaattgggtctgtaagatggaaaatggccgttgaatcttagccagtcaaaatcagggacttgtgatatttatttatttttcctagcaagcagaggcaaaggcaaagacaaacaagaaaagcaccgggtgggctttcgggtttacgtggacgcctccctaaaataaggtgtatttcttgtcgtcttgcagcttgtaagttagaaaaaacatgggagaattgcagaatcacgagaaagtcttcaaaatcacgagttcgggcatcggtctaaaatgcttatgaatccaaggcataatcaaaggccggatttttttggttaccaatggagaaaataagtttgctataagactctcggccatcttgttcggcatatctcagccaccatgactctcgaatcagtagttcaaaaccattccactatcacatcaacaaggacatcaatgtacatcaaggcttgtgctcagccctttccttcatcacagccactaaaacccttacggtcaccgagaatgatcaagttctcaagcagatcattccgaacttgaatgtattcttagtataatctggtaagagtcaaacagatcaagttctcaagcagatcaccttctaatgtaatatatgaaacaacctatcagctcttagaatgcatcttccattcgttatgccatacatgatacaacaactagtagtaaggagcttaacggccacacagtctaactatggtggtgaggaacgaactcggggacatttagtcatgagatacaacattttcgtggaaaccagttttaacaagacgtacataatggatatatcgacatttcataccaagtcttacagaaaagacttgtctagttattgtatgtatatgtacaaacatgacttagagactcaactctatctgcgtgttgtcgcagactctgtgactgccaagagtgttttactcggtgattaacatttccgcttcatccatcattccttgccctttctgagaaaaacaaaagcttctgttaattgcaggtaccaccaattccctacaaaccagcctgaatcactttcgcgagttggctggtttgaaaggatctaaggcaatgaccatttcaagaaccagacaaaaaccatcaaagatcggaaaacatttgctagaggcttgtacaactgacattgcaagaaatgcagaatgacctactttagtattataaacaaacagcattccacttttctcagctacgcattaagctatcactacgaactaaaagaacaaaagagaaccaaacagaggaaaaaactctgctactatcagtttcaactttcaatgatgtatgtccctcaaaaaccagcaatgtgaaagcattaaatacagtttcttttcacaagtcttagatagataaatttcaaccctttctcaagcttagtctgattctccaaagactttgcttttaagccttctgtggttcaattttgagaaagctgccatgttcatgttgttcctcagtcaatgtgtaaattgcattcaacagatatatattatatgtacccacgcatttacccataatcaatgcctaatgaaatgaagaaacaatctacaaatccaacaatggtcagtgcaacttgaacccagaaactcagagattccagaatctatcagtatctcctataaatcctcaagaacccttaaagcccagaaatatcttcaatcatatcaaccaaatttacggccccaaaaacgcaaagatctaatctttacctcgagaaaactcttccatgaatctccacaagagccagagacaccattatcgtgacaagaatgtatagtcttaaactggtcaatatcaagcttcttattgataaagccaactttgaagtagattgaatcagaaggtggaagatcgaccttgatctcatcgacatcgagccaaataaagaatttcttcacctgaatacccttgagctcggtgattgaaccgtaaccgatacgaccagatatggtcttatcgtagtgaacgaggtagtcaaattcaatctcacaggaattgggcaagtgaacgacgaatcggccatcgtcggagagggtgaaatcggtgacggtgtccggtaagagaccgcttgggagaccgtactttgggaggagttcgtaaacggtggaaatcgaatccgggtcgggttcgttgagggaatgggtcgtcgtagtgaagagggtcaaagagaagatgaagattgagatgaagaaaggataaagggccatactttgtttgaggatagagagagagagagaagacttctgagattgattgattttgtagagaatcgtttttgagattagtttgactcttttttttagacctaagaaaattgtagacgtaattgccacgtctcatctaaaatttagtggtcgtttacaataattacacaatatgtttttataatatatacaaatgatcaagcttctctgaattggaaataagaaaacattataagaaaattggtagtttttagtgggaatgattttcaaactagtggctcgactccattttgtgactcagcatcatgaacttcagtcatggtgatcatgatctccatgtttttggattaatcctttgttcgaagctgagagtattcaattttctcaccgtagatcctttgcaaaaatatgtaaaaccacattgcaaagatggttatgatcacaagaaaccagctgaattggatattaaccaatgatattgctctatgaagagctttgacgtctgagcatctaatggtgtgtttaccctcttcaatgtgaaggaaacaatccttgggaactaaacttggcgtccaaagcatgcaagccattgacataagccatattccttggaaggaaacactaagtgaccgaacaaaactcaatatgaagctacttggtaaggcgattcccaagagtgttgtgaccaaggagacgaaaactacgagttggagcaataaatggtagtggccctcaacgcctgtgtggtctgacgagtggaaatggaagaggaagagttgttgggcgaaggcgagggccgcgatcaagttgatgagggatcgatgagctattggtcttgttttatcaaagacgatggcgaaagctgcataggtgatgaaggtgaaggagatgcaagagtgttcaaagttatggagatggtttgatgggatggttccatcattgggatcaaatggttggtgattcttttggccaaggaagagttcgacagaaatggaaagtgaggaggctataatgatcacaagaggctctaaatatcttggtttcgataaggggaaccataaaggtgctatgtacgattttgggtgtagagaaaatattttgatgtggttaaagaggtgccaaagaccaagtgcaaagaagaaaaagcccggtaaaatgtgacccaccaatgttcccatgttgaagctttggaggttgagattatggagggtcctataaatatacttggggaaaactattgaaatgaaaatgactataagagttgatgagctgagagattatgccatttcttgattttgcttcaagaatgatgatgcttatgtctggtcatgtagtaaggcaagtgagaagacacgattcgatttttatatttgtcaaacatcgatctcaaagtaacttgcaagtttaggctaacgaccttacgtgtatgtttacgttatcatatctttgtggcctttcctatatgagcttaggcttttttgggcctctcatttctggtagacttcagtttggtttttcatgtaacacaatttagagaaacaaaaaccgatatggcacggaaaactttgataaaataatgaagaacccaattgatgtatgttataagaacatacgatttttttttttgttaacttgtaaatccagtagctcatcaactcacacatgcatgctactagatttacattcgtgtagaacaaaaaaataatttttaaaagaaaaaatattaaggaaagacaagacaagcaaatattcatgaaaacaaggatttggaaaataaatatcaataacaacttactatttttggtttataactattattctatatatagagtatttatatgtgttaagagagtttaaagtgtcaaataaaacaaagagacaaaaaaggactagtgggaggagcaaatcgaagaagacatatgttgtcttcttgatttagtttgaaaaccctagcacaccattcattttttggttaatcaggaaaatattcatccctttagtacacaaacctatctttatttgaaaagcgttacttatcaattagtaagaatagcaattttttctaagctacgatccaaaagttccagaaatttttagataattcttctctaataattcaagcgatccaagtagaaccatagctgaagaatagcacccaaataaaataattcttagaccacacacctaccttctactttaaaaatttatgttgtttaaatatacgaataatgacgagacattaccccctttagtttagctttatttgcttttaaattcaaaagcaataactataagttttaagggcccaattattaatacagaattacgaacacccatatgatcatatccacgtggtctcgaccgaccacttcaaaaaccaaaaagccctgaaatattttaatctattaataacgtaaaatataacacccattcaa

SEQ ID NO: 1453 - DNA, 84334 bp, Arabidopsis thaliana
ccagcacattgatatcttatcgaataacctttccacttccatgtcctgcaaatacccacatttcgtcaatccacggattttaatcagaaaccaagaaagaccagtccaatcgttagctataagtttatatacatagattgcagaagaaacaggaaggtgatattacaaggttcgaacttgtagctcttcagaagaagcttcgtccgtgacggaagaacatgagacggacacaattcccctcttagtcggagatcttacgattgcggtcgaaattgattgtcggagaaaatgggtttcgctgaaactgataatcgaagagttcttgacacggaacagcgacgggaattcgaagttggtaaagggtagagctgcaaaaatgctagtcttcgccatgaattttcggcgtggttccgtgatgagtgaggactgtaatataagtcaaaccaggttttgaagttgttacgaggacaagtgttacgatttggaccaaccgctgttttccttaatcatgaccacgtcattgcattcaagcctgttgttgcttgcttataaaggttgtcaatactcaaaactagtaatcaatttttattattttcttttctttatttgcaaaatgagaagattggcattgtgattatcattttgagcctaccaatgttaatgtgagtggtgtgagcgtaagagatgactgagaaagtaagtttaggagcacaagaagggtgttgttttttgcccctaatatcatatagtacatgccaagaatagacatcatatacacactgctctttcactatagtaatatgtaatcaaactaaaaaactcgaagtcctaaaaactgagaagcaaattgacaaagcaaatgttgtgctgtggtgtgcgctgtcttcttcagcctattaccttgagtttgtgtcatcggaaggccatatcacggtctccatcaggcgttcacgcatcaacgccaagttttcatccgatatttcctggtatatcttcccatggtcgcatttctacacaacaaactatacaatattaacttttgagtcttttctggttcccatggcaggaagggaaaaacacataaaccaaaactggagcgagatatagcaagcgattttaccttgatccatttgccatacaagtgaagacgcgtgatcatcactctttctgcaagctcctgactctcctacaagtagttaagacaaaaaaaatcaaactcaattgtctgtgtttaaataccaagctctaaacaaggttgaatcaaacataatttatcacaacacagtgtgattgtaataagaacaaatctatggaactgctatctctgttgcaatacaccaaatcagagacaagtcttataaacttcagccctcactaactgctcattaaccaactcaccacagctacaatctgctacattcagtcctcggctagttatagtataccagctgaacttgttcaactagacctaatgcatcttacagatgatgcttgttcatgtgagatataaactaaacttgtttaccttgccgagggcacggaggaaacgtttgccatccgtcggtctgtttgttatgatatgactgttttacaacaaaggagaaacataattaagaccacaaggcaaaaatgatcggagtaaagtgtttttgttaaatctaatcctatacagaactttaatcaaatgataaagcataagaaacttacttatagaaccaagtgtattgaggaggattcatttcgtacagctgatgaagaaccgtcctcacagctttgtatgtaaaataattaacaatttgctacaaaatcgaaagccagccatccataataaggttattgccaaaggtcaaatctttgtctatgaaaacaagggttcatgcaaaagttctctcaccttttgtacatcaccgaaggtatcgtcgtaattaccagcaacatcctcattcacaatcaagagctttttgctctttcgattcgcaattctcgatacacgcttcggagaaagcctaaaaacaatgcgtgagccagtgaaagagcttcctaattccagatttcttgctttgccaaggatcttcttcctcctgatggtacccgtcgtgtgagcatccagacataaacatggactgctcgaagagtccatcaccggtgagccaacaacaaaccaagcactcaccattactccaaaccaaacagcaagatcaagacttttcccaccagaaattaccaaacagttcgtagattcccttagatcgattgtaagaatcagtgggaaaagaatatggaagataaaaccctgaccctggtttgttatagcaaaacagaaaacaagaattgggtctgtaagatggaaaatggccgttgaatcttagccagtcaaaatcagggacttgtgatatttatttatttttcctagcaagcagaggcaaaggcaaagacaaacaagaaaagcaccgggtgggctttcgggtttacgtggacgcctccctaaaataaggtgtatttcttgtcgtcttgcagcttgtaagttagaaaaaacatgggagaattgcagaatcacgagaaagtcttcaaaatcacgagttcgggcatcggtctaaaatgcttatgaatccaaggcataatcaaaggccggatttttttggttaccaatggagaaaataagtttgctataagactctcggccatcttgttcggcatatctcagccaccatgactctcgaatcagtagttcaaaaccattccactatcacatcaacaaggacatcaatgtacatcaaggcttgtgctcagccctttccttcatcacagccactaaaacccttacggtcaccgagaatgatcaagttctcaagcagatcattccgaacttgaatgtattcttagtataatctggtaagagtcaaacagatcaagttctcaagcagatcaccttctaatgtaatatatgaaacaacctatcagctcttagaatgcatcttccattcgttatgccatacatgatacaacaactagtagtaaggagcttaacggccacacagtctaactatggtggtgaggaacgaactcggggacatttagtcatgagatacaacattttcgtggaaaccagttttaacaagacgtacataatggatatatcgacatttcataccaagtcttacagaaaagacttgtctagttattgtatgtatatgtacaaacatgacttagagactcaactctatctgcgtgttgtcgcagactctgtgactgccaagagtgttttactcggtgattaacatttccgcttcatccatcattccttgccctttctgagaaaaacaaaagcttctgttaattgcaggtaccaccaattccctacaaaccagcctgaatcactttcgcgagttggctggtttgaaaggatctaaggcaatgaccatttcaagaaccagacaaaaaccatcaaagatcggaaaacatttgctagaggcttgtacaactgacattgcaagaaatgcagaatgacctactttagtattataaacaaacagcattccacttttctcagctacgcattaagctatcactacgaactaaaagaacaaaagagaaccaaacagaggaaaaaactctgctactatcagtttcaactttcaatgatgtatgtccctcaaaaaccagcaatgtgaaagcattaaatacagtttcttttcacaagtcttagatagataaatttcaaccctttctcaagcttagtctgattctccaaagactttgcttttaagccttctgtggttcaattttgagaaagctgccatgttcatgttgttcctcagtcaatgtgtaaattgcattcaacagatatatattatatgtacccacgcatttacccataatcaatgcctaatgaaatgaagaaacaatctacaaatccaacaatggtcagtgcaacttgaacccagaaactcagagattccagaatctatcagtatctcctataaatcctcaagaacccttaaagcccagaaatatcttcaatcatatcaaccaaatttacggccccaaaaacgcaaagatctaatctttacctcgagaaaactcttccatgaatctccacaagagccagagacaccattatcgtgacaagaatgtatagtcttaaactggtcaatatcaagcttcttattgataaagccaactttgaagtagattgaatcagaaggtggaagatcgaccttgatctcatcgacatcgagccaaataaagaatttcttcacctgaatacccttgagctcggtgattgaaccgtaaccgatacgaccagatatggtcttatcgtagtgaacgaggtagtcaaattcaatctcacaggaattgggcaagtgaacgacgaatcggccatcgtcggagagggtgaaatcggtgacggtgtccggtaagagaccgcttgggagaccgtactttgggaggagttcgtaaacggtggaaatcgaatccgggtcgggttcgttgagggaatgggtcgtcgtagtgaagagggtcaaagagaagatgaagattgagatgaagaaaggataaagggccatactttgtttgaggatagagagagagagagaagacttctgagattgattgattttgtagagaatcgtttttgagattagtttgactcttttttttagacctaagaaaattgtagacgtaattgccacgtctcatctaaaatttagtggtcgtttacaataattacacaatatgtttttataatatatacaaatgatcaagcttctctgaattggaaataagaaaacattataagaaaattggtagtttttagtgggaatgattttcaaactagtggctcgactccattttgtgactcagcatcatgaacttcagtcatggtgatcatgatctccatgtttttggattaatcctttgttcgaagctgagagtattcaattttctcaccgtagatcctttgcaaaaatatgtaaaaccacattgcaaagatggttatgatcacaagaaaccagctgaattggatattaaccaatgatattgctctatgaagagctttgacgtctgagcatctaatggtgtgtttaccctcttcaatgtgaaggaaacaatccttgggaactaaacttggcgtccaaagcatgcaagccattgacataagccatattccttggaaggaaacactaagtgaccgaacaaaactcaatatgaagctacttggtaaggcgattcccaagagtgttgtgaccaaggagacgaaaactacgagttggagcaataaatggtagtggccctcaacgcctgtgtggtctgacgagtggaaatggaagaggaagagttgttgggcgaaggcgagggccgcgatcaagttgatgagggatcgatgagctattggtcttgttttatcaaagacgatggcgaaagctgcataggtgatgaaggtgaaggagatgcaagagtgttcaaagttatggagatggtttgatgggatggttccatcattgggatcaaatggttggtgattcttttggccaaggaagagttcgacagaaatggaaagtgaggaggctataatgatcacaagaggctctaaatatcttggtttcgataaggggaaccataaaggtgctatgtacgattttgggtgtagagaaaatattttgatgtggttaaagaggtgccaaagaccaagtgcaaagaagaaaaagcccggtaaaatgtgacccaccaatgttcccatgttgaagctttggaggttgagattatggagggtcctataaatatacttggggaaaactattgaaatgaaaatgactataagagttgatgagctgagagattatgccatttcttgattttgcttcaagaatgatgatgcttatgtctggtcatgtagtaaggcaagtgagaagacacgattcgatttttatatttgtcaaacatcgatctcaaagtaacttgcaagtttaggctaacgaccttacgtgtatgtttacgttatcatatctttgtggcctttcctatatgagcttaggcttttttgggcctctcatttctggtagacttcagtttggtttttcatgtaacacaatttagagaaacaaaaaccgatatggcacggaaaactttgataaaataatgaagaacccaattgatgtatgttataagaacatacgatttttttttttgttaacttgtaaatccagtagctcatcaactcacacatgcatgctactagatttacattcgtgtagaacaaaaaaataatttttaaaagaaaaaatattaaggaaagacaagacaagcaaatattcatgaaaacaaggatttggaaaataaatatcaataacaacttactatttttggtttataactattattctatatatagagtatttatatgtgttaagagagtttaaagtgtcaaataaaacaaagagacaaaaaaggactagtgggaggagcaaatcgaagaagacatatgttgtcttcttgatttagtttgaaaaccctagcacaccattcattttttggttaatcaggaaaatattcatccctttagtacacaaacctatctttatttgaaaagcgttacttatcaattagtaagaatagcaattttttctaagctacgatccaaaagttccagaaatttttagataattcttctctaataattcaagcgatccaagtagaaccatagctgaagaatagcacccaaataaaataattcttagaccacacacctaccttctactttaaaaatttatgttgtttaaatatacgaataatgacgagacattaccccctttagtttagctttatttgcttttaaattcaaaagcaataactataagttttaagggcccaattattaatacagaattacgaacacccatatgatcatatccacgtggtctcgaccgaccacttcaaaaaccaaaaagccctgaaatattttaatctattaataacgtaaaatataacacccattcaaagcatactcttttcttctctccaaagataatctacacttctttatatatgtacacacacacatatagagacatctagatttcacttacacattctaaaacacctagacctttatcaaaaccagagaagaccaagaagaaggcatggctagatcaccatactatggttcatcttacttagactacctctctctcccaaacccacatctctgtttcctcttcatcgtcgtcttcttcgtgttgtccttcacatggtacttgaacttcgagtccatcatcgaagacaccctggaccacctcaagctcgtctttatattcacccctctcttcctcctcctcctcgtccactttttctccggtggcctctccttctacgtcccctggcctgaacaagactccattcaccgtgctggttcttccccttggggcgtagcagccgtgctcgtgctcatattgttcatggtttcgtaccagtcagatttccaggagaggtggttcccgtttggggctaagtagatcaatcaaagtttatgatgaccagctttagttattctctagctatatatggaacatccatgtaaaatatcaaagtacctgagtaatctggtaataatagattattatatgtatttttcttaactttagtctttcatgtgaacttaaattaaatatgtgtaggaatgaaacttttttcgaaggtcttataaagagatttgtatatgtacgtagatgaagttgtctcagcgtatgtttttcttttatttgttacatttcttttggaaaatgagatggactgagacttttggatacaacagaaaagtttgatggatgaatattggatggctaaaatgaattactatgtgcaatagaagtgaatatggtgcgtaatgtgtgtatattgacttagacaacgagtggtagtagtggtttttcttgtcttcttttgacaagtgggggtttgttattgtctatgtaatattttccggagttttccaccattttttttttttgctaagaaattgcaacaccttttgcgtccaagtgcacttctactggaagtagtaaaaaatactaatttcctagaattcaatgaattgtagtgcttttgtttgagcatctctagctagttttggctccctgaagtcgctactaatttcctaaagcttctgtctagtttcaatcttattttgcattattttaattatttatagaaatagtaatctaattttgaagaatctaaattatataatagttaccaaaatgttataatctttgattttaaagtttgtttctgaggagaaaaaagataccgacgtgttttggttacattcccaccactcgtttataaagttaggggtagattctagagtctgataaaatactccagattgaaagcgacattgtcccactaaaattttgccaaattttcaaatcttccttgctaaatgatagaaatggctaaattaatcataatcaaagagctgaaaaatcagagaggcaacgacaattggagagtcaactatcctctagattcgaatactaaatgaaagaaatgagtctttttccatcttctcgttcacactcaactttgggccctttgacgccacttttctcaggtcctttcagggtttatttggtgctggaaattgatattggctgttagggtaaatctttagttaaaattccttttggtagctagtatcgattcgtaataaagtgtcattggatcttaacatatgcgaaattcaaaacaaattttaatgaaaatttcagtgacttttttccactacttgactcacatttggtttcccattttatttaaacttggatctaatcacttgtgtggtacattggccggggaaaaaaaacatacgttaatgaagtggaagttatagaatattgagtcgagacatcttcaaaaaatttagataggaattacgaactaactcatcgagggaggtaataaaatttacctttttgaatcggtcaagcgacatgcctcataatattgatatattcttcttttcttccgtatataagaacagtaatgccgttgaatcagtctaatgaaccataggtgggagttgaatcctcattggtggactaataataatttcagacatgatagtggattttttcaaaaagaaaaatattatataagatttacaattacaagtaacaatggcatgcttaacagtaaataaaatcaaaagaagaaaaacaattaattgtggagaagcacaaactaaagaacacttatttcatgaataacaataagttacgtttgatcatttaaccatgcaaaacttattaattgacgcgtctgcagtctctacgtatctctccctcacgtcctgtgagaatcctcacatttcccatcttgatcattgatctcgcaaaatttgtaaagaactcattttggttctcagcaaaacgattcaccaaagacacagtaggcgctcctgtcgaagagaacaagatttgatctgattcaatcactccgcggttgttttgaaggttcttgaaatagtcgttatcaaatgagtcggggctcgtaggatcaagattcgcccttgcggtgagatctccgccttgcgggcattgtcgtcgtaacgtttgcaagaactccggttcgatacttgggtcggactgtccgctgttaccactaaagttgtgtagacgattgtttatcactccacactgaaccctcccgaaggtatgagcacctaaatacgtacattatatgtattatgattcatagtaccttaagatatttctaagatgacctatgacaaaattaaactaaacaaatattaagatgcgtaagtacaataccagataaagcgacgagatcggtagtgtcaagattatgtacggagaatttggaagtaagaatctcgagagaatcaggtcctagtggaagtgcagccactgcgtccgcacggatcgctgtccggccatctctccttcctagcaatacgtccaatgacggccctcccgccttaaatgatatcaaataaataaaaacattagagtatgaatttttacggtatattactataatgttttcataatattttttctcaatttgaatgctgtggtaacagagatttggttatgattatgtttccattggttaaaaaaggtatctgaaagcacataaatttaaagaatgatgttattaccagtgcaacagagatttcagctgcgatagcgaggatatcagcacaagagacaactccgggacaaacattctcgagggcggttttgatatcatcgatcacttcgaatccatcaagagaacccgcgttttggaaagcctccttttcaccctctaccccatccgctggagcagcgtccaatagtaccgaaccatcgcacccctgtgttcacaaactatgacttcaatattttatgcatatctaacttttcaaattaaagaaacctaattccactaacaaaataaacctaattatgttttcttgacgaagactctatacttttcttagttaacgattagcgaaggaaaaaaaaggagatattttaatttgggttaagaaagaccgttactttctccatatgaaaccattaattaagacagaatctatagtcaaacatatatataatcaaacatcaaaaagaaattaacgtcaaatttgtccttgaaaaatgattccactaatgcaaactctaattttaatgttgcttttgtttgaaatccactttttggtcaaacaacgagtatgaactattattaatccccattaaacctaaagtaaagtcatgtttagttatattcattcataaatatatgctggtttggattcaagatgaatcataagatcacatggactgatgcacattaaacgattggtttcattactaaaccaaaaccaatcacaaacatatggtattgagtagaaatatatcttacgttcacgaaacagtcatgaaagtgaagacgcatgactttagcagtgagtctgacgtcgttacggcttgctcgctcgatcagtccccgagcaatggctgtgacgttagggcatgtcgtggagtaaaaatcagaggtaagctgagcgttactcaaaaccccaaacatcaaaatcgggagtaacactaagggaatagttttgcttagacccatttttggtctccctttgtttgtaaaagtgagggatagaaagaagaagcttattagaggagttgatgctaaaatgaaagactttcgtagccttttatagagagcttatacctaatgtttgaagaaaattctacatgtaccaggaaaaatacaaaacatttcagttcaattcgtctagacttttacttttctttttgaaggacacgaaaaatcataatataatgataagcattctattaagttactaaaatttgcttctttttgttttggaaaaattcatcagtggtcataaattaatcaattcttcatttgcaagttactaaaatttgttgcatttgtaaactatacatacaacgactctaaaatttagtatccactaagcgaacataaaacatgtgtgtatatgtgtcttttcctaatcacaatatttactgtagtctaactgagaaaaaatggatattgttcaagaatataaaaggctgagagcaatctctataagtttcgcaacctacaaaatccattcgttcaaatataaaaatgtatattacatacatttttttcttaaaccaaagatacaataatatattacagtttttctgtaaatccaatcatcaaactagcctagttattttaaaaatgtatatctatatatatatatatatatatatttatgtcaatgtatgtcgtcatggatgaaagaaaataactacagctgattaaaaaagacaaaagaagctcgtaacggcatgttgaataattaaatagcaaagctagaattgacttgaagaaaattaggtatgtactatcgtaatactcgatcgatgagtaaaaaaatacatgtgttttgaccttgttttgttgcatatatatctaacatgcaaatatgtaactgtcattttgaaacgtaaatatatgaatgcttcataacagctgttttgtcacttatctagataaacatattttcatgttcatatttagctaattcacctcagatacaaatacagtagtcagtagatagaaactcagatcgtatacaaagttcaaattttaaatattgtcttttacttgtagtcgttgctctgaaattgattgaaatgaattttaagtaaacgatcgagttaatcaaattcatgtttataattaaaaagtattaatgaaaaatcagttaattaaagaaaacaaaaactaacttacgtcaacactaattatgaattacttgttggaatcgcataatgcttactattcctttccgcgtaaatttgaaactgtcgtattcaagccatcgtaatagagtcagttttgttgacaaaaaaaatgattaatcggagtcagctgtctcaaaacaattggacggggtcgttttcatatgcgcacaaagattccttgcgttccataaaaactagaagtatataaaactttttcttttcctttccttattttggtttcaggctttcagctaattattaccggcggtcgatattttgttccattatattgattgattaatattggtttcatcttcttattcgaaagaatcaaagaagtgctgcaactacatatccccttggttgtaaatattttggatatatatccttaaaaaactaacaaagcaaccctttaacaaccctaacaaagtaatttttcttaatccaagaaaatcacatacgacgctatttcaaaattaataacaatggaagcttctatatattgtgcttgcattattatgatcataaattttaggagtttcgaatccatttttttggtttgaaatccacatgttttggtttacaacacacttgtttaattttaaaatcaatgaaaatttccaggtttaccaaatcacttttaattaggcaaaccaacaaaccccattaattcttattattacacacgtgatcattctgatacacacgagaccgatcaactcccaaacattacataaactcgaaaacacacacacatgctaattattgataaccctgcagtttgtcctaacctccccactagctccattcgaaatgtttcccattctgatcatcgcacatgtgaagtccctgaaaaacaagctctggctccgactataagcctccactagtttctttgtggtgttcacggctaagtcactcgagaacagaatctgatcagaactcaaaagaccttttccttcaagcaggttcttgaaataattgttgtcgaaggtgtccgtagtgctcctgtcaagaggtgctgttatgttactatttcctccgagcggacaaactgtttgcagattagacaagagtgatgtctcaagtgttgcgtcgggatttcccaagccggtaaagttgaacagacggttgctgaagacagcacacttcgcttgtccaaaggtgtgagctcctttgtaatgaaaaagggcttacataagtgataagtacttagaataaaagaataccaactaaggtttgaagaaactagttaaacctgataaagctacgacgtcggtgatgttaaggtttacggctacaaatttggcgataatggcgtctaaaggttcaaaaggagatggtagattgtttgcactgttctgatttgccaccaatccatcttttcttcctaatgccactctccacccaggccctccactctacaaatttaaacccgttataggcgacataatatcgaatagatataatccaggttaatttaattccgagagtatacatgtgtaagttatagacgaaggaagatatataattacaatattataatagaatatataatcatttgtaaaaacataatcattttgtttgttactataaatagtcaccacctaattcatattataaatagttgttgtatgaaaattagtaaaatctcgagaatttctctgaaaataaagtaaatatattaaggctttgatggttgttaaatggggacaaaagggctagcttaccaatacaacggagtcacgagcggccaaagtgaggatatcagcacaagaaacaacaccaggacatgcgttttccacagcggctttgattgtatcaattacttcaaatcctctagcagagttaatgtttgggatcgcgagtttctcgctgtcagctccatccaacaataacgacgcatcacacccctgaaaagttcgagttacgttttaggaaacttatgaaaagtgtttggaacattattttgtaacaacatcctataacctataaaattctataatagaaaaaaacacgtaaagataacaaatacatacattaacaaagcagtcgtggaaatgaagacgaatgagagaagcagccatccgtatctcggccttcagggcgatggcaacttgtttacggacaatttgaactagattggggcacgatttagcataaatgtcagggcttagctgtgccctaacccctgaacaaagcatacaaagagtgaaaacagtaagcaagacatgtcctcccatcactttggtttgtgttttcattatctagatagcttgtttaaaagacttactaaagagatagtttattattacttagaaagaattggagttctatttatagagaaaactagatagtaacgatcgatatcaagggtttaattgtgcttctgccagtgggctattaagagaatgattagtgcatagtgacgtgtggcggctttgaaagattgatttcttatgctcaagaggatgcattaaactccatattattataattcatgtaagattaggcactaagagccatttacgttcatagattcatgaatttctatcttgttatttagtaagttggccggtttgatctacttacgtttaatccactaaaacaagtgactgtgtttactagctaacatcatgtagtcaactttgtttcaatagtgttgtattttaatgtattttgagaacgcaagtggatttggtataaatcaactctccccactcgtatgtaattaaagcatgcaattgagtttcatttttttcttttactatgaaaaatttggactattaattttctatatgtacttgtacatgcgcatgtaaaaattgttaacaaattatttatgtcattctttccacacttctctaattgcatgacttatccaaaacaacgtatctagacacattctgccgatatgaaaatattatcaacagttttttttattttattttttttataaaaagttatgcatgtttagttttttacgaatttgataaatgacttactaaaatcccaattaatatcatatttctgaaaatcagtgtgtttttttgtttgtaaaccatatttgactactctacttgcacatttaaattttgtgaaacttgattgttaattaagaacgcaaaatggcgaatggataacatcatattttcgtaaaaaaaaccaaaagaacatgtatatctctgaatttcggaaaacaatcttaatggtagattccacgtaatagttagtctcttgtgttcttacttcctcctcgaactttgcaacttgcggcgattttttaataatttgttagtttacaaagtgcatagtccaaaagacccaaaacgttccaattcctcgtgttcttagcattatcggcatgcgatataaaaatacatataccacagtcttaccacatgtattttaattatctgtattcttaattcgtatgtcaacgtcgcatacttgtgtaaattccacgttcgatccctctagagcattttgtatcaccaaatcgtagttaagagatatttttaaaggttcagaaaaccagactaactaaagtacaaagtttttcataaaaattacgtaaaatcaaagaaagagagaaagaagaatctcgtatgataatcttttcaaaattgttgaatttggtaaaagaaagtttattaaacatgtatacatatacattaaatccttggttcttgagtttcatataaaaatagatatttttcaatgttgttgtttttttcagatacaaaaaaactcgatcacagttttcttgattttttgttttaatattcacacaaacgcttcattgactaaatcgacttttacaacgattggaatcgatcgatccacatagaacttacaacaactgaaattagagaagatttgaataagagaaaagcaacgtaaattagattaagagacttcaataactgatagaaattccgattattcattgaaacatccgttcttcaggcagtgtgtcataactcataagatggttcacctttacacttgacattgagaagcaatctaaacctacaggctacacaaaataaaacaatggttaacaaattgttattagaatgcaatatattttcaaattataccatcgtaaataactaaatattcttatatgttacatgttcaaaactgaaattggcgaattattaaacttgagtttagtgaattattaattcctgtgatattattaaaaagaaaatatgatgaatgttattcatttattacaagcaatatgtcgcatcactattaattacctaatcttaattaactctatagagatctaatgattcggttattctatttttattattagtatcgtggaccttaaataactcaacccactaacccatccgggcccaaacttggtgggcctaattgtttctcagaggcaatccaagaatctgaatccaaccaaataaggacatcattcattcggctctgagattctcttaaagctctctgcaactgtctcaaaccaagacaaagatattacgcttaatactactaaagtgaagcatccaaatgcattaaaaaaagaaacataaaactctatcacccataagttttttcactacaatgaaccctgttttactacaatccattatcatcaacaagatgtaccagaaaagaaaaaaaacaagcttaccatgacttcatatgaacttctccgtgaaagcgagcctcctaaactctggtaccaaaagcggtcagagaactagactacacctactaagacaagtacattttgacatatacatcatagagctgctgcagatatccatcactgacgcctgtgcatacaagagacttacattatttcaaagtgaaactcgtatgcattcaacttttgcatcaccagttagttaaccactgcctatcatcatgggttctcgtctgcttccctccttggtccaggtatcatatggtcgctcattgttttccagcagaatcattctcagacgcatcttcaagcttctcaattgccatttcattttccttactttgatccataccaaccacaccttggttgtcttcctcacattgttcccctgaaacttcccgaaactctgtctcagctttttccttaccttcaggtttactttccccagaacttcccacaccaaccgattgtttgttcgctttcacttcatccacgctcttgctgttattgttgttttccttcaccacagcctcattatcccttgccgcaacatcctgcatacaaacatcttctgcagctacatggttctcctttgtttcaccactagtacgagcatcagatccccctgtatcatcaccatcactttcagactcattctccacaacctcctcgttagcatcttgagcaaccatatcccgcctctcgagatactgtaatcttctcctcatgtcacctaactccctttccatcaaaaacaacctttccttcaaagttaaattctcttcctccagttgagcaatatggctatcctgatcatccactcggttttccaaaacattgttatactcagaaccaccataattcggataaatcatctcaaaccgactcaaatcatgatccaatctcctctcaacctcaacatgctcctccacatcactctcactcgaccctccttcatcttcatcatcctcctcataaggttccaactcattcccatcagctctcagcctaatcagccctttcatagagccataaccatcaaccccccactcctccttcgccatatcacccaacacctccctagacggcgagaacattggcgtaggcaacaccgccggtgtcacagggcatggagacaccaactcagcaattccaccagatttcttcgccctgataataaacgaagtcgtgttcctcggcgcataaggaacatatcggttaccatacttcttcttcggataaaacttcctcgtctttaacctattctgagactgcagctcattcaaagtcggcggcttgtaaccaccagcaccaacctgaatactaccagaaccaggaagttgctgagggttatacataggaatcccagagttatgcatcctcctaatttgctgctgctgctgctccatcattggcctcttgtcacttgtaatcttcttccctttccaattgttccgactcattttcgaaccaaagttattaggagcaagattctgctgatactcggaactcaaactctggttaaggttaaagttgcgtggattcatcatcattggctgattgctgttcatcataacctgtggtggctgctgattcattcccataatcggatgagattggcctaataacggactctggttcataatccgtggtacctgtgacggcggcggcggattcatcctctgttgcggtggaggctgaccaatcatctgctgtggaggtggcggattcatcagcttagattgatcgttcatctaggtgacacaaacactaatttcgaaacaaaaaccctaattttcgcaaatctcaaatcaaaagtcgaagcaagtcgatagatagatcaatggacaagagattaatctgagtgctgacgagtggaatttttacaaaacaaaccacagatcaaacaaaaaaaaaattacagacagatcaaacaaaaaagccaacaagagaaacactaggattgggatttttcgtaattagaattttgtttgttaagtttttaagatgaagttttaggagtttgagaatctttgttgtaattttggatctggaaactttttttttttggtttgggcagaagaaaaataaattaaaggcaaagagaacctctgtgtacgaacggcagaagagatgatgagattctttaaatagaggcgacgaaaagatgccaagtcctaatcaacgatggagatgcgacacgtttaaaccgacggctgagattatgtttatatttaaagggtagagtcggttacggttttctttgatattattattattattagttagaaatattttaaatcataaacctaatcacttgataatttggcaaaatattattcaacctttttctgctaaagttaatttaactttaatatcaaaattcatatttggacgttctactttaggtaactatgttttttgcctctttttttctcttgatgatggtattttaattataattttagagaaaagtggactatttccaaaatttggttttgattgcaatcacacattagccccaaaatttggactatattaacaaacctccctataattaatcattcaatggagaagaatctcaacattttaaggtatcaaagtcatttctaatccataagtgttcatgttcttcttttattcatatccttgagttatgctattttcttctcctttcttgaaccgtgagttacgttatacgagtttcatcacatatcaagtttcgtataccatggtccatagcacactctgtcatgtttgggtcttctaactgttgtcaaagatacgtcaaagagtcatttcgtacaatttccaccaacaagtgcaacatggaaaccccactcctaattaatgttttaccggcagaagcaatctctgccaaggacaaatgtttggcattcccataatttttcctattgcttctaagcttctcaaaaaaaataaagtgttgcaattgtcaagatcgataggaacaaagataaagactgatactgattgggggttgttgtatatcatagacaaagattgaacaccatatatgacaacttccataaacggcctatgacacggaatgagtaataccgagtttccaacatttttgtaacctgagtcaagtaggcttccctcctaggacatggaggaaaccatatctgacgactgacgccatggtgtatgcttcagggcaggaaatgcttatatacccttcctgacattatatgactcacatattagagtgttgctttttttcgtaacacatttgcagtcatcttaaaaacacacacaaaatggtcatcattatcaagaagaagaaaggagcacatactttctcttcctacgatcaattccagtagcacccatattcctagtgtcattcttagaaagcatattattgtactgcattggagaaagggctggagagagagcagcagttgcagatggtgcaggtggcaaagaagttgaaggtgcaactggtggttgtggaggtacaggctctggaagaggccgaggtagaatgtgcttcagtctgttgtttctgtagttcttccaatagtaaaactgttgtctatgcgccaattcctggaaaaatccagattcaaccgaagacaaagttcaaaacttaagaaaacttcaacaacaatagatttcctataagaaattctgacaaaggacataaagtttagaatattaaacaactttctctatctcatgaatagatgggcataaacgcagaatcacagaaccaaactagcagaacgtaagcaaggttttgtactagagagaccctaaactctacaagtccccaaaacacattccaaaaacaccagtaccctaacattttgaaccactccctattcacaatgctcactaacatgctgatttcacttgatgattcatatcgtattcttgtaccttgtttgcaggatgagccatagcagtcctgaagttggggttttgaagaagttcaaggaaatataggcagtgtgggtacctgtaacaagaacataggaaaccaaagatatattatccaaaccttcacaagactctacaagactacaccaattccataagatattccaacttacataatgaacttgatgtactctggtcgctgccagtattgaagatacttcaagtatccaataaatgcttcatcttcaaaataccgattctgtgccaggtctgccaaacagtaaccaaaagcagaatgtggtaagtacaaaccctaagccttagaacaaatccctttttaaatctcaatttcgaacactaaaaccctaagccatagaacgaattctaaacttacagtggatgtaagtaggattggcgagacattgaataaattcaagttccagtaagaatcgttgccttccaccgtcgggatccttgtaagtgttttttggcctgtagagatgcgaattagataataaaagagcagatttgaagaatatgaaagtgtacaagaggaagaagatgcactcacggggatggaatttctgatgcatcatcacccatctcctctggcgaagccatgaacgaacggaacctgaagcaaatttggattctcccaatagaggaatcagacggaggtagacggaggattttggttctgatttctgaattgaattttggttataaaccaaaggcctaaaccggttctgaatgcaaatagaaaaagagattggaaaattagtacaaaattacggtttaagaagcggtctttttttttttttttccacaagaagcggtcttaaaagaaccgttatactcggtagcagatggagaagtctctgcccaaacttggagttactttacattcaaagattcacttggtggcatttttagtcatgttatgaatctctttcttacttatctcaagattatgaatcacaaggacaaatcttgaattttgaaacatggaccggaatctttatgcaatcatacaaaagtttttttgtgaccaatcgatatagatgttgcaactctttgtcatgctaactatggttgaggattatagcagacagaaaatctgaggacatttggctccaatgagttggccctcaaaaatgtatactgtacattgtaatgttgtaatccccgcaaaatgtgacagctaaaaagctagagtttcccacagttaaaaaaaaaaatcaaaagacaagagccatcagaccctggactgacctatgcaactcccaagacagttttcgtatccagcctgcgtgctgtactcagttcttacttgccaatcaacaccttgtgccaacttgccaagacaagttctgtttcagaagttaatggccttcaaattcaggtgatggctttacaagttttcaccatagcttgtgaatcccaattgctaaatctgatgagatggagacgagcagcggataagaagagtgccactcggctttgaacactcttttcttatgagctttcatcgagagagacgggctcggtgcattgtatcggatatcaaagatgtggatcacggggtctgcagaaccagatgagatgtgtaaaccatctggagaccaagactgattaattagagccgactgcgattcactgctttcttgcttccacccaaaagaaaatagttctgtctgaggcaatctaacatcatacaaccgcagttgccggtctagctgcctgcaaacacaacacaagcaaaagaacggactttaaggcaatcgcttcttctgggatatatataaatcaagagtcagttttacctcgtgttaaccatgacaagattaacatctcgcgggtttggcattatatttgtgcatctgttgtctagtctatgtttaaatgtgactttttcttctcgggcatcaaacccaacaaatctcctatcgtctccacatgacaagacgtgattgttatggcgcattccagtaactcccatcacagccgacgaatgcaagtccctatgcagaagcgtcggcttccacgcattattctcacactgatcccgccataacactactgcatggtcactcccacctgtgatgaagcaaggatcatcccaaggcgtaaacatgattctgttgataagacctttgctatgaggcctgtcctccataaattgcgactcacatctctgcagatgaacagatatccaaaaagaaatgagcacataactaacttccccaaggataaaagactataaccatcaagttagatcttacaactagtagataagtcaagggtcgaatcaaattcccaattattccagctatattgatttttttctttctaacaggttatgaagaccaagttaactttctacaagtttaagcacacactccactcatgaatgtccaatcgcaaatttaatatggtaaaacgctagaatgtgctacagcattcatatacttttacctctccagcttcattcagatatatggctgatatctgagggtgaccatcatctgcagtatacacggagaaaagtgcattcttatgtggatgccaagctatatcttctgcccatttcttctgatctactgctacccgattaaccgtcttaaacaaagtagcggtggacctgctcaatggtgaaagcatgatggataggttagtatccaacgaaattcagattaaaatgttcacgaaaataagagtagaaaaaattgtacaaaactctatctcttaagatcatgtacaactaaacgttgcagcttgttgacaaatataagtgaaactaaatttcgcctacttatcacgtggatggatgaaggtgatgtcaactggaactagaaatacataattaaaatttctgatacatatgaaaatcaaggaattctatatggatttgaagttgaataatccaataacccctcctaaaaccatttaaacccccaagaaatcagaaagaaatatcataatcagtagatcaggcatatttacaggagacttacctatcagactgaagcttccagaaatgaacagccccatccaatgcactgaagcataaccaaaaaccaaaatcaagagagggaaaagaaaaagattaagcacatgagtcgagagtatattaggttagctaattgaccaatgactttcttggttccatgattccctcttatgcatataatatcatttccttagtaaaaaatccagacaaagccccaagcgacagttatgagaccgaatttcatccaggagaatggcagataataatttaggtagcatcttctattcacttttggaaaagagaaaaacataaataatgtaaaaaagcaccttgtagcaaatagctcacggttggaaggagaaagagcaagacttctcattcttttcgtgtggcaacttggtagcatgccggcagtacggccttcaattgtgggacgcaaagagcttctacctataagtgctatcaactcatcatgtcctcggaattctgtaaagaacaaaagaaacaatagattcagagcaatgagaaggtaagatgtggcaaatcgaccaaatgaatggcttttaccagatttttcctgttgtccttgttgagaaatgttagaagaaactctgatccttggctttgccaaatccttattagtgtggttatctggagcttgagcaacttcattaggaatactacgagatctcttgtcaagaccacttttgtcttcctttgggacattagaatcccttgtagccatgggctgagctgcgttatctcgaccttgggattccctcaccacttcatcaggaatactccgcaatctcctggcctcagggccacttttatcttcttttggaacatcataacccctcgtagccatgggttgagtttccttatctcgatcttgggtttcccttaccacttcatcaggaatactacgaggtctcttggcctcggggccacatgtgtcttcccttggaatgttataatcccttgtagccatgggttgagcttgggtggtctcatttacttcagctctgacggtagcagaagctcttcgtttaaaagaaggcggtaagataatggatggcaatttcaaggattccatctcactaggtgattgtggagtagagttttcattggcagtcttcgtcttatttccctcgttccagaactctgctataccaagtatacttccagttttaccaggcgcttttggttttgacttagaaaagataccatttccaacacgatcaatttgtaaaaatttagcctccgcatctgccatcagttttctctcttcagcaagctgcagatacatcagaagttttaagaagaagaccaaacagtaagactctcgcttgcacattccaagggaagatatacgcagaacatgagaaaacaaaaagctggaaacttttgagtttctattaggtgtcctttaaaattatcagcaagaagatggcaatgaactccaattgaaacgataacagaaaatcaaaatgggaaaatcctaaaagctgtgaactaacaaatgcaaatgcccaaatcaacaaaactatacaataagctgcatcgaatctgaaaactgcaaatggagattaaatgaaacacaacagaaatcagctacaaaaacaaattgatcaaaggaaacttctgaaattaaacctagacatttgaatactgtagaggtgactgaatatgaaaagctgcaatttgcataaaattgaactcaaattgaaacaagaagagcaactaaaaaccccggagaaacgctactttcagtgaagtacacaataagcgatacagattccaaaatctgaagaacacatcgccgaattagccaaacaaagaaaacgaaaaaaatgaagaagaaagaagagaccttcctatccaaacttgagatttggtctttaaggcgttggattgatttggcacgctggtccataaactctaaaagagcttctctatcatctgggatttgagtcgagaacgttctcgcttctgcttctacttctacttcttccccttgttcaattttaggtttattcatcgccgtcgtagccattgcagactcggttcgtcttcttcccacccttttattcccgcccgatcgtgcgtagtggggattgctttttccctctcgtcttttcaattttggaacctcatgtttttaacttttccggttttgccgcttcacttactagggcttatgtagtcgtgtgcagctcccgtgctctcattgacaaaaccagagtgtgtaaagtgtaaacacagattcgcaaaaattctttgtggaaaaaaaaaaaaaaaaaatcgcgtgtcctttttttttgtttatattaaaaaaaaatcctatagtttattcgagtattgaggtctttgacggaagcacagtgatacatctcttaaacaaaacaacaaatacatgttcagttacattggtagctgtgattattgtactgaacataaaagagactgtgttctatgaacttttttttttttttttttttgatcaaagttttctatgaacttaaaactctcatttcagcatacaacaaaatgaacaatttaagaaataaaatcaaagtatgtttgtataccaaatttggcatgcaaaaggtgaaaatctaaaacagtctagtcaagaaaacaggttggtagcttcatcattcagaaaatgtacacagaagcaatggaagtcagaaaagatgtcaagagtatggagacaaagttcacaccattgttgtcaagaatgtccacacctgaaatcttctttacggttggacccggtttccctacaacctgcaccatgcataaattcagtcaactactcttttccctcgatcctacatatgtatttacatgtatgttcttttagactttaccttgttccggacagagcagaaaccactgaattgaatggttgctcctagtatagaatcaataagactcccacatagtccagctagtgcagagagtggtatgactaagagttgctttagagctacatcacttgcacaactcgcggtaaagagtccgaagataaggaatgttaatccaacagtggtgcctgctgccaaggcagctaagagtcctgcctttgtaactccaccatttgtgcccttcttcaccggctgtgagtgagaccaaacgttaagcgaaacagacaaagttcattagcgacttgcaaaaaaaggaacaggacaaaccttaaacgttgtgattagtcgaggctgggcatcactaagaaccccaagctctgaggaccaagtgtctccattacagcaggcgtaatgaccaatgatcccaccaataagagctgttacaatttctgactgcttcgagtccaaacacttgtccttccaacccgttaaagtacaagcaattacaactagaactgaagcaattccactattgcatagcacttgtaccctgaaacaagatatttgaggaatcttctgtcaaaacaaccttttgttggtcataaataacaacttctgaaagtgaaatcatttgctaatatgtcaatggaaaattaatttcatgttaccgaccaacacgatgttgaaagtaagactaaatgctattcactatagactctcaaagatctagagttcattccccctccttgatcaaagactctcaaagacaattcacaatttcaaaaatcggagcctacaaaaaaacgaagaaagaaagaaaggaaatgtaccagttcctttgtccaccttctttgaactcaacatcaacgcgtctttttttatcttcgccaactttggtaagtttcgaggaagtaagaaagaatacaagcagcagagctccgtacctttcagattcagcagattaatccgatcaaacccgtcgggaaacgattgaaaacaatttctcaacgaaaaagataacagataaaatctcaaaaacaggagaagaaacctgaaaccggcggtgaagtgaatggtcataacgaggaatccagcaattccaccggagagatcgagcgacttccgcttgtacgatcggaaagcgatgagagaagaaatgattacggcgaagataagtctgaattgcggcgacgtttccatttcttccagtggcggagaatctgttgacgacgaagattcagttcagcgtcggggagagggtagttgaccccaacgtcttcactgatttgatgtatttcaagtgttggttacatgttagttacgcaggctcggacctggtctcaaaacatgggcctcaaatgggctgacccaatagatttgctaaaacaaatattaatctaatctagaccatgtagtcgtgggccatttattagatttgcggaatgggacagacgagataacgcgggagagaatccaatcaccgattgagctatgggccccagtatcgatttctactatgacgtggcaccacttaaatcacaatatccgtattccctctctctctccctttctatctgagcttctctctcttactctctccagagcaacaatggctgcgactgcttcttctcttacaatcgcgtcgtcattctccgaaccacggactcagatccattcctcgagacgtttgaatctccctcttcaatattcaatcccgtacaaggtgttacggagtaggagtagaagattaggactcgtcgtcagttctgtttcagctcccaacgttgagctccgtactggacctgatgatctcatttctaccctcctctctaaggttgtgtaacgatttctgatttgtatacaccgatcttgaggatctgacttagtttggcgcatttatttgaaagtttgtgaattgtgaataggttgcgaatagtgatggaggtgtgacgctaagccctgagcagcacaaggaggtggcacaagtggccggagagcttcaaaagtactgtgtcaaggagcctgtcaaaaatcctctcatttttggaggtaaaagtgtaagaacctagctgccattgcttcttccttggatcaatatgtgaacttgtgggatttggtgcagattgggaagtggtgtactgttctagaccaacctctcctggtggaggctacagaagcgtgataggccgtctcttcttcaaaacgaaagagatgatacaagccatcgatgctcctgatatcgttaggaacaaagtttccattaatgcttttggttttctagacggagacgtctccttgacaggtgactattgcaaaattcacatatgcattcagtctcatcttctcccgtgtttaatcttctcacctttgtgtgatcttatctgtagggaagctgaaagcgttggacagtgagtgggtgcaggtgatatttgagcctccggaaatcaaggttggatctttggagttcaaatacgggttcgaaagcgaagtgaagcttcggatcacatacgttgatgagaaacttaggttgggattgggatctaaaggatcattgttcgtctttagaaggcgtcaataatatatacgtttctccctcgtgcatcaaccaatgcaaatcactacagaaaaaaaggaaacaacatatggggtcctgcgagagtatgatggtcaatatccacaatgctgtgtacacaaatggtgttttagatataactttgttgtaatgtaaacttcattttaagagtgtctcacttcagatgagttgttgaggaagctactggtgaacttcaacatcttttcgcaaagaattactatagcaacaaagaaagataaatgacttagcagcctttatgttcaaattcaaaacctctcacgaaaatctgaaattctgaatcaccctaaaacaaacatgtacagattcagcgctgccacacctgtgagaaccaaagcatacatgagtaataatgctctaaaatatgtaataagatacatgtttactctaaaacatacataaagatatacagatgtaaatgatgaagttttgtttaattaccacaagcctggatgatttcattacaatctacacacgtcctcttccccgtctatgtcctcgccctctaccccttcctcttcctcctcctcttccccttccatggccgaagttatcttctgttcttccgtaatcaaacatattcattctgatatccgctgccccggctccaggcatctcctgcccctatacagaaaattacaataacaaagctcttattgtaaccatttctgtatggatgatcccaaaacacaagtaataagccattgaaagacagataaaaagtgtgctaatcaaaataatgagcatatggaagacgggtcatagggataataaaggttgttgtgactcacataagagtcttccagatcaaactgattctgaagctgccatgcaagatcttcatcgcgggtagtgtcgcttggatggttagctgttggaagagcccccccaccagtattcctcttttcccactcatctagtgtaaatactgcagagtcttcttcttctctccccctccctctacctctacctctacccctacctcttcttccttggtattgcctatcatttgaactagaatgtttcatcttctcaagaagtatctgcgcagccgcttggttctgtaaaggaacagcttccaccactgcaacatgggagatgttatttggcgtatagggatgaacgatagatatctgatatctcatctaaggtttcaacgcaattgccagatgaaaatgccaaactaatttaacgctccttaatgttctttgctgtacaatgagcttttgagacgatgagggaaaaagatgatggcaaaccttgtttaggtcgtgtatcggaactgcttcgcttttcctgattttcaacttcgacagatattttcggatcagaatctgcaggattcctctgtatattcttatttgtgcctcttttgttcccatcaacttcactactttcacctttttctccaccggcatgttttacagagctttctgcagcaataggtacattgtttctagaagtcgtcttgttgtaatctgtcaaccaacaaacatatgctgacaagttaaatttttgatgcattggccaaacttccatcacaatactttatgtaagcccacacaaaggaagaacaattcaatagatcataaattttaccacaatgaaaatgcattcactcaagtttaagtattgaaacaatggagacccaacagcgccaatgttggacacaaagccaagggaaaacatagatcagacctctacatgagtcgtcataggttacataaacggatatattgggattttggagctcgggtcaaattactaatatgtttatgctaaagtgcatttggatggaataagtccttgctgcagtcaatgcatatttatgtacactatcaacatgaaatagaaaatggtagatattttatttggtagcaaagattggccaaccgtttcaaagtgaactaaatatgcaacaaattactagaagaaaactgaatgaaaatgatgagaataagaaaatcctgcttaccgcggtgatgggaacctgttcgaatcttcaactcctcaaatggaggagggccatcaccagctttgctttcctgagatcgagccaaactagcgtattttttcttcatctgccattcttcagtgagtgattgcacataaccgcccaagacagtcacctcttttggagtcaaacatactagaccatcacgtatcacagccttattttctagacgtacctgccaacgagacagtacaaaatatcaacaatacaaaatgatttatgatttgcatatgacaccctctgatgcatgacaaacacatatgtgcactagctttctattgatttagatcttaatccaaactattatatttgcatgagactttcagaaacatagtaaaggagaatttgaattagattgatatggaaatggaactaccttagtaccaggagtgacatcattgttaatcgttggtatatgagagtactcaagcgcggatatttcggtcttcccgtcagtcagagcgaattttagcactcgtttaccagtggaacttcccacaaattcctctgcgctacttcttgtaacatccctaacataacttatctatgctcacaaaagaaaacaaattaacactcaacagcttgaatcaactgcaacaattgagcattctgaaactagtttaaatctaagtatatcagtgagagtgactcattgaattagcgaagacctaatgccaattgttactgactttagctgattgaagcaatgtacctggagaactttggggccttgaagatgagaacacctgcgtaactcggtcgggtccgggagggatttacctccgattaacttaatatccatgttaagcagctccgcctccactgactccacgatggcgcctgttttattgccgccgccgatcaaggaagagatttcagtgaccagggatttcaagtattcgacgtctctgaagcaccagccccgactagttagggcatttatcacgacggtgtgggtgtggtcgccggcggaggagcttgatgttcccaccattgcgttgatgctcttgtcgcgctaaaccaattggggaagacgagattttaatttggagaattgattttgttatggtcaatatcgagttaaactaattactattcactaatgatactttttgcataaaatcgttttgatcaataaagaagaacatttttaacagaaaaactagaaaagtaattcgaaaaagtcctataaaaaaggtattttccggtttcgttttagtgggcctaatggcccatatgtaacacgaagatttctgacagtacgacttctaaagtactttgctttccttgttgaattccgaccaaagtcgataaagagttatgacgatggacgatggtaactccgtctacgtcggcggcctcccttacgacatcaccgaggaggctgtccgtcgcgtcttctccatttacggctccgtcctcaccgttaaggttaattttctcttttcaatatcctgatttaagtttcttaattaggatgattcaaattcgtttcgtgattttgaagttccaatcttattgtatgatcttatagatgataagctttagtagatatctatgtagaaagactgaccaagtgatttagataacatccaattgctagttgatatatcttacatgtgagctggtcagagtgtatattgacatatatgtgtactatttgagaattcagattgtcaatgaccggagtgtaagagggaaatgctatggctttgttacattttcgaaccgtcgatcggctgatgatgctatcgaagatatggatggaaaagtatggttctactgctaaagttttgttcttttgtttatattatcatgtacgtggtgtgtttatattgttgacggtattgagctcgtaatcagagtattggtgggcgtgcagtgcgtgtgaatgatgtgacaacaagaggtggaagaatgaatccaggtccggggcggttacaaccacacggtggttgggatagaagtcctgataggagaagtgatggtaattatgagagggatcggtatagtgataggtctcgagaacgggataggtctcaggataggagaaaagatcatcgctacatagagaaggaaagagcttatgagcattcacatgattttgagaggaggaatgatcatgatatggtagatagaaatggttataaggaaagagttttcgatggtgatgaaggagattggcgtggggataggtcttatgtggataatggtaggggaataaatgggaccagtgctcacgaaggaaggagccaagaaacaaagagagaagataggtaaacttttgttgaaaacaatgcagttgtagacttcacattggatttcaaacttttagtgttcctcctgtttctttgaattgtgacattcgttgttcttgtaaaattggtctgctagtttgaatgagtcaaagactgggatgctagtcttagtcacgccgctaaaccaaatcatccacacctgttgtggttaagtttgataaattatcatcgattttagtgtaatggatttgaggaagtttcttgctcttgttggctttgtgcatgttaccgtttgaggaatgttttggcttgctttggttttgttaacatgtctaaatctttgtgtgttcttgttggattgacagtaccattcttgatggtggacgtggcagagatcacttctctaattcaagtggagatcatcaggtaaagatgattttcttagccatgcagtgtttgcataaattcattttataacttgcaacttctattacaggtgaaagaagatctggaagcgctgattaagatgcgtgaggcgcttcgagatgaggtatgaggtagtttatctgtgcatataggctgttggtagatttattttacataatcacgagtgatccaatgaatttatgggctactttcatttttaaggtgatggtgatggaagagagactggaagtaaaagaagtagtgtgctcagagctacagaagaaatctaaggtatgtgtcttctatatcttacaaccccaaaatgtttgactacagatttgttctcatttgaaatggttaagacagagattagaagatttgttgatcaatgaaaagaaactggtttcacaacgccgaaaagaattggcaaaggtaagcataggttcgattcctgttctaaaagtcggttttgttaggtaatgtttgttgacatttggtctatgtttgtggtagctacataaatcatattcaagggttagagagtgcacggacaacctgaaagactgtgaacaagaactccaggttagtttctaaattttcttattctagtgattgtcattgcataaagattaggcctaatcgaaacaagtgtctattcttttctcgcagttgcttgttaattcagcagctagagaaggcgtggcaggtgctgatgaaggattgggacacgggtatccgtaacacggtcacccgcatgtatgatctgttttgtctaaagtgtagctttgatatgtcttctctttgtgactttccgagtttttttctagtcgagctacactaatttggtacatatttacttgttttggcaagtatgtattcatttcattcgggatgtattattatcatacgaacatgaactaaataattatgttttcaacttgcaactgaaaccaaacaatcaccatacaaagtgtggaagtaaagtctcaaagctttgttagagaagaagtcctagatagtacttggctatagttaaaatattttagtagatgaagttgacaaattaactatttctttttgtaatgtttgctttgttctttactaatataaagatacttggctacagtgaaaatgttataaaaagagagaaaagaatagacagttaaattattaaggttgacacaaccatcatctccaccgtccattactcgtcagccgaatgttttttatttgattaagatgtgaacatcatccattgacctatcgttgcttgtaaagccaagttagccaaccaacactcaaatcatcattatacgtgacgatcttaagaacaaccccatttaggatactctatatgtttgtcttctcatataaatttcattatagtaatattaaggcattatccattattcatatatattcttcaaggcatgtttcgtacatcttatagcaaaccagtagcagtaaatagcataagcaaatgtgttcttcttgtcgcatggctctagtggaattccacgtttctccttcttctcttggtaagccgtattgtcaaatcgacgtggatatatatatgaatattttagttgttttgacaaagatgattattgaaagagtaattaggtcacttcagtaagggaaaatgttaaagttttaggagtcataaagtttatgtgctacaataaggtaattatacttcgtataaatagtagaagaaaaaaactggtatatcaaaacttcatttagtcaaaataggcatgtgcatgatgcaagtgatttagtaggtcatgttcatgcccatatctactttactgtatttttccctaaacctcaagtaaaaaaactggtatatcaaaacttcatttagtcaaaatgtaattaacttttctttgacctaacaagtgaacttaaaaggttattatattcccaccacaaatttatattttgttagatagctagctcttcttctatatatataacctacaacattgaagttgatcctatcaactcaaaaacaccactccaaaaaaatactaagaaatggaaaaaagccaaagatgtaacaaagacacaaacaccaccattggcttttgccttcttccttctgaactcatacaaaacattctattccatctttgtatacctgagatcatccgaatgaaactactcaataagtatgttttgaccacaatctctgaccggagtttcatccgacaactcaacgatggatcacagagagacacgtggattttcgtctacacgaggcgttggcgccgtgacaacggtgtgcttcacggtttctcggaccgatccgtacgttggttcaagattccggtggctgaaatactcgccggggagattcgtcccggcgaagatttgtatttactaactgctagtggtaatttccttctctttgcttctaatactcatagtggaatcatagccgttgatttggtgggcaagatcgttacaagaatcagctcatgtccgttaggtccacgtggaacttcgtcttggagacgatccggtatgaagcttgtgcctgatccatcaaatcctagtcatttccggtttatgttcgctgagatggtcaataaccgaccggttctgtttacttattattctaacacagccacgtggcatactaaagaaacagaggatacaacaaattgggaggttaagaaaaacagtaatgtattattcttaagcttatcaaatcgacctcacgagagtactgtgatgagcgttgacgatggttcgataataaaccggtttccgaggattttgcggccgaggataaaccaagacgcgatcagacaatgcccgtcgagtgttggattcagtaggaacgatctagagagtcagttgttacatatacatggagatgagtacaaagtggttattagattagacagaattgataattcaaagatgaataaagtgatgaagagtttagaggtttgggaaataagctcaaatggtgagaaatgggagttagtgtcaagagcaccaagtgaagtgatcagcaagaagccttgtggtgtgatgatgggatgcttagagaggagattaggggtgattagagtggctctaatgacgaatcatgaaggtctatggaatataatttggttggattatgacaagcataaggataagtgggagtgggttccactacctgattgtagattcttgcaaggctcaaatatggccgggattagtttctcctctggcctcaccttctctttgtaaagtttttaatatttaaatgtcggtatcaatcatacgaccatacatttcctttttgttatatgattgtagggattaataaatgaatttcacgagggacagtgtcatgactcatgcttgatgatttaagtcaaccacggatgcaaactctccaaaaaattattgaatcacgggcttagaagaagacaagtggaatataattggaaaacaaaaaaagtgttttttttatgtattttttcaggtgtatggatcaacctcatatatacctcaaaataagatctttttagctaaaactcagaatgttctgatggttgaagcaatgtcattctaaagaaacaaacaaaacttgtgaaccagcgttgttgtgcacaaagatggagatccagtcagattgcgtccaacacacgacctcaacctttctttagtaaagagtcttttacgctggccacgtggatctgatacacattggtcttgcgtgtaagtcactaggataggtttgcactaataaagtgcacaaacttatgccaagttcacgcagcctataggtcaaattgtaaatatgatatgatgaaaacatactatttcgcctaagtctcatttttctgagtttggcatgtgtgctcgttctcaacacaagcaactctagtgggtataaaagacatctttaaaagctagcttgagaggagaggatgctctttgaacttataagatagcaaaaaggttggccaatttaagagtgtcataatttttcaaagcgtatctgctttgagctaggtatgtatgattaggttttgtggtgatttcatagcttaaaagtcgatgaaagggttacaactatagaatgccgtgacacattcaaatgctctaaatcaaacaaaaaatcaatacatacctggctcaactgtctcgacagttatgtttcaactgaatggatttagtaaactgacaaaattgtaagactacaactactaataggcacacagaacaatccattcctgctactgttctttcacatttgcattatacaacacaacaaaatcttttgtgcatcactaaaatcttgtaacacagagaacagaaattgattttgtataaatggatatgaggataatgtgaaacagggttttacaaaatttaatactatagaggccagaaaccagaaaaaggtattcacttttactagaaacctcgttaaaatgtaaaaaaggctaagatattcaaaaggttacacacctgaaaaggcaggctgcaaaacaatgacacttctctcatacaacagaagctagtttccccggaaccaactgcgtcaactcctcatcttcctctcccttctcgctatctttctcgctgaccttctcaatgggtttatccaatttgacactctgctgataaccaacacctccacagatagtaaaaagaagacaaaccaaaccaacaggagtggcatgcttatcccaaatcaaaacattgatgacaacagtcaagaacttgttaacaacaccagtgactgtaaaagcagtagcagagatagcattcctagcagcaaatccaaagtaactgataaggaaaccaaacacacacgacgcagccacagaagaaaacgcataaggctcaaacaaattccctctattctcactcaacgccgcgaaaacctcggtgaattctccagtaagaaaccagaacaccggtgctatcatcagagacagtagattattgtagagaaccaatccccaaatgttcaatttaatattagagaccatatgcttaatgtaaaccatttcagtagtaatggtaacaagataagccaaagcccatgaataagccgttagagtaaaagacgagtcagttgcaacatacccaacagctccagcgaggataacgacgagagacaaaaacgtaagtctcgaaggtaaaggctgactacgaaacacagtatcagcgatcgcgactaagagcggtgttagagatcggaagacgatgaaagtatcgacattagcgtgacggaggaggtttgtgtttgtgaagatagcgaggtagaagacgatagctgcagggagaaatttcttagcagtgtcccatgtgaatggatcgtgattgattaaccctgatttgccgagaagatagacggcgacggtgcaggttaggtattgaagagctgtgaggagacctgggtagttgaagtatgtgattgctaatttgttgattacggcgaggaggcttgagcagagtgcgtagccgattacgagactgcttgttgttaattgtttgtttgaatcgaatcgagaggacgacattgttttggtttttggtggaggtttttgggagatccagatcggtgaagatgaagaagagaggatttgggatctggatcggattattcagagactaattagaggaaggcgacgacttctctcgtcagtgtcttatcgtacgggacaattttgttagtaatctttttagtcactttgagtttaattgtggtgttaattttggtcaactcaccattaatggaagaatattaaacatattgattttgtctgtgtgtatgtagagaatttttgtttgtttgtagagaaattattgtgtattttggacataaactagtcaatgcactaattaagcaaataattgagattgcatgtagtcattgttgagattcactctcttttagattaacgatatgtgctgaaccaacgcttaaataaacataataaatctaaaattgttgtcatctggctgtacaacacaaagctgtacaaaattttagattaacggatctgattgtttacaataagtcgtataaaaaatttaggtgtacgttttttcggaatattataaagctgtaaaaaagaacggtacgagaaaaccttacaataaaagtgagagtaaaactttttgtaacacttttgataatctttttgtgttttgtataaaaaaaagctatacaaattgtaatactttgtttttattcaccaatcaaagtcgttgatgttgaaacatgttgttgagacatcatgcatcaactacactaaaatgttattcaaatctttgatctagtaataaaacatgtttatgatgtgtattaaagtaagatttaaacgaaaaagaagaagttattaatccgaatgtttcaaagtttcaactatctccctcgacaactctcttcttactcgataaggtgaaacttaaattactaacaagcagaacgttttatctctaagatggttccaacggcttattagccaccagctagagtaagcctgagaaaacgtagactcgaggaaggactctaaacgaactagaaggttaagacaagcaaaaagtaaaataaaaatatttctattgttgagttaatttcctttttattaatttaggtgatatcatataatgcttcgcgtgagggtttctgagattctgatcgacgaaaactaatctctctcctttttcttctcatctccttactagagatctctgtcttcgataatttgtttcaatcactgagaaaatggcggccgtaggagtagattcgaggcgtcctgagacagcgatggaggaaacctgtaacgtgaaaggagcggcggcgaaacaaggggaagggcttaagcagtactatctccagcacatccatgagctccagcgccagcttcgacagaagactaataacctcaatcgccttgaagctcaaaggaatgaactcaattctcgaggtctcttcttccttctcttaccctaattctctgcaaaattggatcttttttatcatctccttgtgtttcgtaatctcagattctgtgctagggctttcgatttcgttccaattggagctgagtgatttcaaatttcaaaattgttgtggtgatttagtgtttccgatctggaagtgattagtcttgattttagcaacattaacttgtttagatttctagattctgtcttcttgttggttcttttgcaaagtatgtggcttttttcaggaaagcctagttatttcttcactatcttcattgaggaatatatacttttggaaggagcccatatagtcctttccactataccatgattttagttacacatttaaagttatagaacagcttctgttgtcatcatgatcaccatcctatttatgcatgaaggttttcttactagtctttataatttgtagttagttctaaatctcaaacctcgttaacactaaaattatttctaattgaacagtgagaatgctcagagaagagttacagctccttcaagaacctgggtcctatgtgggagaagtggtaaaagttatgggaaagaacaaggtcttggttaaggtatgaatcttttttattatcatgtttgtatttctacgaacatagttgtcagtaaggcttacactcccattttccaggttcatccagaggggaagtatgttgttgatattgacaaaagtatagacattacgaaaatcactccatcaacgagagttgctcttcgtaatgatagctatgttctccacctggttctgccaagtaaagtagatcccttggttaaccttatgaaagttgagaaggttccagactccacctatgacatgattggtggtcttgaccagcagattaaggaaataaaggaggtatgcttagtgaatgagaaaccgaaactaaaagtcactacagtattggctatctcctctgttgtttcatccttttaatgtttatataatatctatatcttttctggtttatcaggtcattgagctgccaatcaagcatcctgaattgtttgagtctcttggaattgcgcagccaaaggtacacttgaatcttaaaccttcttctccatattgtgatgatgctaagtggattagacgtaatctcatctctctgtctttctagggtgtgttgttatacggtccacctggaactgggaagacactattggctcgggctgttgcacatcacactgactgtactttcataagagtttctggttccgagcttgtccagaaatacattggagaaggttctagaatggtcagagaactttttgtgatggcaaggttagtatatggtagtccctattttaaatttcaagcatggtaatagtggttgataggaaaatatggaactgttgataagataacatcttttaacatgtccgccattagttgctataaaatggacatgagctgttaagttaaatggggaaagtgttctttgttgctacaatgaatatggttccgttgtgaatgaatatcgttctataaagtattctttgtcatagtgcttagcatttaggccacagtgccaagtctcatgtaaggagcaaattacaaataggtgagatgattcgttgaaaatactctttccagttggcttacaccggtttatggttttcagggagcatgcaccatcaatcatcttcatggatgaaatcgatagtattgggtctgctcgtatggaatctggaagtggaaatggtgacagtgaggtgcaacggaccatgctcgagcttctcaatcaacttgacggttttgaagcgtcaaacaaaatcaaggtacctattaagttgtaaaggaaaaaaaaccataagttgaataggatgagtctgtgttattgtagtctgaaattgctgacagagtcatattctctttaatgactgttgcaggttttgatggctacaaatcgtattgatattctggatcaagctcttctcaggcctggaagaattgataggaaaattgaatttcctaatcctaatgaagaggtaatacttgtgctctgagaaaatgatattgactgttgtttttggtgatatgaatacattattcgtcaaagtaggcaccttatttagtatttagactatcatttgcagcataaaaaacttttctttatctccatactcattttactcaagtgaggcaggacggtttggctaatgtatgtttccaaaatgtgttgcagtcacgttttgacatcttgaagattcactcgaggaaaatgaatttgatgcgtggaatcgatctgaaaaagattgcagagaagatgaatggcgcttcaggtgctgagctgaaggtaaagtgttttctatttctctacttctatcttgttctctctacattttgcctctctcttatgtttttggttaatacggtcaggctgtgtgcacggaggcgggaatgtttgctctgcgtgagaggagagtacacgtgacacaagaagactttgagatggcggtggccaaggtaatgaagaaagacacggagaagaacatgtctctgcgtaagctgtggaagtaggaatctctcatggaaagactttctttactttactgtttgttgtttgattctgaaaccttttttcggttgtctcatgaaaacattttagaacaaagtttttactatctagacacgagtttatctagtatgcgatttgaggtcaatggaaggaaattcccaaaactcaagaacctgagcttataagaccaaaacaagcagaaccttcacatgttaagagttcttctgtccgaaactgtcatattccattagagagaaaaagcctataatgtaaatgttatgataatttatttcaattacaaattttacgcacgaatttggtttattcggtatggtttagctcggttaccaaagttttggtgtatgcttaagttgtggttttggactttttgtattgcagacttataaaataacaaaaccaagcggtttataaattttgttaattttgggttggttccgtcattccattttttatttttctcccaaataaaaaatcatatgaaattaaacttaaaaagagcaagatctttaatacaagatctttaatacaagtttagcaaaaaaaagatctttaatacaaatgataacatagttacaaaattatacaaaacatatgatattaatgaattatataatacacaataagcaatggaaaagaaaaatacaatagcttatatcttgttctctggacattttgcacctttcttatgtttccagttattacgtttaaactttgtgcacagaaacgaaaatatttgatatgcgtgagaggagagtacacgtgacataagaatactgagatggcggtggcgaaagtaacgaaaaacacacacaaagaagaacaagcctctgagtaagttctggaagtaggaatctctttgttatgtaattcaagtcaatggaaaaccacattttcatttcggatatgacaaattagagtttctttactttgctgtcgattgctggttttgaaaccctttttcggttgattcatcaaacatttttagattaagtttttatgacctaaatattttttttttatatctaaatgtgtctttaaaacgaacacatgttcaaagtttttatgtccaaatcagttatcatatttgattagagagaaaaaagctataaagttaatattattataatttaattaatatgactattttagtaataaaatccttcaactaaagatgaatcgtgagaaaacctatcaattatttatttagtgaaaaaactctaaacttaaaatttgttaatgtaaatcctcatccatctatattgtcgtgaaaattggacggattacaattaaaataaaatgtaatatttttcacaaattgaaaaataataaatatacacttaaacaataaaaattgtaaataaaaacaacaaaatgttcttatttataccgaatctaaattttctaatttatttaagctctaaaatttagaaagtgaaaaatgagatttttataaggtttgtgtgttgtcgaagtcgattcattttaatttgaccctaacccgtctaatttttattactaaaaatgaagagagaattgtattaacagaatttaaattaaagggtatttttacaatcatctttagtcgagtggttttattactaaaaacttttttttaaaatacaaatgtttatgcaataatatggtttattcggtgtggttttagttgggttacccaaaaaagttttaataataggctttagttgtggttttggtattgcagacattaaaaataacaaaaccaagcggtttatagactcggtttattttgggtcgttcgttttccattttattctcacaaaataaaaaatagtaaattgaacttacaaaaaaaaaaaagatgtcttgttggataatccaaggttcttttctatataaaggttctttgctcatgatcttagtccctgtgatctatctttgaatctcaaaagcatacttgagagagatctgtttcgataatttgcttcaatcaccgtgttaatggcggccgtaggagtggaggcgagacctcctgtgacagcgatggaggaaacctgcaacgttaagggagcggcggcgaaacaaggagaagggcttaacaagtactacctccagcatctcgatgagctccagcgcctgcaacgcgaaaagtcgtataaccttaatcgtcttgaagctcagaggaatgaactcaattctcgaggtctctttttccttctctaactctaattttcattgaatttctttgcaaagttggatcttttgatcatcttcttaagtttagtaatctcgaattccatattaggactttagatttcgtctgggtgctttaaatttataaattgttgcggtgattgtttggattgagggtttctgatcttttccagaactggatctaaactatgctgcgccttgatttttagcatcactaagttaccctattgagatttcttcttgattctgtttgtgttgagtatgaatcagcttctgtcaatatttgattgtttagcaaagtatgtagtgattgatacaatcgatgtatactgctgaacattttaaaccttgttgtcattgtaaactgaacagtacgaatgctcagagaagagttacagctccttcaagaacctgggtcctatgtgggtgaagtggtaaaagtgatgggaaaaaacaaggtcttggttaaggtatgaatgtttttatcgtattatctagattggtttttgaattgtttgcaatcatatgaacattgatagaataatactttcccatgtttcaggttcatccagaggggaagtatgttgtcgatattgacaaaagtatagacataacgaaactcactccatcaacgagagttgctctccgtaatgatagctatgttctccacctggttctgccaagtaaagtagatcccttggttaaccttatgaaagttgagaaggttccagactccacatatgacatgattggtggtcttgaccagcaaatcaaggaaataaaggaggtatgcatagtgaaagaaacaaacgatactaaaagtcactggtttcatgcttttaaattttatataatatctttactggtttatcaggtcattgaactgccaatcaagcatcctgaattgtttgagtctcttggaattgcgcagccaaaggtacacttgaatttcaaagcttatctatattgtgacgctgctaagtggatttcgaactgattgcttctccctctcttttaagggtgtgttgttgtacggtccacctggaactgggaagacactattggctcgggctgtggcacatcacactgactgtactttcatcagagtttctggttctgagctggtccagaaatacattggagaaggttctagaatggtcagagaactttttgtgatggcaaggtttgtacatgctagtccttatttaatatttcaagcatggtaaaagtggtaggttggaaaagatggaacttttgacacgataaatcttttacatgcccgtgcttagtagctgtagtggacatgtggagtaaaataaattgagtaaattgttctctgttcctgctatgaatatggtttcaacatgtatacgatctcaagcataatgatctttacaagtagtctcgatgcctagcatttaggccacagtaatagtcttttgtaatgagcaaagtatacaccattaatcatcttcattgtgctgaaaaatacttattccagctagcttacctttctagtacctctggcttatggttttcagggagcatgcaccatcaatcatcttcatggatgaaatcgatagtatcgggtctgctcgtatggaatctggtagtggaaatggtgacagtgaggtgcaaaggactatgcttgagcttctcaatcaacttgacggattcgaggcgtcaaacaaaatcaaggtatgccttatgttgtgaatgaaaaaatagtcatgaagctgaaaaggataactctgtgttactctgaatttcgcagacaaagttgttaattctcttaaatgactgttgcaggttttgatggctacaaatcgtattgatattctggatcaagctcttctccggcctggaaggattgataggaaaattgaatttcctaatcctaatgaagaggtaatgcttgtgtttcttaggacatgatattagaaataactttaaacttgaagtagcaactttgctcactccgttgtttttggtaaactatcatttactgcgtaaaatacttttctccatacttattgtacccaaagtgaggcaggacggtttggctaatgtatatttctaatatgtgttgcagtcacgttttgatatcttgaagatacactcaaggaaaatgaatttgatgcgtggaatcgatctgaaaaagattgcagagaagatgaatggtgcttcaggtgctgagctgaaggtaagtgtttctctgtccctgcttctgtcttgttctctccaatctgtctctctctaatgtttttggttattacggtcaggctgtatgcacggaggcgggcatgtttgcacttcgtgagaggagagtacatgtgactcaggaagactttgagatggctgtggcgaaggtaatgaagaaagacacagagaagaacatgtctctgcgtaagctctggaagtaggaatttcagagtcacagattaatttcgattatttcttctctactgtctgtggttctttctgaaaccttttcggctagcgctttaagcttttctaaacaatgtttgtacactagtttctattcattcaaatggttgttcagcataacatcttcgattcaaccaagcttacattttacatcttaagagtatattcttctccaactcagtctcattagcttaaagagaaaaccaactaaaagattgtttgagacaaaataatcgacatagctttgtacctgagatccaccgctgaggtcaatagtgagtgatttgaatttggagtgtacattaatttagaaattcaacccatctggcatgtgtcaagaataatttgaaaactatccgttatgaacaataaaaatccttattgatgaatggtgtctattattaaaaattgaggtataaatatgataaagaaaataaataatttattttgtcaaaaccaacgcgtatatattgtaatgaatttaatttcaaaatttgctaaatgtgaaaaaaggaaagaaaaatcaatgccgatgaatgagtacgcgtggacctaaagctagaaaaagatccaacggtggagaaagctgcgttaaaattgcagaagaaccaaagagaaagaatccaacggccaatagtgtagcgtcaactcaaagccaaaccctcccaaatttctcttttaaaaaccccaatctctctctccctctccatcttcattctccctctcgccgcttccttcttaacaccatcgcctgaattcgctctcctctagctcgcgattgcgaaaacatggtacatgttctcttcgattttaccgatttcttcttcgtgtattatcagattgtataccttgatctaggattatctccgtctcagatctcacgagattgcgtcgatgtttccatgttctagtttctaatttcgtcgtggatatatttttcaggctctacctaaccagcaaaccgtagattatcccagcttcaagcttgtcattgttggtgatggaggcacaggtacggtactcttcgccgtgtttttttttatcgattaatcaatgcttggatttacgttgatggtgattggggtgatagagataggctcatatgctaagcagattttgctagtcgactctttataatccgtactgttgtatccagtggctcaattgatttcaagtatggtaatgtgttttgattgttttgctaaacctttgattgcttttggtggttgtgcagggaagactacttttgttaagagacatcttactggggagtttgagaagaagtatgaacgtaagtattgcttgtgaatgttcagatttctgttcttcatgtctcttaaatgattctgattttgagtcgtaatcttgtttgttgcagctactattggtgtggaggttcatccattagatttcttcacaaactgtggcaagatccgtttttactgctgggacactgctggacaagagaaatttggtggccttagggatggatactagtaagtgtggaccctttactttctcattgataggttagtgtctagagtcaatctagagtgtgcttagtttggattagctctggttaggatttgaaattggcaaccgattaacctggacaatgggtataagactggtatgttttgaagtatgcatagtttgcaactgattttgttacctggacaaatagagtagaacttgaattttaattttgatattccatctggatgtatagctaatcatctttgaatttcttgcagcatccatggtcaatgtgctataataatgtttgacgtcacagcacggctcacatacaagaatgttccgacatggcaccgtgatctctgcagggtgtgtgaaaacatcccgattgttctgtgtgggaacaaagttgatgtgaagaacaggcaagtgaaggcaaagcaggttacattccacaggaagaagaatctgcagtactatgagatatcagcaaagagcaactacaactttgagaagcctttcttgtaccttgctagaaaactggctggagaccaaaaccttcactttgtggagacaccagcgcttgctccaccagaggttcacattgacattgctgatcagcagaagaacgaggccgagctcttacaggctgcagctcaacccctccccgatgacgatgatgatatctttgagtaaatcatccttctagaatgtctgccgtgggaagctcttgcttgttccttttggttttctctatgttgttttggtgttacatataaatcaatcggtctttcttataacaaaaattaggtatgtatttttggatggttcttctgatggtatccaaagctaagttgtttcttcgcaagaatattagttgattggaaaactttattctacctcctattacttgccagttcttagatttcagatgccactctttagctaccaggtgatgtcatataaacctgggtaaaattagctgcaagtagatcttgttgggagacctgacctgcattgacaatggttaagttctttgccttccccgatctctctagctttgcagattcttctgcaatcctcttccttttcttctttgaaacttgatcttcttaatcaatccgcaccagaacttgtagaataataatcggataactttttgtttggcaaccattcttgcattgaagaatgaagtaaccctttccctcaaatcaacgaccgatttcaatccgtgattccagacattttcttcaaccgtgagctctaagaccaatttctgcaagtttgagcttaagaatttatcgatgtgtatattaatttctggaaatattgttggtattaatatgttaccattaaatttgaaaggcatcattagatggatgtcatgtgagtgagtacttgaaattttgaaactatccgttacggacaataaatccttatttaaatgatttgttagtaaaaaactatgctacaaataaaatcaaaacttcacatacgatacaggaaataaatatattatttattttgtcaaaactcaaaaccaggacctaaagctgaaaaaaaaaagatccaacggtgcagaaagctgcgtagatattggagagccaaaagatggaatctaacggtggaaaaaatagcgtcaaacctaagccaaaacctcccaaaattctccttattaaaaccccatctctctccctagtccctctcgccgcatcgcttcttaaacctcgacgacatcaacgtctgacttcgcttctcctctcacatggtgaacattctcttctcttttcccgatttcttcgtcttgtagtatttagatctcacgagatcgcttaatttcgttgatgtttcttttttcggattttactgaattttgttgtgatatcttgttcaggctctacctaaccaacaaaccgtagattatcctagcttcaagctcgtcatcgttggtgatggaggcacaggtacagtattcttcgccgtgttttttgacctattgttttttgtgatctctgaaatttgatcgtcttttcactgtccccatctgaaagcattctcgtttaagagacggatttgagattttgatgatgtgctgattagatttgtacgattggtttttgataatatcaatgtttgattggttttaaagagaaccttacagactaggccttcgttgagcagatctttgggatatcgattcttagatgatccggaatgttgttttcattggctcagttttagtatggttcaatgtttttgattagttcttgctaaacctatgattgctcttggtgttttgtacagggaaaacgacctttgtgaagagacatcttactggggagtttgagaagaagtatgaacgtaagtatagcaaagatgcttgtgaatgcacaatttctgtgaacatcatctgatgttgagtcctaatcttgtttgttgcagctactattggtgtggaggttcatcctttggatttcttcacaaactgcggaaagatccgtttttactgctgggatactgctggacaagagaaatttggtggccttagggatggatactagtaagtatacatatctccattgatatgtttgtgtgtatactcaatctagagtgtgtatagtttggattagctctggttggtttgtgcgtaaaattggcaaccgatttgttacctggacggtgggaataggaatcgtatgttgttgaagtaatctgttaagatctcaatatctattaaagtttgcattgttttgattagcgctggttaggttgtgaaattcaagaaccatctcacatgtcatgtttgcaactattgttacctggacaataggaatagctgactgggacttgaatgataatggtttgtttgatattccatctggatatattgctaatcttcggttttcttgcagcatccatggtcaatgtgcgataataatgtttgacgtcacagcaaggctcacatacaagaatgttccgacatggcatcgtgatctttgcagggtgtgtgaaaacatcccgattgttctgtgtggaaacaaagtcgatgtgaagaacaggcaagtgaaggcaaagcaagtcacattccacaggaagaagaatctgcagtactatgagatatcagcaaagagcaactacaacttcgagaagcctttcttgtaccttgctaggaaactggctggagaccagaaccttcactttgtggagtcaccagctcttgctccaccagaggttcaccttgacattgctgctcagcagcagaatgaggccgatcttgcagctgctgcagctcagcctctccccgatgatgatgatgacgcatttgagtaaaatcttccaaaaatgtctgctgtggttttcctctatgatgttttttgagttgatgttacatataaatcaatcggtctattttagaaccaaaattgggggaattatttggattgttctgttttttgggacccaaagagaatttgcagtcaagttttttctgccttaaagaatatgcggttattggaaaactttgattctacccacttttcttttactttgccagttgcaacattttagattttgtaactattgtagctacttggtcatatgaatcaaacataaaaggagaatatttagctgtgctacttgaaattgttagtttaatcactagtgtttcaattacgtacacaaatcttctcatctccttttttatgtatagcttttaggccatggcatgaatcatatatacattgctagtcttcctcaagtccaacgcaaagataaaagagtaaagatgatcaaattttctttcacaagtttggaattaaatcaaaaaacctgaatgaaaaataaaatgacatttgtacaatctacactcagtttttattctatgtaacacaaactgtagttctcaatgctgctgctgctgctatctgtatatagtactgttatcgtcagagataaggtttcttatctgcatcagatgttcctcattcgaaatgttcaatttgagacggagatttgtaatccacgtttcttgttcccatgttatgattggtccggatgcgtgcaatctctcgatactgcttcggtatgcatccagctctaacctatgaacatcagcagcctctgagccttttcttggaaccaccaacttcttgaccttcccgtagccacaagacgatgactctgtgtcactagagttaccggtttcaatgggattgaatgaaacagcactgagaccatcagtatccatgcaacaactaccaacagaagaagcaacactctctctatcttcttcttcttctttcacttcttcacgaaaccttggaggataagcagctaaagctctagtttgattgtgaggttcaaccaaagagtaagtccgtttctttagacctactgacaaaggtacatcagactcatcaagcttgtctttgctctcagatgaaatgtagtcgcctttcggattcacctttctccttagttctcctgttgaagtctgtgcgcttaatcttgatgtacccttcagccaaatggtaaaataaacaaaatgtcagctcaaaaacagactttaaaaagatatagtcacagaggaaagaaacaagtacctgtccaatcatgatccactcgttatcttgccaagattgtctaacccgaatatcggatttagtcaccttgaacttcagtgaggaaccaagtaatctaaccaagaaacaaccgtttcctaaaaccttggaaacgattgccatcttccacgaacaactttggaaaacctcaagaatgtcaccaggacaccaagcatcaagaacttgtaaacgaggaggctcaggcctcatactcttcctcggtaccctctctgtaccatcattatgatcatacatgacagtgtagtaatgcccatttcctgatatgatctctgcagaccgccaggcgccagatggaaccgatgatttgctcaacacttcgactttagttcccttgttgaatctcatgattgctgcttcaaaaacaccttaaagtaaatatcttttcacattccaactgcttataaagatcagaattgaacatcacatatgctaaaaggctggtgcttcacaatcattaagcaacaaaacaagataaatacatccaaatatccagaaacaagttggaccaataagatccattagactcattcacatccaaaaaattcaacttcaaccaattggtataaagattacagattgttttgcttcataatcactagattgcagaaaaagtcctaaattgcaaaaaaccaaatccagaagcatacaatggcttgaaatgttaatgaaattgaaaacagagtatgactcagttcctaggatcaatcttcattactgagaaattgattaggggaagagaatcaaaaatctttaagcggacatgaagagacttaaaactcaaaaattcaaattaaaaaaaaaagaaaaaaaaaataaatttgagattgtgattgtgattacctgaaaacgaagttttagtttttaggttagtgaatgtttaacacgcaaagaaagccatgaatgattctactgccagaaacaacaaagctttgtttttttttctttgatatttctgggcaaccaaacttggatcaaaagggcaaataaaacaaaattaaaaacgtatatgcaaataattatcaaaaggaacaaaaaagataaatgtatattccacatcagcagcagcaagccaaaaatcattttttaaatgaaaatatttttaagaaaatgaagaagagaatatttcaagttgcatgagaaatagcctttttgtttcattttatttgatatgggactattttgtgtaaaataaccaaaaaaaatgtaatttgataagtgagaataacttgatggtttgttggaagatatgtaaaagattaaaagttgaatttgttatgttttcttatatttgagatatctaaaagagaattgtttcaacattaattagacctctatgatttggtttatttttcataggagtggtgtatagcatttaattaattcaatgaatgattttgatatgagttgaccaaaagaaaaagaagattaattggaaacatgatgttgtaatctaggtgttgatcagcctaagataacactaaacataacgaaagtgcaaaatttataaatttaatcaccttatctgaaagttatcattattttgagactaacatatcccttgctcgtcttattggttcgacatatcaaatacttacacacttatgtacgtaattataggataatcatagtctgtaattcatagtataacagtttatcaatatgtattgacgttacgttatttgtttgtttctaggtgagcacgagcaaagtgcgtgttccggtgtgccaaaagtttcgacatatttacttaatttaaaaacagttattagaaaaagaaggaaaaaaaaacgtaatggggatggtcaggtcaggtggctttacataattcccaattcacttttgagtttttggtcataaaaaatattatcgagatcgtagggtccatattttttggcttctaacgatcaaattttatattttagtttgtctttcccttgcagtacttattcatatcttcttgatttcacaacggattgtgtcatcacctgaacaatagtgttagaattatttgaatgcgactcctaatggttcataagattttacaacttttgaatttctcttttttggaaatcattattgcttcctaattgtatgagctcatgaataaagaagggtgtgcaatattttcttcatacgtgtactcaagaacatgatccaaaatcttgtctactcgtaaaaagtttataagcaaaacacacttttgttttggttttggttttggcttttccggataaaatgaagcagtgtttatgctattgcgctttccacgcatgaagcttcactcttacatccttcactcctgatccattctaacaccgaagaacagtcctctcgtcttacgaaatgccttcattaagagattcaacccattaccaaacgaagaagaatttaataaccaaaagaaagcctaatttagtgttatgtttgatctttgtacctgtttttggagcgatacccctttagttcagaagcttctcgagaatctcttacgtctttgctcattcttagagactccggtatctccaccatctctgcttcgctctcataagcatcgtatatgcattgaagtattgaatcctgccagaacaatgaattatcacaatgcttggttgatagtatataagagactgaatagaacagagagagccctcttaaacatataccagaggtttggaagcattgagccagtggtacataggctcacaccggaaccatgtcatttgcctttttgcaaagtttctgcgtatcaagcaaaccaagtattagtttaaaagcgataagagaggataacatgggttctttaaacttttgcaggagacaaaaagtgaagaaatgaatcaatgtgaaagaatcaaaacagaacttcgactttcatttattctcaatcactatttcgtccaaaagctaatacactagatatttcaagtctatgtagaggattcacctggatgctgtctgaaatttgttcaagaaagcataaaattctctaggggaactttcgccctcatatcgacgacattgtaatagatattccatggcctgaaaacaaggaatcatatttccattgttgatcaaaaacggtatcaaagtacgacaaataaattgcaatgatgaagtcgtaaagtatttcatttttccaactaaataagaatggacttcctttctgaaccaacttggtataagtggatgatgatatatgctaatagtaatggctatatgtcttaaaccgaaaaataactgttatataacatggagtcatgcaatttctagaaccaaatccatattcttcactgaactggacatgctgccaaattaacagctacaatccactgcagagcccttggctaattataaagactatgcactagattaacagaagaaagccttctcttctcagttcgttattcacaacccagtacaggaaataaagagttcacctgtctgtacccaatggcacgagttgcaggatttgagtttggaagaagaccaagatcaagaagccatctagcttctgacaaaactccattgggtcctgagttgagagacaaagcaccaaggaaagataaactcagaagcaatgccaagcaaatatatacaaaattgcatacgacacagcaaagagcatgcaaattgtctcttttttgggttataattagaagaatcagataagaaaagacttattactgtaaggtgccatgcaatggggctgcaattgtattcttgcaagttattactaattaagtagtagcacttatttttacctgaaagcatgtcttcacatctgaaatcaatagatctgtagagagcaacccgtgggcttgacaagaaaaaacaaagaaagtcatagtccaaatctgtctctatgttttggatagagatatcggcagatgaaccgtcctcaaggaagtcatcagcatcaggagcaactaaatttactcgaaaggaatcataaggaatgcgaaaggaagacggaggcgatccagttgactgccaggaaaaaacattcaaagcaagattaatagtgcatagttgcatacaatccaaaataaaacaatgatagttcatcaacctatcaggcaagaaatcatttatctacaagggcaagacaacagttgaagttaataattgtcaaaccttgagtatctcgaggctacggcgtagtctgtaccaatcattacgaggtaaagaagaagcttttggatcaccagcattgaccaccaactccacagctgcgtcccagttatattcggtttgaaaaccaactagcatatcatgggcctcagcgataacttctggagaaggtttaggcacatccggcttcccatacataaacctaacattaacaaaagcatgtaaatggatgaattctagattttgcagtatactataattgcttttaacattatacgaaagagccactagacaagtatataatctacagccataccatcgcagatacaatccagttccacccgtaacaatgggaacacgccctctattaagaatatctttggtagcttgccttccatcatcataaaattgccccacagagtagtctaacaaagcatggaaaaatgtgtaagtttcttcctttacatacatcagtatcagaagcatctacactagtggcatttgcaatagcaacaaagtcgacaaataccttgagacggatgcaaaatgtcgataagatgatgaggcaccacctgaataattcgtaaaacatacaactttcaaatacaatgtgatcacgaacggcaccaacgtgagatagaaatgaataaatcttaccaaatatttcagaaagatacctttctatcgctatctgatggcttggctgatccaacatcaaggcctttatacacctgtgattggggtaaaacaaaagcaagaacctttttaatccacaccaaacatagatgcgaagttctggaattgataaaactaaaaacttcaactttagcaattatcctcaacaaggtttcaaatttcaagtgagctgtaacttatttagagagtacaagtgagaaaatggacctgaacggagtcagcactgatgatttcgccattgagtcgcttagcgagctccatggcaagtctgctctttcctgcgccggtgggcccagaaatcacaatcaccttctccttttcagactttttcttcttgttcccgttcagaggaacagagcaggccgtggtggctgcgcagaatctccggcgcagtacaaggcttggcggttgaagtctcaagtaacaggtacgggtcaaaaatacgccactgccaatcaccattataaacggataacgaagctttgaaatttagaatttggaagatagcacaagtttgctacggatatactgaggttgatagaagggaaggaggacgacccgcgcgaaagctcatctcgaagagagacgaagacagtgagcaagggattagagaactacggttcggttaggtttacacataaaccgaacaagcgaaccgaaattaaacggtttacttaaacctagacagttataaacgatgttatcatgtcgtgttaattacttacacaaccaaaaaatggaacaattacatatggtttttgatcaattacagggtcctatgattaggttttttatggtcgggctggtaggattcgaccggttcgatccatctatatattcgaaaatttaaattataggatgtgtctttagtcaagtgattaagttcatttgattttacattttcttaaatctatttgattttatcatttttatcggagttcgactctattaagccgtataacctcgcctatgtagtaggaattgggtatggatcgggattataaaaccaaacatacataaagaaatatcaagatgtaacatgtaaaattagtcatatacagagacaagtagtttattgaagatgcaccatagtgatcatatatgttgattaagtacacttgttctctcgaataagtcatatcctttgtagccacgactgttccttgatcattggccacgaattagtcaaaagatggacacgaagatcaaataaaagttttacctcttatctttcgtggctattttgaccgtaagagacaaaaaaacaacaagtaaaaccgtgaaagttaacactaattaacgaataaagaatctatagaagcaaatattgtaattaaaatttcaagtgatcacaattcacaaatgaaaaaagttcattcctttatgtggcgtagcttcatagtaattatatagttgcacttgagaaaacccaaagcataaaaccacatagaaagagaacaatagggattaggtgaatagctctctctccattagcagacttgtaactattgttgtgtagagacagttccttcttggctatgtcgtcgtagaccacgagaccgtcagggcttgcggaatccaccgagaggttaatcagaaactcttcagatggccgagaacttatttgtaacctttgcatcttatggcgccttaatttggatttggaaactatatattatacgaacggtgatctgcttatatatatggtctttagccactatgcagttttgtatgtataaggatttctattcgtcacaatatcaacattatatataagatttcaaaagtcaaagcgtatagtatgcttggagacatttaatgttgcatgcaaactcctgaagttatggcttaagttatgatgaatatgataggtgaactttgcttacgaaatttaaacttgttaaaatagcttttgatagcaagacttatacgattcggctatccccccaagaagagttgaaatttgaaaatgaaagatatcaaaaaaaaaattgcatcttaaattcttttgatctagttaacagttgtaaaattgtggtcgtaaatctttttttttctttgcttttttggtcataaaatctttcatttgtttcgattagctttatgaaaaagtcacatactacaaggagttatattgtttgtatactaattttttggctgcactaaattatattagcatagacgcattataaatcgagacatagagcgttgacaaataagcactaaggtatataaactcgttcaaaaatttaagatttctgtttgattgcaccgaacttaaaggtgcacatgcatgtgaatcttttccacaagtcaaaatgcgcgttcatatgacaacggacttctttaaatatatatattcatcctaacaatatctagctagttaggaatacatgctagctataccataatatcaaatttttattaatcaagaaattcaaggccttaaattcaccagaacaagataacgtagtccatattctccgttacatatatatgttgtagctttatgaatacaagttgtatggatgcatgtacagaatacaagtactatcataagtttttcatagattttgtccggcctgcgtcaattaattaatccaaccaactcttggttaacctgtgaaaaaattacatataatttcctacgagcttgcatgaaaagaaaatataaaaaaatacattgcatatatgcatacccaatattcccttattgagaatttagaatggtcattatagactattttcttgatctttttggttattcagttattaacgtaatacctacttggctacagcctctgattgagagtggtatgcccatagagtaaacttcatctttctatttggaaaagatatatatacggagcaacttattttgactgatcgtgctctactcaatcttgatctggctggctactcctttcctgtggttaaagctttttctgtgacaaattttcaatttgaagaagtcaaaattggatattacgagccaaaaaaaatatatgaaagtgaagcgtagagtcggccaaccaatgggaaggacatcatagggctgatatccgttgacaaaaaaaaaaaagaagaagccaaaaaggtttttaactaaccacaacaaaacgttgacccaagacaaaaactagccaataaccagacagaaacagtctaatagtatactgaaatgcataattgtgttgaattataccattgttttttattaattaaaaaattaatactcactcttttttttccaactcgaattgagttgttcaattccataaaacccatttatattaattaatttcataatcaatctgcatgccggcctaattgattccgattcgtagtgttaattaatcattgttaaaagcaaaaacattactaatcagtttaaccgacaagctaaacccaacgtggcaaattttcctaaagaatttttttcaacacacaccgatcggttgaacaatccaacttggcacaacttgcagatgctactagttaatggctcttttcacataatttatgacaaacctaatagtattaatgtgcattgtacacgactctacatatgtacaatttattactatatttgaccttgaattcatccaaaattatctcagattttaaatatttcttttcgattttgacatttacaaaattagataattcaaaatacggaatttctcgttagcaaaattatgactttttttttatattatttcaactaaaaaataacagaaaaagataaaatacaagtccctgtatattttttggtcttagtttgaaatatttcgtctttgttctcgtcaccagagtgcttatctgaaagaaatgaagtcagagaagctctaaaagacctctaatggaggacaagaaagcaaacataatcgctactatattaatcttagcccttgtcgtagtgataatcgccgcccgagtttctctaaaactctccaaaacattctatctcatagccggcgtcgacatttccttgatcctcgccgtgatctgtttcctcataatccgtagccgttacaacaaagaaagaaagctcttggtatcaagattcgcctccgaaggcagagagctacgaatcgagtacagtttcttgagaaaagtcgccggagttccaaccaaattcaagctcgaagatcttgaagaagccaccgatggattcagatctttgatcggaaaaggcggttccggttcggtgtttaaaggagttttgaaagacggaagtcaagtagctgtgaagagaatcgaaggagaagagaaaggagaaagagagttcagatccgaagtagctgccatagcttccgttcagcacaagaatctagttcgtctttacggttattcgtcttcgactagcgcgaatcgtccgagattcctcgtttacgattatatcgtaaactcgtctctcgatatctggatttttccggatagaggaaacagaggaagatccggaggaggatgcttgtcttgggaacaaaggtaccaagttgctattgatgtagctaaagctcttgcttatcttcatcatgattgtcgatctaagatcttgcatctcgatgttaaacccgaaaacattctactagacgagaatttccgagcggtggtaaccgatttcggactctctaagctgattgctagagatgagagcagagtactaacggatatccgtggtactcgggggtatttagcccccgagtggcttcttgaacacggtatttcggagaaatccgatgtgtatagctacgggattgtgttactagagatgatcggaggacggagaagcatttcaagggtagaagttaaggaaacaaaaaagaagaaattagagtatttcccaaggattgtgaaccaaaagatgagagaaagaaagataatggagattgttgatcaaaggctgattgaagttaatgaggtagatgaagaggaagtgatgaaattggtgtgtgtggctttgtggtgtatacaagagaagtctaagaaaaggcctgatatgactatggttattgagatgcttgaagggagagttccggtgaacgagccaccggattcagatgttgttgtggtcgatcttttggcggctgatgatgatgatgcaagtaccggtgttcgacgggtagtaaatatcccgaaattgcaaatccatagggagaggaattttcgtttatcatccatttgctctagtatcatatctcccatctctccacgctagttatttttgtgtgttcatattggttttgtttcaatcaaaaactgagtatgtttggtgtgttactattaatcaacctttgatacgtataataaacacaatttataccaaaaatgatatatccattatctcgacatgaatgactagaagaaccatcgtctcgaggggacgcttaatgaatctcaaatcaattataaagatcaatccagttatgaacaattggttatgaatagaagaaagtcaatgaatcttaaaccgaatttggtcggtcaaagtaaaccgaatctcccaattctattattgaagaagaaactgataaaaacaaaaggtttggggagaaagtgaaaagaacaaaaacatgaaggacgctaaggcaaacaaaaagtgcaatccacatcagaatttatggattgcttgctgctagaaagctctgtttctttttgcttccttagacttctccgtcgattaacccttgccgaggtactgtctcaggtctcagcttagatatttattctatgcgatttttccaatttctttagcatctgctctgtaatgtatcattctggtttcgttttgcaattttgtattcaaagacaacacgactttggtatctgggttttcgtgaatccttgtaactttttgtcgatcgatcgagcactttgtttcttttcctgcacaatgtctgaacggactaaatattttaaggtttttgctctcttggagctttattgttgttttcggatttcgtctgggaatttctcaacgttatccgtctgatgaatagaatagttcgaattgggaacgaagggatgttgtttttacttcttaatgttatctcactttgaagttcttaagaattttagatttgaactttgaagaatgtggtatttgttttctgttatgtccatggattcatcatccatgttgttaaaaatgctacaatctcacctgatttaatcaatgtggtgtgaatgatttatgtatttgttttcctgcagggtcattttttttttcttgaattttttcaccaagtgttcgttcacggcattgcttgtcctccagtatgagtatctccggtgctgcagttggttcaggtttagtgtattcttattttctgttacataatgtttcggtttaaatggaaattatgaaataaaactctgaattgcaacattatttcaggcagaaatttaagaagagcggtagagtttgggaaaactcatgtggttaggcctaaagggaaacatcaagcaactattgtctggttacatgggcttggggacaatggctcgaggtcagtcttttctctctgaagttggtttgcagtctagaatctagatggatatttggaattgtagaaattgcaaataagctggtagactattgactatcagtaatgaatgtaacttatgttagcgttcaaatcttacatcgttcatcatcttgattgatacacattttgttaaaaagttggtaccttaagtctttttgttttttgactgcagctggtcccagcttttggagacccttccccttccaaatgtgagttataagctttaagtgatatccattgtattttaacagcactcggttaatctacctttacggatactaaaccattgtatttgacatgtagatcaaatggatttgcccgactgctccttctcaaccaataagtttatttggtggttttccctccacagcttgtaagtatatttgctacataggattcgcctttcatttgtttaagcggaatctattcctaatgtaaataggcagataggttaaagtgaatagattaaatttaatcatgttcatgcagaagaatttgccatgggccaattattcaacaattatggttttgaaattcgtaagctagtaagcaaagtagtcaatcaagtggttggggataagctcactattagagatcaaattcttttacacgtctgtagctttgtaggaagctcatcttagcttttagtttagagtagtaaacaacacatcattggttcggctccacatcactagaccaaagaaacattcttctgttcttgctaaaatttgggaatttctatgcaaaaattaatcttctgctatgctacataagggacaaggttgttcagtcaacaatatagtttacctttaaccgaaaaatagactttacttctctccttggaggcaatatttggtacaacagatagagccttctttacctttctttatatagacactatcatcagacttgtgcacaaatgtctattactatgagtagggaagtattttttttgagaaaagatttgatgagttgctactgaatttatgtagggtttgatgttgtggacatcaatgaagatggacctgatgatatggaaggattggatgtggctgctgcacatgttgcaaatctgttgtcgaatgagcctgctgacagtaagttatccttccaaacttgcatattcattcccctccatcaatcagtgatcactgaattagtaagaagaatgataaacatgacgattataatttctacaagttgttgtacggtacactattgtagcctaatagttaaggttcaaatctagggggaaacccttttttttttttaaattgaaggagtagatattctcaattgaaaggaggttgtatagtgggtatgccgagtagagttagaaagatttaagatttaaaaggagacagattaagggagtagaactagagagagaaacaatagaatttggaggtttcgaagagctaataccattcaactaaaagtattacacatgtttaacattaaagccaaaatatctgacttcattacagaaagttactaggcaggaattctagagtcaaacagaaatctgactttactctagttagttactggttgacttaataatttggatatttgagttaaatacttttgttgggaatttggacactggtttaaactgtgtttatctttcattgctcaaagttaaattaggtgttggaggattcagcatgggtgcggcgacatctctatattctgcaacttgttttgctctcggtaaatatggaaatggcaatccataccctatcaatttaagcgcaatcataggcttaagcggctggcttccttgtgcaaagtatgttttcaacttctcctaacgttctcctagtttaatgggataatggtgtcaccttggtgcgtttattattattctcataggacattggctggcaaactagaagaggaacagatcaagaaccgagctgcatcgttgcccattgttgtctgtcatggaaaaggtaattgtgcatattataatacccttactttctgaactgtttcacttctcagtatgtttaatatggtcatctttttggttttgaaccctgctgtaaatgcatttcatattctctaagaaaaatattctcgcgagcaaccggttattcaaattgttccataacaccaattcaagtaaaaagggttacattttaaagattttctcgtctttcatgttctcatattattgattcatgtaactttggtttgcagctgatgatgtggtaccgttcaagtttggggagaaatcttcacaggctttgctttcaaatgggtttaagaaggtgaccttcaaaccttacagtgcacttggtcaccacacaatcccacaggagttggatgagttgtgcgcatggttgacatccacgctcagcctcgaaggttgatacttcctatgatgtagctttctgatgaaaacccttcaactcttgagagtttgattgaattggatgtttcaggatttcacaatgttttcattggaatatttgtgtaagacacattcgtctagtagcaaatcttctcctttggcacgtccaaaaacatactcatcactaatcaaccgttctatggattccaaaattattgccttgatagagacttgttatccatcagagggttacaaaaacttaaattccctttgaataaattgatttaatttaaaataactcagagtaggcgccgacagttgcgcatcactaaagtaaccaattgcaaagtctacacgtgtgtggattatagtctgacacgtgtgaggacgagactcttctgaatcatcgttgctcatttctcactctgtgtgggagcctaaacaatggggagacgaaaccagagatgcttgctctcttcctctcttcttcttcgtatccaactctctctttcctctccagatcagtaactctaaacttagccagaacaacaacactctcagctctcacaatgtcgatgaacctaaagactcatgccttcgcaggcaatcccttgaagtcgaaaactccgaaatctaccgatccattctcacccacctccgctttcgaatctctgaaaaccctaattccagtaatccctaatcactcaacaccttcccctgattttaaagtccttccctttagcaagggtcgtccactggtgttctcaagcggtggagatgctaatacgacgccgatttggcatctgggttgggtcagcttggctgattgtaaggttttgttagcaagttgtggggttgatctgaatgaggactcactcgtgtatttaggacccaagttggaagaagatttggtgtattgggctgttgatttggcagaggatggtttcgtttctgaattgggaggtaggaagttgtgttttgttgagcttcgaaccctaatggtagctgctgattgggcggatcaacgtgctatggatgagttggctattgccggcaatgtatgtgagctttttccagatgcatttcatttcaatcatgcttaaaaattgtgtttttttaatgatatggtttgcggaagttgagctaaacgaactcatctatggtaatagagtcgtatccatggctgaaagttctttgaatgctattattattagagcttatttgctgaaactgctgcatttcaaaactttgggatagtttctcgcttttctcccacaatattgataataccattgtattggtgcttatatacctaatgacaggccagggcgttacttgaatggcacaacgtgtcacaattttgtggatcatgtggaagtaaaacttttccaaaggaagcaggaaggagaaaacaatgctcagacgaaacatgcagaaagagggtctatccccgtgttgatccggtatattggagcttcttacattttgtagatttcactaagagtatggccattgtggaccttctggctgattggtcatccgtctattacaggtggttataatgttagttattgatcgagaaaatgatcgcgcacttttaagcaggcaatctagatatgtaccgagaatgtggagttgtttagctggatttattgaggtatgaaaacctcactgcgaaatcatctcaactcgatatttaataataactttctctttgtcattttttcatccaactcccctggataggccattccacttattttactcttgcatggagatttgtatgtataatctatgctgcttttgctagccaggggaaagcttagaagaggctgtgaggcgggaaacatgggaagagacaggcattgaagtaggagatgttgtataccacagctctcagccttggcctggtaattgaatagttaagaaattaatatgatttttggtttgggtttcttctgcctcacatttatatatctatctatgtttattagcttacgaagtttatatttagctaatgtacaatgcatgcattcatgactgttataattcctttaccacgtagtcctcataaaatactgctattgatgagcaatttagtaatagagcagaatgaaaaggagaatttccttatgagcaaatttgcatctcgtagcaaagtattctttaatgtatagatttgaaacttattcaatttaaccttattattatgtcttccgatagctgtcctgtcacattctgtttttatgtttttccatgtgtagagcttagtatgcctctacagtggttgccactgctttattctaggtagttaggactcttgattttaatgccaaaagttctttcaaattgttttcgaaatgcaagtttaacataaacgagaatatgggtttctgaaattgtagtgggaccaagtagcatgccatgccaattgatgctcggtttctttgctttcgccaagacgctcgacataaacgtagacaaagaagagttagaaggtataatatatgttctcaaacaactctttggagtgccagagttttgttttaagtccatcacattcttaacatgtttgtgtgttattgttgttgcgcagatgctcaatggcacagtagagaagaggtgaagaaagcattggcggttgcagaatacaggaaggctcaaagaacagcagctgcaaaggtagagcagatctgtaaaggtgtggagagaagccagagtctatcaactgatttcaatcttgaaagcggtgagcttgctcctatgtttatcccggggccatttgccatcgcgcaccacctgatctcagcatgggtaaatcaggctcctgacgatgttcactcaaaacaacaagcgggtgtctctctctcaagtttgtagctagaaagatgaacttagatgcttagaaaccaaacgtttgctatggcttctatgcttattttgaattgctgagtcctaagtgtgtggacttcgctcgaagttatttctttgcaacgacgatttagatcaataaaaattaatcaaagattgacctcaataaatttgagttttatagttcgtttttctttagtggctgtgttcttctaaatcagatgtttactgcttcttcctaatgttcttgttgtaaaacaaaaaaaaaaagttaacaaatgagaattccactgttcttagagtacacatctccatagcgtagcattcactctccttccccagattctaaaaccccctccctagtcctcctccaaaccattttgttctttctcagagatctaaaccatcatggctacttccttcttccggcgactcgctaggtcagctccgattacattccctgtcgcatttggatctcaaagcaaatctggttctggcgctttccggttctccaccggtgcaatcgcggcactttccggtggattctcctattactacttgacatccggcaacaatctggtgaatttttctatctaatgtctttgatttctatgtaatagttgatcacttcgaattccgtttaatttttcgtcgagctggtttttgatccctttctcttgcattttgtccaatgtgtgtgtttgttgtattttcatattcaatcagacgagtttatacgatcaatacaaagtatgtagatcttcattttcgtttgtactttatgatctcaggtttatctggatcaagctaaggaagagacaggaccaaaaaccggtgcgtattctctaactacgcttttccttattttgttacgaaagctttgaaacgtttttgctactagcctgctttatgatcagattatgattgtttattgtattgtgctgtgtgatgtcagctctaaaccctgataaatggctcgagttcaagcttcaagacactgctagagttagccacaacactcagttgttcaggttttcacttaacttactaatactttgattgaaacatacacacacattggctttggactctcatgaacacttttcgaatttccataattgaatgtcattttggtcaaagtacaagtgatctagtttgtttaacccgctaagcttaaaaatcttcttagtaatgggcattcttgctgttgatatggttagagtccgcagtttaagcaactatagatttttttcccacaatacttctgtatttaagtccatttcttgaatgatagttatatatcggtcataacgataatctttgggtttcttattttggcatttccttgaaatccaggttctcatttgacccctcagctgagttgggtctacatgttgcttcttgtctcctgacaaggtatgctgtggtcacattcgttcaactttacagtaaaagaaatttattttggacgacttgtgtaaaatttctcaactaaactaaattcgtaaatctgacctttccattttctttgtacagggctcctttaggctataatgctgaagggaaaacgaaatatgtcattagaccgtaagttccgctaaaaaactttttaccagctaaagctttgcattgtatttcatgtctggacaaccattgctagcctatctgtcgcatttttttcacttttgttctgttagcttatctgtaactttgcatttttagtttacgcattgtgccattgtctgcaacttaaagttgaaggctgatagctgtcattaagaaaataaatagatagcttggaaaagatgcagattttatgcagccatatctctaagaataggttacttgattctaaatttgagctgctgaagttaccacttttgtgctatctgccttctaatttctaaatatcaacccactttttcagtatacaaacttatcttgcaaataaatcttccagatcattatttttcttgctttctacgataaagctctttaatacttgtacttatgtacgtgaggcttcttttgaccttatttatcttatatttgtgaattatctcagttacactcctatatcagatccagaggctaagggctattttgatttactgattaaggtatgagtgtcctgttaatatacatgtgcttctctctacttctactgctattttcgagaaacaactagatatattatgattgcatttatttcctcgacttgttttgaatttgttgtgatgtagttcattgctttttgcaggtatatcctgacggaaaaatgagtcagcattttgccagcttaaaaccgggggatgtgttggaagtaaaagggtatagtttttttttactattgttagtcttttatctacagttggtgatagctctttatttcatatggtgtttaacattatcttttcgtatagacccgttgaaaagttcaaatactcgccgaatatgaagaaacatattggcatggtatacccttattcccttgttacaaccaactttactgaagggttcttgcatagaatctgttttgttatatggaagtagaactttgaagatacgaactgcactagtacagttgtttttttctcatctcagcgtatggaagtatttcacctgctcatttactgacatgcaagtccatataaattcaatttttatgtggtttcatttctactttcctgtttagtagtatgatttactgacttgtagttattttttgtattatgctgacaagtcaatgtaatgaaatataaattctcacctttttgtgttggctatccctttttttaaatacttgaagattgccggtggaagtgggattactccaatgcttcaggtgattgatgccattgtgaagaatcctgaggacaacacgcaggtgaccaatttgttattgacttatttttcatacgaattttcgaagtacttcctattctagcgctggtttgtttaccaagatcttgaaagtgttatcatcctctacaattcatttctaaatcagctgaaattttcataaaaaaatagtcttaaccatggaaatttacgatttctctgtgtgcacagatatcattgctttatgccaatgtgtcaccagatgatatactcctgaagcagaagcttgatgtacttcaggctaaccacccaaatttgaaggtagatttctcttggatttgtcaattgattagtttgctagctggttactattagcatacacacttttcttaaaaagattttgatgttcaaaatctacagatattctatactgttgacaaccctactaaaaactggaaaggaggagtaggttacatttcaaaggatatggctctgaaaggcttacctcttcctaccgacgatactcttatccttgtaagttaccttactatcttcagaaccataatggaacactgtattctgagagtatgacaacaaggatgtaaaaaaaagcgttacggatttgatctactgacgaacaagttatggattgaatcaaacatacatggttaacaaaaatgcggcatgcttcactatgaattcaggtatgcggtcctcctgggatgatggagcatatatctggaggcaaagctccagactggtcacaaggagaggtttgtaccaatcccttaacatcgtttttttcttggcaatttaataacttaaatcctaaaagttatctaaacctttgtgttgaaactatctatacccatatcggatatctctgatagctagtggtttaaatgcaattagcaacacacacgtaaacaacgttgagctgaaagagggcatagtaaatgtattcagggaaaggctatgagatggctcatagcttagtctttgttattaggaaaaaattgataagttgatggcacaaaaagttgaaaaatgtcttgcagtctgtcggtttcgagtcactgtaattagttggagagaaccactcaatcaatagcaagatgcagagaagttcatatctaatatctcgttggttttttttactgcaggtcaaggggattctcaaggaactcggatacacagaggaaatggtgttcaaattctgagtggactagagaatcagaatacgatctcaaggaggtttcctttcatgtaataaaatggccccaagcaaacattaattgatgcagagtgagcttgacaatcgagctaccgagctttgaaaataaacaaagcaaaacggatcagttagtcatttgtctctgcaggtaatagcggaacttgattttgatggtaaatttctatgcaaccaagatattgaatatggttcgaaagatgataattgtgcgtttaaaattcgcgtctgtgttttggactcatctcttgtgcttgaagaaagatccaattagcattttttggaccaatctcaagcagcaaatttttttaacttggctttgacctctcttgttcaacagttgttaatttggctctgatttgactaacctgcaaatcaatctactcttcttattagacaccgtcccaaatcattctctgcgtcttaaataaagaaatttactcgctaacgtccattagttgcggtgagagcaattgcagaaatccaacttgcacgttgaacgatttgaactgttgaactcgttagatgatactactatggaaattacaaagcaggtggacgaggacaagtattgcaatatggtaaaggattgcaggagttgggacagattttcatgtttgaaccccttttttgtgtgaacacgaatgtggaatgacgactggtcccaaattttattacaagcggttacttatgaaaacaaaggatataatgttagtgaatgatccaacaagtaaagcaaccatagcttggggacacaatacaaaacacgtttcgaaagaaaatcaaatggatggattcagtaattcccacgaacaaattctgaagcagcgttgaagaaacctttcctcattttggtttactgagatggtttctcctcttctttcttggaggataaatacctgtcatttaagcacatttgtggaatttcacgagtgagcaacgaaaacaggttaaagctagacttaagaagcaattgcataaatagtgtacataggattcagaaacctggttttatctgttaagctttttaattcaaaacagtaatctaaaagcgaacttgtttccaaaggctagtgattcattttacggtgcatttgttcacgtactgtatataatctacactcggacatatgactctctgagatagagaactttacccctgggctctagcccaacgtgagagctgatagagttgtacagtctcgtttgatgcatggcacgcaagtagcaaatagttacgtggttgcaccatccaggcaaacctcatgaacaatgcagagtaaacgcacatagctgtacaaagaaattcaaaagatgacgtgagaggcttagctaataatgttgcatataagagcagtctcttttatcatacctgacgacatgtttccagaaatcatttcagggggcttttgcatatccaccaaaccctatagtgaaatcaattcgaaaactataatgaatcacccaaaaagatggatagaataaaaaaagacatggaaagagaaaacatacagcagcaacaaaaccccaattagcgataggcccccagaaatgagttgtttttgggccaatgggactgttcaagaatgcttggaaccttgatgtagccatttctactgaaatcaagaattgtgaaagctgattatcacaaaaccatcatttcgagttcaggatatgagaaagctagataagactaatgatttcaataatacagtttttttgtgaatgtcaactactaagtgtgataagtaaattggtcaacacagattctgtctaaacttcgaaaaaagagcccatagagatgaaataaagcacatacaggatttgattggagaatcaaaacacacttttacttaacataaagccaaatccatcatatcaaaaaatcttatatcacaagcacattaagaaacccagagccggttgtgaggcaattgcacagagccctcgaattttacgaattctcgacaaaaccactccataaagttacataaacatcacaattcgtttcgattcccaatcttaaatcttttatggccatatgatgacgacatagaaaccgaagaattaggttagaatcaatcttgttatttgattcttcctaagactatctactttgagatcgacactaacctgatgggattcgaaagcccgattggtctgagaggaaaatcgaagaagcttgtccccaaatgaaacgagttggtgagggaatattaagacagagcgacgaagaacaacacaagtcaaaagctaaatgggtttgggcttcgtttacttttttgccaaatgaaaatatattaattaatggatatggtcggttcggttagccaaaccggagatataaaatcctaggaaaatgtcactcacaaaatgtactagtaatcactaatcagctttagaattaaatacaagctgagataaacaaaataaaagcactaaagcaattttcaagaagcgaaaaacttattttaagacgtgcatgaaaagtcaatcttcgagagttgatttcattttcatcggttttgaacaatgtttgtggaagacaccaacgtttcataatgctccatcatatatacatgtcattcatagtcatactaacgcttttagttctgcattgaattcgtctctaacttttacttcctatgaagaacatcaaaagatatcattacccgtcaaagaaccattacaccagtcaccacgtccatgatactccattgtcagtggtagaggaaggttctttcgaggtgaaaagtaaacacttgatttgcatacctaccaatacggaggaattttactcattgtgtgtgatactgatacaatattggaaggtttccgatccactctagctataagaaagatccttttcattactcttttttcaaatgaaacaagaatatatattatacatcaagaacgggttctctggaaatggttgccgctacaacatatcatatagtttgagaatatcgaagccaccagaaaacatttaggtactgatgggattgacgatatttagtctcttagaccaactccagtagtttcttagtaaaaactcatacaattaaaaaaaataaaaatattgaaaagttaagaaacagatgagagagaatctctaaaattcctaatattatgatcgtttctattacttatataccttgtttttttggttttttagatgtaaaaataaaatattaatactttttgtttttttagaaactacataaatttgatacgctggagttgctcttagaccatctttatgggtgaatctaagtccagatttaaagcccaatagatccgaaaaataaatcgaaaatgatagtaaacaatggatccgagtccatttttggatttttagcccacctttggatccgagtacgtgtcaatttttcattgatcaaacgttctgtattacacaaaaataatccctactttttatcctatattcctatttttggttatcctatattcctatttttgataaacaatctcattttaccaaatattgttagtttaaaactttaaactacagatatgaaaccataataagaaaataattatgaaaagaaaaagtaaacaaattaaaaagaaaacttccaacttaacaattaaaaccaaaataaaaagaaaacttccaaaaaggaaaacaagtaataacaagaagaaaaaaacatagtttcccataatcaattaatatgcttgttttacgttttcttccttgacaaaattcacaattccattgaaagagagaagagaaaagatggcgttgcagagatcaacagcgtcgtttaggagacaaggatcgtcaggactcatctggaacgacaggttcttgagcggagaaattcgcaacgacgaaagacaagaagaccggtgcaacgatcatcgtgacggatcaatggctgctacgactgcaacagtgaaacgtagcgcatcagacggaggatgtggccatggtggaagattgggggagctatctccagcgttggatccaccttcacctaaaatatctgccgttggttgtggcttttgttctttgttttcgtctaatgggaaaagaagaagcagaggcaggagaagatcaagcggtggaagtacttaatttatctttaaacggtaattaatgaacataatttaaacgattatgagatcatatttaggatttgattatgttcttctctctttatgtaaaaatttcgaaatcttgatggataaagcctaggaatggcttttggtttcaagagaaggcttatttatagattgatccttacgaaaatgtgtttgtttgtttgttttcatcgatttatcaatcaagtaaggagtcttctaagaatctgttttggaattagtcatgatgctagagaccaaaatagtttgaatggtatttctgaatgtaagaagcttacgtcaaggatacaatagttggtaaattctaatgtatctgaatttctagcattcttgttttgttgaattcacttcacaaaacaaaaatctagaaagaggaaaatttgacgagaacttctctttgtaaacctgcccgtggtggtgatattggttcttaagaccaaggatagaactcactacatacccggttttgataccaccgtgaatattgtgcatggacgacgtggttacttaggtttctgcccgaacgctttatttgtggtggatttacggaaaactctttactaacgatgaagatcatattccgatcccgatgctacatttataaaaataaattaacctcttacccctcaactcctagctacgttgtttttcttttcaacgatatgaaacttttggtgttatgtaagactcaataggacctctcatacaacgagtagaaagtcgaaataaagtacaaaggcttgtttatgctatcgctctaggattttttccccaatcactagtggtgtccttatgagctacttcatgcggaaatgaatgattcaccaacctttcgcctactatgatatgctcacattcgaatctttaataaaaatcatttgatttcttccatctttgaggaaacagatttaattgtttttccaacttatgattatatatatttaaaaacatagtaataatgaatttacagtaagccttttgattaccattggtataagttgttacaacctaaagaagaaaatcaatggggagaagcaggacgaactttggttttgaagaggagaacgtagagtttgtccattgagaaataaataaaacaacctgtcgaatgtgtcacaaacgacccgaaacttgatcccactatgcaatgccatgctggtccataccctttgtcaaactcctgcataaaaaaatttcatatctcacttacatcaaaatagataaacattttctattgaaaatttgatcctttttacaacaaaagatcttatagtcaataatccttaacgtgaagtttgagagagagagagagacaaaagaggaatccaaaaaaataagtgtaagaaaagggataagggtggaagaggaccacatggctctgttgggtcattccccctttgatgcccttctcaatattagctggaccatttccccatcactctgttttattatttaattctagtaatcactcttccatccattttttttgagatccaaaacttatataattcaatattctgcagcccatataacaccggtcatttgtttgatattgacatcaaatatcatgaaaaaagcaattggttaagacttaagagagatgatgtgtcattttcctatcatactttgtagtcatgtgaaaacttttaatgacttagcgacaattagtaatttagatgttttaggtattagaaatgagtttctgcctagttgttcgtttatatgtggcttgaacgaaaaaaccaatacaagctatctttgtctcatcaatttgtatgcccattccatttatttaatcttctccaataatttaaaattcacaaacaaactttataggtattctaaaactgtaaattgttgcgccaaaaacacaaaacaacttcaaacactcaatattttttttctttgtcaacaacttaaatataactaaaacggttcaaatactcaaaccaatatttcaaaagaaaatatatacatatatttacaaagaaaaatcggataaatcataaactgaactagactattatgattggttaaatgcaaattttggtttacaaacctatttaaagatatcatctaaaataacaaaaaccatattttagtgacactgtaagttttggtattatcaattttctttttgtctttttcttcatgaaaatcagcctcttgtgatataaaaactattcatgcatatgtaaacaaatgatttaaataggagaaaaggacaaaaagaaaagcagaaaggaagaaaaaaagggttaccttcttgagattgaaagccatgtgcttcgaactaaacttctccaaactatctaaagtcattctcgcacacctaaacgcatgtgcctgcataaaccccggcatgtccgcagctagtatcctcaccgtcaacatctccgccgctgcctctatcctcgccgccgtatccctctccacgtgagacaccgattttctcccctcctccgccgcgccaccgcctttctttctttcattatttctactacaagtagtctctaactcgaatatatccctcatcacatggttttgatgacttttattcgactggacgattggtttttcttctacttcttgttgagatattgatggtgtactgatcgggatctttggtttggatttagggtttatgagtgagtgtttcgacgaagtgattgagaatttgtagaagttcatgagacttttcttcttcgactttttgggtctctcttcattcattgtttttgttattttttcgtaataatatttgtggaaactctttagtggctcatatgcgttatttatacggaagagtcagagacagaaatgagtccgctctctattattattaattctgtcgagtttgcaattgaatatatagcacaatgtaattttattcatcaatataacataattattttataatccaatggattgcatcctatgcgtaccatttctaacattttcttatgattttttatttgttggtttgcagaaggataataattgaaatcggaactagctaggattgtacaaaatattaactaatctaccgtcacatgtgcataatttgcctagcaacatctaagaaaaggttattatatattagttttagttttggacaataattgttttgataaaacacaaacttcaaacataaaaacagcaataatccttaatcagaatcaatgaggcagtacctcccaatgagacagtacctcccaattggagctagttaaagtggcaatgccgcgccgacttaagggctatcggctagaaaaaactcatgagtatgagatgatcgagaatctaagtggtgtgatacaagatcaacactaataacaaaccactacgttatattgcaagtcatggtcaaattcgtcgtaatttaataactgagtaatagccatttaatataccccaaaattaattaactcggccgtaccaagaccaagacaataataagagtggaacaaatcaaataatgtggtttagaaagtgaatacggtgatttatagaatcaaaccatgtggcttgttctaagtcaagtgaaattagcctcttatttcttgtcaacaagtgtaatcaatatatatcttggagatgtttgtttaataagttaaatattgttttgttgaaacaacacttactgttctcaaacactgtttccgggtccccaaatctgatattttattagtcgttaaccttatcgatttatgctcatcaaatcaggacccggtcatatatggaccctcttggctcgtgaacttccaaccaagtttagtaggggtcttataagacaatttgaattaacaaagaatttttgtgcatttgtttggtttatatatggtggggtttttaaaatctatatcaatcttgatagtatttatggtagtgcacaacaaaacataattgaattccaatataatttaaaattatgtattagctacagattttttatggttgaggggtaaaatccgtagtgaactcgaatttagtcacatatgaccaccggttaactatgtggttatagcataggtcaatggtttcaaaaatgcaacgtaaagtagtcaccgtgaaaatttgtgggtatgacaaaagatttgtcacgaatacgttagttttctcactaaaaagtggtggccaaaaagttatttctgaagcacttgcatacttgtggctaaatactactctttggccattttagctaagtaaataagtaatcactatatagccacaataggttggtcatgtttatgttttttcttaaccgttgggattccaaaggtttcctacatccaaaaaactaatcgtatgaggctttggatctggatacacgttcgaaaatatttcaaatttaaagcacgggtaggtggccaaaatgactcgaacccaaaattctcccagttgggagtggttaatattagtggctacatagaaaacacatggctacaaatatttagtggttacttgctactaccttagttactaataatgtataacgaaatgttaaaataattaattaagtatacagatttatttgcaagaagacatgtgtcgtttcaaacaaccataactctcctttatcgcataacttaagatcatgattttttttgttccattataaacttgactcaaagatatttgattcacttaacttgaaaaagtttgataaagctaaaaacctaattatcctttcaagttgtggagagactaaaaacgacaaatttcatgtgattcttgctacaaaagtgttacctaaaccgtaacagaaaaataaagatcgcaatttaatgggactactagtgatgtttatctgtttttaactttttatcatagaagaaagaaagcaaaacgacgtcgtttcgttaaaatctgctttgaaaacggttcagttgccagactctctcaaaacgcttcagtctccaaggaacctaaaaaagcttcctttttgggacgaagtttcttagagaatttgtgattccgattcttagggttttcaccaagcgttccttcgcgacgagctctcaatttttgaggttattgatttcttcttctgatcgaattttccgtatctgctagtgaattc

SEQ ID NO: 1454 - DNA, 103252 bp, Arabidopsis thaliana
gaattcttctttctcagctcagggtttctcaattctccgttctcgatctcttgatacgatcgatctttcgaattgaatccatttgtcaatttttcgttgcagtctcgttggcggcgcaatcatcatagactttgggggatcgcttgtaatgagacgaatttcaaagtttggtatcttttacttgcctgaattgaccaattcgacttttatatagagacgtctattagggttttgtgttgctaaggaggtgggattattgtgtactagagggttcttttagcttctaggaacatgtctggtggaactccagttggtggtggtgggtacattaggcaaagacatagccaaggttatgcttctggtggtgatgatcttgaggatgatgcttgctctaggccacagcctttttctttagagaatcctagaagtaaaacctgggttgagattttggagaatgtgctttggattgcatctgctgtcttcattgtctattttggagacaggcactctaatatgatacatattctcttacgtgatgctcggatcaaaaggtaacatatttcttgatgggctcttttcactttgctcttttttggattattgcttgtgttatatatggctaaaaagaaaacatatgtggctcactttaaacttgaagatggccctagaggtttgaagtcaatattcttggttatgatggtttattgtcaaaaatggtgtgggaaaatgtagcttctcttgtcatggtttggtgtagtttactgagatttcaacattgtttgggatgatggttcttgctgaaaaccaaaataaacataatgcattcattggccttgtttccaggatgcctttgtatttcgggatgttgggaatagctgtgaacattataatcataatctacgaaagcatgttatcttggagcatgagaaggtttgatgagaaatgggaactgtggagtatctctgctctgcctttcatcaccctactcggcatcatttcatttggcctgtaagtaaatcacattttctagtcaatcaggaactacgcgagtctcataatagttatgtgtgacaaaatttgcaaaatgcaggctctcctttgctctgtggcctatatggggcttcttgactctcccccttctggtatgatctcagtccataataaactcgtccttgtagacaatctcatctggttatgaatatattggtttttttttttttttgatgatatgcagttcacattgttcatggcatgccttgttgtgttcccacatctcatgatcatcaaattcaggcctcaaaacgacgaactccgcatagattgatctgtagagaatggagatagtgttattgggaacgttgaaacccttttgttattcagaagtcaataaatctgaaagtgaagggggaatttgttggtttgtggtatatagatagatgaactcattgatcaatagggatctttttttctctttactgtttttggtctctgagattggttcatgtcttgtttcgtttctgagttcagtgaagtgaaaaatattctcattcagtctccttcaaactctagttttcgacgaattcaatctgtagggtaaaacatttgtagtagagaaggctcataagctataagactacaacaagcctacaaagccacaattttactaagagacaggaatctaaagaatgcaaagggtaagagtaaaaaattctatggatcagaaaacaaattagtcatgctaaccttcattttatttaaagttttttatttttgtcattaaaatccaaaaaacaaaagcaaatgctaccaatacaacagactacaaaatgtaggagaaatttggtgaaagcattattgtggtgggataagggagaggaagagagagcgatgggacacgtaacgaggctattgataaacccttcgtcttcctcgccacttctccacctccgttgttgccaccggactcttgaccctaactctgtcttctctcttcgaacctcaatcaccaaaagcaagggacgattctcttgtcttttctccggcggcaaccagagagaggttagttttcttacttacttcccttgattcttcgaaaggacaaatcttgtagaatctgctgaacccaatcagagcgtacataacatggggtcgaattgtctgactctttttgaatggtcttactcaattaattatgcttgttactgataaggttctgaacaagtttagcagctcaactcttagctatatgtctactgtatctagtctaggactgggtgtagcagattagatccgctgtgagttagattcgagagtaggagtttcataagtttgtgttgattggccatttggctgagagtttcaagttcctctttaatcaactctctctggtttggtgaattcgtatgagaatagcagttggttagcaataacttcattccaggaagtacaaaaacccacactttctatctctctgaatgaaaagttttatgacagagcgacaaaactaaagagagacagataagaggtagcttcatgatttggtggctaatactctgccgttcgatttccttgattgtgcaggagcaagctcgtaaatcattggaaagcgctcttggtgggaagaagaatgagtttgagaagtgggacaaagagatcaagaaaagagaagaatccggtggcggaaatggtggtaaaggtggaggaggaggaggttggtttggaggtggtggttggtttagtggcgaccatttctggaaagaggcacaacagattgcctttaccctcttagcaatacttgccgtggtatgctttaagtaaatgtatttggtctttcatgaataagactttttgttgttgatggttttgaattgtttaatggttgctgcagtatatggtggttgcgaaaggtgaagtcatggctgcatttgtgttaaacccgttgttgtatgcgttgcgaggaacacgggaaggtttgtcttctctaagctccaaactcatgggaagagaagcttccaaagtgagtggtgacaactcagaggagatgtggaagaaggaaggttccactgctaaagagagcgttgtccggaaatggggaagtgactgaaacacaattcttaaagctgactcaagaagaatgactttgggtgtttttgtaacatcaagatgagataatatgcaatcgaccttttcagttttgtaatggaggataggtattttctgtgaacaagaaagagtgactctgtttgtaacttccatcatccatttttttaacatcaagaggagagcaaatatgtctcatagataaatgcttgtccacaaataatgagcaagcttaatgttgtagcctgtaggtttgtgtctatacagcttttctgtcgtcgcaatcttaaaattataaagtagatggaacctctacatacgtcttatggtaacatttggccaagctctagctaatccagactgaaatcttcaagccatatgataacttcgttcctctgcaaatgcaagacaatcacaaagaacagatgagagccacgaatcagacgaaaatgatagaacctgcgactgaagacaatgatcaaaccatcatttgggtatgtcatgatgataataattaaaagaaataagactaatagatggtttctaactagacatcaaatattgctaaagcttggaatcataccattatgaagttccatgttcgtcctggatcgttgtaacgagcaagcatacaacctttcttagctctcagaccatctttactcagactgctcctcagttcattctcttttgcttggacaacatcctctgtcggtttaccactgaatttcactgctgcagcaaaaccgccttccaacttcttcaaatttaccttttcttcattaggcattggtaagctagaggaaaaaggaaagcaaaaccattctcatcacacaatgattctcattaaccatatctgatgtcaactaaaaaactatccatgataaggctttacctgctaagatcttttcctgatggaataacaatttgtacagagacatcagaagagagttgagtatctgttgtttgagtaaacactggagttgtcattggtattttctccatggtcgagttctttccaaatatgtagcttcataggtaaaaaagctagcatgtgttacatttatcaaaataaaacaagatgccagaagaatttatggacactcacagaaacttagacttaaccctcacccagcaacattgttgaaacctgaagaaccagaaagcttgtcaccaattgtctccaccacaatgaagggctcatagtttctaacctgccaaacaatcaaatccaacttaaggcaagcaaccacatttgcatagttggttccattaagccaatacatgaagatatgtgacctcatagtttgctgttcttttcagtatttgatactttggagtttccaagtctggcgttttatatatccgtaactgcaaaaaaaggtagtacttgtaagatatgattaaccatttctaagggggctcaattcatgccaaatgccaagaaagcaacctgcttaaaaacatcaacaagaccttcaagagaaaagtagtcattgttcttgatagaatcccacaagtcctgcacaacatctacttgtaataagtagaccataccacaatagattttggaagaaggacatggcaaccatacataccagatgactacaaaatttgttagtttcaggattaacttccatgattgataatccagtgaagacaagttctggtttccatggtaaaggtatgaacttcatcaccattgtccatctcgtagtgatctcatatggacctgtctatatatcagctgcatcagtgaacttaaaaaaaactagaattaaagaaatcaaatgataaacaaaagttagcaaagacctgtttagcccagtgaagctgaaactgaggagtgaagatattcttgaggaaagcaatgttgaagagatagccagagatggtgtcgtgcttagtgattgggtctctgaacttcacgcgctcatcgtacgccgttttatcgattccttggtcgtcgaaaaggtgaggaagatcctcgtacaagaatccgacgagctcttccatgttcactgtcgacggtgctgaagccacttccttgcccacctcaagactcaaaattggccgtagacgagtggttacgttgcgtctcggaacagggaggaaacgggtggttacatgccgccggcagtcacttccgacggcggtgagtattggccggtaaagctgctgattaacggtagccattgatcgttgataaaaaagttttctgctctattttatttcttgtggttgttcgctttcatttaacaatcggttcttttttggtactgtcggttcggtttggttctggttttatttacgaaccaaactaaatttgtttcggttaaaattcagatttttttttcactctttaggcttttttcattatggaactttgacttaacgaggcccattccatttgggctactggagggaacttaactccaacaatggattactttgcttgcatacattaattacatacgtacccagaaatgagacagagacacgaaagtttcgattatacggcaaagtaaatattgttttagtttatccgtcaaagattgtaaagaatacgacgaccatgtcataaggatttggactttggttgtttgactaataaactgatagtcttcttaataaatataaattgacaagttgtaaaatcagcagaatttgctgcatatagacaatgtcaaatggaccggtggtttatcctaaatgtcaaaatcagaagctaataatgagcaaatgtgaatgaattaagacgcgaatcgggaaaattcaataaattgtccattggggggtgctttaaagaaagattgaaagatgccgaggtttatacccttttcctatcaagaatattccatggaatccaactacttttgacccatttgcgtatttgttaaatcttttcagaaaatcaaaagtgggtaaattgtcaaactagttgtagtattgaactactatttattgatcatgccatcatcatggagagacagatatgatcatgaagaccaaacgtccacgtatttatgtcatgacgacaatctgagctggatttgaggatatctgtaactgtaaatactatatccaatattcattttttttactttgcaattcgtttttgattaaatctaaaaatgcaaaaaaaataaaaaatcactactacatagtgtatctgcatgtataaatagacatatatttttaaaaagatgatttaatacatactgtacatagttatgaagatatcatgaacatatatagacaataccaaataaggaaatctaatatcgtaaaatatttaaatatcagatgaatacagtacaaactctaaagaaaatgaatcaagatattagtacgatacccatacgaatttagaaaaaaatgaatcagataaatggatataaaatctgtaatattatttttctttttttggacagcaaatctgtaataataagtattggataaataaattggcatgtgagttgtgattgatatttatgaactgacataggcatgtgttataatctcacccacagataaccacgaaaaagtaataaataagaaaggaataaaaggaagatattctcccgaaagaaagacagagaaaaaaggatattctaattagaaaccttaagaatattctttttaatcccttttatatctctaaacctcttccccctctctttcttcttcattcatcattctcacttaagtttcccagaaaataaaagagctatgaagtttggtaagagtctcagcaatcagatcgagcaaactcttcctgaatggcaagacaagttcttgtcttacaaagaactcaaaaaacgactcaaactcatcggttccaaaaccgccgatcgtcccgttaaacgactccgtttagatgagttttccgtcggaatatcgaaagaagagatcaatttcatccaattgttagaagacgagttggagaaattcaacaatttcttcgttgagaaggaagaagaatatatcatcagactaaaggtaatataaacaacatttcgaatccgattcctaaaaatgatcatctctttttctaatgtgtctctgtctgtacaaaaacaggaatttagagatagaattgcgaaagctaaggattcaatggagaagatgataaaaatcaggaaggagattgttgatttccatggagaaatggttcttcttgagaattacagtgctcttaattacactggtaatttaatttaattgcctcattaagacttaatcttattattagtagtagaacaaaacgttgatgaatggtttgttgaaacaacaggattggttaagatactgaagaagtatgacaaaagaactggtgatctcatgcgtttacctttcatccagaaagttcttcagcaacctttttacactactgacttattgttcaagcttgtcaaggaatctgaggcaatgcttgatcagatcttccctgctaacgaaactgagtctgagattatccaagcagagttatcagagcataagttcatggagagtcttcatatgaagagcacaatcgctgccttgcgggttttgaaggagatcaggagtggaagttctactgttagtgtgttttcattgccgcctctacagttaaatggcttagatgagacatggaagaagattccattgttggagcaagaagccaaatagagagtgagacagaggcacactcgctctattccacttttttatacaatagaagaagctaacagattaaacaagacattatcatcaatgtacacaaaaaggcagaagaaactataggatcatgtttctggatatcatctttggtcggtcataagtccttaggttacacaaaactgcaatgtaactttgtttctgtgttgggtgtgttgtagttgatgtaatatataccacttcagattaattattgatttcttcttttccaaagtcatatgctagatatttcaagttctctactactacatatacaagttcataatcctcttcaagaagaaatgatgactgcaaatgatactagtgactcgatctcaattcaaggtaagactttgcataatgcaacagaccaattgatttcgtattcaatctcaattcaagtccttcaatttttatttcaatttttttgttcgttttgtgatagatatcaaaacaagttcttataaataacacaatgattcgctacaaaccaaaaccagaaaccaacacaaattcttaagaaaccaagttgcagaaaagtgaattacgttacaaacttgaagagaagatagtagaataatggacggtttttgatttggtagttgcctaaacaaaacttcagtcaaagccttcccattcgcggagacccatcataccgagcaatcaattcagagaatgccttagatcagaagcttctcaatagcatcctgaagaaatgtaaaaaaagagttaatgattaaccaattctgtggaatcaatgatggttcaaggttataaagagagtacacaagtgagggctaagttaccttgagatgttgaatctgtgatttcaattgactagcttcgttagatgtgactgaacaagcgataacaggtctagtcacaccacaggctcttcccaaggcttgctttgaaggcacaaagacataaggaacattctacaaaacattcacaaagaaagtaagaatatagaaaactagtatataagaacaacaaagcattacagaatcaaaaacatacaagctaaacaaaatcataaaagacaatcataaagctgtcattttaaactccaacaagtatgaaatcagagtttagttaacaaaatgatatacaaaacttggctgaacattggcacaaactaatcaaactatatcctcagcaagtaaacttaattctcttctatgaactaaggaaacaaatatctcatttgctaaataaactggtgtataataaaagagaaacccagagaaagaagaagtcaaaccttatcctcagcaagtaggggaagatgaagaagaatctctagaggctcagcatctgcagccatgacaacaaactcggagattccacgattaagagtcttcgtagctgaaatgaacaaatttaaataaatcaggaacaacttcacaaacattaaactcaataaataagagagacaaacacacatgagtaacaagcggataccttcattagcacccttcttgagctgcttgtagttagtagcttgttgaacgaggtcaagaattgttatcgataactgagaatctgcaagcggatacgctttagggttgacgacttctccggtctgcaagaagaaacgaaaacaaaaacaaattaaaacccaaatcagacaatcaaagagtaagattccttcgaaaacactgcaagataataccgaaaagaagaaagaggaagagagaagtaccattttcagctgcgatgtctagggtttcagagaggattagggttttagaggctacgactttctcagcttgaatattctgaatgataacttaggcttacgctgttacttatatgcttgtcgattttatacatctttttaatgggcctgggtgatgatatacttcggcccatgtgaactaaccttaaccgacagaactagttttgactttgggagtttggttttttagtttcttcttttgtcggcgaaattttgattaaagcccaaaagggtaaccatgacttcacctttgttctttttgctcgcataaaactgatcgattatccaaattgactgataattttacagctaccacacacacaacaaacttttattaactgatgctctcattagttcaatgaaattagtaaacttgaagttacgtatgtgattactctcttcctttacgacaaagatgcgttttattagctggttctggtgtcttatgctctactaatttctatggttgagctttatggacttgtctccacattaaaataacagacacaatttgttccaaatacaagaccatatccataatccaaagaggataatattctactctttcagtttcatcaacaaccccttggaatcttttgcatacagaaaaatgagcatcccaaagaagtaaaaatctacaagaactggatatgtaagaagttgacactcaaaagaaaatgatcgacacacccatcatgaagcatccagcggagacccaagggctcaaacgctcacctggtacaagtgatgacaaagcaaagttaagcaacagaatgttcggcgatggaaaacaaatggcagtaaaagtaggaggatatagacttaactatatgccatcatgcatatgcttaaataggagatcgaccatgggttttaaagcattagaatctggtattcatgagttgaatttatagtacaattgttagtagctgcattgattagtaacgagttcttgctcctagaaagcctatcactactttctatagaacacatgcaaagaaatattgttcaacacaatgtttttagaaaggttttgaaatcacaagagataactgagctccaaaggggtgaaaaggcctacctattctagcagccttccagaaaaatcctcgaaacctgcaatagtaattaatcaagcaatttctatcattaatatgcatagaacaaagtgatgactgagggcattagatgcaagctataaatacaaaaaaagcactaggatgaagtaacatttgcaatctaaagtaacaatatgcagagaaatctgacaaagcatctttaatttggcaaaagacaatgcttgaaaacaataaccggtgtcaaagctccaaatgtgttagtgttatcggttttgagaataaaattcacgaaaaaggagaacaaagaaggtacaaacccagttttctgctctaaaatggcagggaactgcatcttcagatatgtgcatgtgcagatcacaagcagcaccaccgtcagaaacgaatggaaattgaacaaagctgactgaatttatcaaagataaacaaaactcttagctcaaaatcactgaaattaacaaaatttaacaatggaacagagaaggcaataactaccattgtatcggatcactgaagcacttgagaagctaataattgtttccttgaatctgaaataaccagaagaaaaaaaacaataatgggaatcacatgagaatcgattcgaagacacagacatgcccaagaagaatcataactaaacacatgaaaaactgagcaagtacaattatcgtcaaaacctaacaatttatcactaccgagatttgtagaagaataatcaagggaatatgttcatctattcgtcactaataaatcagatttactatatatagaagcatctgtgaatttcataattatcagatcatatagtgaatccaactccataacggtgactctctctcgagagagcagcaaatcagaaaattgagaaatatcgatcggtggatgggatgatacaaaaaaagggaacagcaaacctgaagttgagctgaaatcgatgctaatggctagagaaattagggttttgaagcttgaatcttagcaaaacagatcagcgagacgtcaagagagggatcgagagacggaggagagaaacgttcgcgtcagagttattctcgttttctctacatatttccaattctacccctttcttcctttaagtactaaagtcattatgatttcaaagattttttaaaaaagaaaaattgataatattatttgaaataaagatgttttataataatcatcaatccttaatccataaaatccacatttccaactattcaaaaaagtgatgtttgggctagacactagagtctcactaaaccattgtaatctacaaatcttgaagaactaaacatgttcactacttgtctttcagcatttacaatctctctaaagcattgcgaccagtaccacacaagttgatcaaatccatgagaacagagtacaagacatccagagacaaatgacccaacaacttcctactctccgacactccttccctctcctctgtgcatccattctccatcactagccaccacgagatgcatccttttgcgtcttccgggtttacatgcgccaccaggctcactctctccccttccactatctctaacgatagtgacagaaattccctgctcgcttttgtccctaccgtccgtgcttcctccagtagccaacacactatctggctcgccaccttctcaaataaataaaccgcgtgtttaagggaccgtgttgctatagacatgatcaactttaggaaacgaaagaacatacctgttggagaatcatcacgggaaggtcggccacgtcgcactcgtatttgtttatagagaatagattgcaggaactgcttttgagtaagccaaccacattgggcgtgcattccgcttcaacactaatacaatcatccttcaccaccacttttgtccggaactgcgtcttaagattcctcttaccatcaggagactgggtttcagaccttccttgggggatgattgatggaggaacagtcatgaagacagtccatgacgatgtccgagaattccatgtaggatgagatatcagatgaagatacgggaccttgcagacctgttcaatgaggaagtaaccattttttttaaagcatgatcaaagatgacaacaagtttcttgatagagaaggatcattcaataaagtttagcacatcagggaaaataccacgctttcaagatgcacaagaactctatttgagaagattctatgagtcaaagataagcagaaatggtcaagaagtccggagttgctgtccttttctgtttgattggatgctctgatactttttgacttgagctgatctttagcttttccaaaggcatgctcgtgaaaaatttgttgcaagtatatttcatagctggtgcgattagggaaccctagcttcttcaagcgatagtctcctccttctgctggttctactctgccagatgattcaatgagcaaggttgcagattccgacttcttgatgctgggatttttgcctgatgggtggagagacacaaacagagaagctccttggccgatgctcatttccataaaattttctcgtagtccacttatgttgaatcccacaccttcattgaatgcttcacgatttagcatgtcaaacaactggtaagaagaccaaagaagtgagaaatagtcgtgaagagatataccaagcgtactacaagatatatgacaaaaataccacctgctcagcaaaaattgatttatgcacctccctcagtagcgaatgagtttctttaacatatttgtcgtcacttgcagacaacttctctgatgttccagggatatcgtgaccagtagtcgagtctatgtgctcatcagattcgtttgagttgccaatcggatttaagccaacatacccaaaccgaagagagtaccatgaatcttggggtacattaatggccagcataccagctgaatcatgatctacacgaatagtggacagtgtagatgggcgaaaaccagaagtcggatcatataatgaactgtcagaaagatcaatggtgaagccctcattgctggcatttgaagcaagcatgcgttgtcgcttgactttccagttccgctgcaacctataagcttgttagtatagcaaaaataaccatttgcacgtataaatcaatctctattttggaagctgaagtcagcttatcattttatacaaattatgagcaatttcaacggaaattctctaatttgtgttggcataatcttaagcagtcactacacaacaaaatggatgttcctgaagtactgtactatgcaggttcagtaacagagacggtgtagaagtcaaaatttagaactttttcacattagacaagaataataaaatgctttcacgtttatcagtcataagtcataacatattacaaaacctacgtgcgtaataactctacatccaaaattcggacgctaattatctgtgcacaacacaaatagctatgacattgtaagctacctaaaactagtatcaagaatgcaaacaacaaattcttaaaagttgcaaaatagtactaaggaaaatagccactgacattaaatgaaaagcaagtactcgaacctgataagagcaccataaaaccttgcttcacgattgattttctgctctaaagcttttgctgattgtttaaagtagtttcctaaattctgcagaggaaacagatattcagaagtgagataagcataccatccaaagacaattatatagttaaaaagctctttacgaaaccaagttaatgtttccaacagtttctcaggatactaaaaagtgcctaactaataacaattacaagaatccttccatctttaagcaaagttaaattgcacataagaaagtaagctactgattacccggtagccctgcagcttggtagcagtagacacagcaagatccgagagaatctcattcggcatcggcttaggtctggtcatcccagcaactgttactgcatcatttgcttggaccttcaaagataaaatcagaagataaattgtttaagttttactctctattcaaatatcagaaaccaaacttcagctccttccattcaaaccaataaaacagacactgtaagagctatgaatatcccaaaattcttatctattatcaacaagagtcactcactgtgtcgataaggtcaatgatgacagtgagctcctgatgagccaattgcaaattctcaaccattcccttccatttccattgctccacgctatccttggagcttttcttctgcttcttcttcttcagctcatcttcctcttccaacgcccacgcgaagtctattctccgaatcagcgatactctcttatcatcgtaatcaacatcactacacgtcaaaaacaaaaggaataatttagaagcaaaacaatctgggaagattttgtctcgtttctcaaacaccagacaacacttacgaaggaaaacgctcggcgccattttcttcgatagattccaatcgtttaatgggaagcctgtcgagagagatttccatgtcgctatccatatcgtacagaaaaaaatcttcccggtcaaaaattcagattttctaggtcgacggtaacacagtccggccaaatcgcttcaacgctccaaatcggatatttagatctaataatccgggtcaaaaaaattccggatcatttttacgggtaaagcccattaaaagcccaaaatatgttgtactctgactgtgcaaaactcctccgtaaaaccctttcatttgcatttgggaatcgattgctcttcttcgtagtcgcctttgaattcgcaggtatttttttgttcttcgcttgatgggttctcgttgattatcactcgatttcgtatctggatctattatagggttttctcttgtgtgattccgtgtagttagagatggatgcttcagattcgttttacttttgcttccatcatcggatcaactaaggattgcagtttttctggtagattaagtagaaatgatatgtttagaggatacaatccttagttttgaatcttaaagttgaatactttgaagagttctctttcattttcatctaatgagttttgtgttaatgatcggttgtgaattgcagagtgagaagcaatgaaggtgagatcatctgtgaagaagatgtgtgagttttgtaaaacagtgaaacgtcgtggacgtgtgtatgttatatgctcttccaatcctaagcacaagcaaagacaagggttcagttcctttgcttatgaaggaattacaccttcccctttgtaagtgaatcttgtatctggttttcgcttttgagtaattaggtgtctcattcggattttggacgggttaaatacagtgtatattgactactgtgaatcacttactacccaaattttgtcctatagaatcattgaatgaaaagtgaggatctatttagagtctgttgaacagttactaaaatacattatagtggaacatcacacagaagcatgaagcatgtgcacttgttttccttcgcagagttgagagtaacttacttaaaaagttatttgggattgtaaaacaggtttgctgagccgattgctagtcaggagttggtgaggctgcctggtcagggggtatcagccggactggcatcacttttacacaaaaggcctatgccaacagcgtatttcggatggaggtctggtcttgcatccattctcttcaaacaaggaaattaggatgtcagcatttccctttttattcttcagatttgtaatcgcagttttcttccaattcctatgaaacattattgtatatctctccacttttactttggtcagtcgtatgctccttcgagacctgtttgattgtgcctcgcatgacctgaacaaagagatatattatgacactcgagtatttgtttttacattttccactggagcatatgttagggatcaatatgtttttcttttagaaaactctggttagtgatatccacatcgattacatgccaaggaaatgagcaaattgtggttgaatttgtattgaccgcgtaccaagtagtttgaaatatgttgtggctcatttgcgcatgtttatagtcaaatttcactattccaaaatgaggctgcacaaagcacacccactaaatgcgaatcaaatacaatgaaactggagagacggagacttctcaacgacaacgacccttctctttctccaccgttgagcactcggctcgtaggtcctacgtggtggtgtgagaggtcacaggaagcccactctgataggcatatcccatgggccccgcttctggacagtactacttttggacataacaagccttctttattactttttgttgtagttttccctcagtcaaatcgttaacagcttcattccaaaaaaatcacctcaccaataattgtcatactctttcgtaatttccatttttgagctgcaattttaaccaattgatctcgagagataaccatcataattgtgtttctttcacaggaaacaaaaaatacgaaagggataattaatctactcaatatataaaattcagaaaggataatttctcaaaggttcaggattccttgccaatgaaaattaacatgatcttaatatatatatcatttgtttacttggactatatgacgtattggtcacggttgttcttgaataattgagttgttcacttgtcgtctgattaatgtgtttggttgaattctaactttaaagttttcagttaattgtcttcttgcaatttttagtttcagtatcgaacttttaatttgaatttggtagtttcggatttataatagtataaatttaagaatgatagtagaacttttatcaataaattgtcctgaaatttagtttggttttttagtacacaaagatgtatagatgatggtgtagtataaacctgcaaaatcaaattaaaatttgccgttgaattgagccaaaataagcactttcgtaatccttacattagttgtactatttttatcttattttgacacgagacgattcgttcagattctcgctgctaatccttacattagttgtactaccgaaaagttaaaagttagtatcaaagaccaaaaaacaaaaacaaatacactattggccatgttatcaacttagaaatgggacccaaaaaaaatcaaaagatagaaatggttatgggccaaagcgtcaattacaacattcgtgagccacatggaaccgtgaaccgtacaatcaaagaaggacccacccacccaattgatactcaaattacacatatacttacaattcaattttatttataaacaatatttgtgttttttgcacacatctacctataactacattgatacgttgtgcaaaagcaatgaacgaatctaccgtccatctgttacatttgcattaaaagagtttgtcccacgtgtcatttgtagaaagatcagccgtgaacctatattttctggtgacactgccgtccacttgcaattctgcgaccttcgtgaacttaatattccgcgttttgtaacttttgtgcacgagatttttatagcttagtagcaacgagcagagaagaatccgcagaccaatgatatacacaagcaaagtcaaattaaaaatcattttggtacaccacttggaaaatcaaaccaaccaaacaaaaaaaatctcggagaaagaaccaaaaactaattaacctagaaaatattaatttatgcttaaaacatccaccacgtgattaaaaactaatcgacggctgagattgcttttcctttaccttcctctctattaaaaagcaccgtcttcacttctcatccccagctcaaacaaacctggaaaacaacaaatctaagctttcttcttcctctaatcaaaacctaagaatctcctaattcagatccagaacgagagatgcttctacgaagcgcttcaacgccacttctaaactcattggttcatgtctcgagtccaagagattctccaatcgaaaccgttgaatctgttcatcagattcaacgacacagatccataacactctctgcgtcttcttcctcttgctgttatagcccgatgtctgtacactctagcgacgattcttcaaggaggatgaaaagaacggcgtcagatagcgatctacgacatttgacatcgacgaaaccgccggtgagtaagtttttgagcggtggtgctttgatggaggatgtggatgaaggaatcggattcggtcttatacgcacttcgtcttatgatggtataagttgggctttggatgaagatactgaggttgctggcggtggtggtggtgggatgtttcacggtggaggaaaaggaaggagtggtggtagatctgatggtggtgatggaggtgacgataacactgatgttcattatcgtaagatgattgaagctaatcctggaaatgggatttttctcagtaattatgctaaattcctgaaggaggtacagatttgtgtactttctagatctgaattgaattgaaattttgatttggcgattatcatattgagatgtgtcgtatgattgattgaaacaggttagaaaagattacttgaaagcagaggaatattgtgggagagctattctggtgagtcctaatgatgggaatgttctggctatgtacgctgagttggtttggaagatccataaggattcatctcgtgctgagaattacttcaatcaagctgttgcagctgctcctgaggactggtaagaaaaagattctaactttattaatcaagctctcttctttaggactttgatagtagttgtgtgactcttgtgcttgaattctgactaacgtacttgttgttttctgcagttatgtacaagcttcgtatgcacggtttctatgggatgctgaagaggaagaagaagaggaaaaggaagagagacatgaagaagaacttgagcatcaaacttctcgaatgaatttcttcaccggaccttctccaatcacggccatgtcttaaactcgtggtcggcattaccatcctttatagatttagataaacgtgtcacgtctatgattttattatctaacccttttgtttaatgtgaattctttagctaagcctttttatgggtatttctttactcggtgttagaatttgtctcagttgtagtaataccactgaaagaataataagatatgcaataaacaatttgctttttggttggtgtaaatgagttggggttgtgatatttgctgaccggtcatagaaccaagcctgcacacaccaaacctattacaaaggagaacaactatgaatgaagatgactgctagttcttcttctgatgcaggaactatgtaggaattcagtgtcatgttagccattagaaaggctgagaatgttctcgttaggataacgaccggcgcctcttgttaaaacctacttgagtccgtaaaatcatgtcgaagagaaacctggtaacattaagtccatttagaggatttttaagctcagacagatagacaagggcagtgagctagctgtccatgagacctgaagtttgtagactttgatcagcagaatagggtatttgactttagagaagcaactttctgtagctgagaagcaacttcctgccgctggccgctctatcttgctcgatgtcagagttaaacgcaggggtatatcaggctcggctcacaggagatgggttagggggcagcaagagagtataatccatctcttttgaccaaaaaacttcaattgaactagacctatttttcataacactcttttaagatttacaaattagagaaataaattcctttttttctgtttaaacttttaggtattttataaggtttgttttaaaatgataaaatgtataggaaagcaaatgctgcgacaatctttcctctgcctaggcaacttaccatcgccccttgacgttagacgaatgaagtttccccatggtgtgtttagcaattcctaagccgctttgatcactatttagtgaggctgaagcgttacctttctcatttacaagcgtggaaccaaaatcacgcaaacctaagaccaaaatgtgtttgaatatttaactacatttgaaaaaaaagttagtaagcaaaatattttattttaaaaaatattctcacgaaaaaaaacacctagaatgtcatattaaaaccctaaaaaaatttcaagtaaactctaaacgttattaataactcccaaacctaaagttctaaacaaatggtttatttctttatcattagagattgttttcatttttttggttagataatcttttaattttgcttccacaatccacctaactcaattaaaaatgatcatgtttttattttccaatttccttcttcttttaaatttcttgatttgagaatctgaaaatcgattaaaagtatatatatatacaagattacaagttgtagaaaattgtcaaaagaaaaacacacatgaacagaacaaccctttgacttaaaaatagcgcaattacacttcagaatatattttctcgggataacaataaacaacagagagatttcttctataaggaagtggtaaattttttgagaaaggaacactgaaacaaagagagttcatggccactcaaggagaagcgacgttctccgcggccgcgacgacgacgtcgagctatccgacgggaggtgttggtggcaaattgaagcggcaatcggcgaggaggcatgcggcgacaccttattctcgaccaacacagaaccaggtacaacggaggccgtggatctcgagaatcgtcgatcctgcttatcggattatttccggcggcgctaccagaatacttccatatttcttctcgaacgccgcctccgctcctgctcttgctgctcctccagaggatcaaaatcaacatcaaggtttttggtctatcctttgctctttctagtctcgtattaaggcttttcttcctggaaaatttctgcagctttcggggtgtgttatatcaattgatctctatggtggtatatctgttctctgcttaggagtatctagggttttgttgaaattgtttcgatgctgtaaattagatgtgccaatcgccaggatagaagaaggttcttctggttttgattcaagtggaatttatagaagttaaagcttctctgtttgcgtttttgttcatgacttctaatggtcaagtaagatgattttgtcacccagtgtggtcttagtcttagcctctgttagtttttttttgctagcgagacacattgatactgaccagatgtatgctctggtgttactaaatttcttttagtgtcaagtgagtgatgggtttattacttgttggctcaaaaagtagtgtttgtaaaatatatagtgcaattgttatctcgactttgtgcaatgtatttacaatttagtacagagagatgagttattcgttcgagctgtcattgtttaacatttggctctctttatactaggtgagttgcagaataatccacaggacaatgatcccagtgtaaccccaatttcaaatgtaagtgtctttcaactactcctcgctcttttcttaaactcaattgggaacttactgctttcgctaaggtgattttttttgaagcattatttatcatgctgaagttctattcaaaggagttgttggtatctttgacactttgttgttaggcgttaatttctcaactgatattacattgatatctcaatttgagcgaggtgttgtatgatgagaaatcgtgtttgtcttatcggtctgttttatattgcagctgatttaatagtataaagaatgtgttaccaaagaatacattcatgcaattttcttctgtgagattctggtaatataaatgtataacacagatctttgcataacctaagaatgatgtaatcttactgttccgtgctcttgcgttggatttttctcttgattccaagtaaatatcacaattttattccctcctcctattcattctctcgtcatttaatgcctgcttttgtgatttgttatgatggcatacatcattttctcccattaattgattcgaaaaacttttcagaaaccggagccagcatcaattgaagtgggaggtcctagtggtactgcaaacgtgaacgaaggcaatttcagtatcagtgcacagagaagagggaaagcagctttaaatgacgacgttgcaatctcggagcttgaaaggctaatggaaggaaaaacgttttcacagtatgttctttaagtttgttacattaattgcatttcaaatgatgcagatgcttgatggaaatgtgcttccttttacttgttttttttgttaatgcttatattcacgtctccgtcattagtatcctattgactggctgcttatttttccttgcctttttgttatcttttcctgacagttctgattatataccatttttacactgacatcttttaatctctatgcagagctgaaattgatcgtctcatagagatgataagttcgagggctattgatctacctgatgtcaagagagacgagagaaatttggagattcctttgagagagggagccaagaaaaatatgagtttatttgataaggcaaaagagcccattggtggcaaggatgctaatagtgaaatatgggctacaccaaccccacttgcaaagtcaatagtgagttgtttgctatccagccttttttgttaggacgttctgatgaaactagcattaacatgaattgcttaggctattccaagtagccggaaaattctaaaagtttgtttgcagactataggactaatttgaggttggtctgtctgtgaaaacttatgaagaaatatgtaaacaggaagaactatgtaatttcacatatttgcttcatcaaagagttgatgtttcttacttccctggtccttgtttccttattatttgatttttttcaatttactcacttttttcgcgttaacttttttcgtagatacttgacggagacaaaatacgagatgaagttggtctttcaccggcagaacttgccaaggcatatatgggaggtcagacatcatcaagtagttcccaaggttttgtagcaagaaatgaaaaggattgtttagataggagtatgcttgtagggaaatcatcacttgcatcaccatcaagcaagccttctgcttgttggcctggtatcaagtcaagtgagcaatctggttttgcaactcctcaaagccgacgagagagctatgggcttcaaaattttccaaggactccttattctagaaccattctttcaaattctaagtcaaaggtgtgtggagtttttcttattactttttactaaagatttttggtatatttgagctgttccttttttttttggctcagttgatgcaattgcagaacgatagtagcaagcacctaagcaacctccagtctccctctcaaagtgtggagagaagatatggccaggtaaactctctcagtgggctctataattctgattacctgtaagaggttatttcataaatgtgcgcttactatttatttttagacttctaagacaatattaaagaaagtattgtattcttcccaaacattttgacttccaaactccttaagcagaggtgttggatggcttatggtgttagggaatctacctaagatgggatcttaagcaaaggaactgtagcagtcagttaattgtttcaaagtactgttcttgccactagatcgatggaaattgttttctattggcttaaccagtgtttgattggttatctaatgtatacttaaagaatgtgaatgaaacggtggttgatgtgattgaggaacagaagaatagatcaagtatgcaattgtgtggatgacttaattttggacacctttaccttgacttctctgaaattattttcgtctaggcattcataatgtcgtcctctaggtcttgttaccttttgtaaaacttggttcttaattagagtcatcactatactaccttttgaatctttcctgggttccgtctatcttcctcagttgaaacctgataaaccactttctaatgtgcacagcttagcaagggaagggatggtggactttttggacccagtagaagaactcgtcagagcgccacgccgtccatggtgtctccttattcacgaccttcccgtggtgcatctcgttttgaaaattctgctatcatgaagagctctgaagcaggggaatcaagttacctatctaggtcccagataacaacttatggtaagcataaagaggcagaagttggtaccctgactgtgcctacacattctagtcagattgctaggacaatattggatcaccttgaacggacccaatcccaatccaccccaaaaaataaaactgccgagttaaagcttgccacttcctggagacatccacagtcttcgaaaaccgttgaaaaaagcagctcggacgtcaccaatgtgaaaaaggatggctcagctaaattgcatgaagatatccagaacattttctctcagaatcagccatcctctgttcttaaaccacctgcaactaccactggtgacattcaaaatggaatgaacaagaccgcttcagcgacaaatggaatattccgtggaacacaagcagcaagtagcggtggtaacgcactccaatatgagtttgggaagcctaagggttctctttccagaagcatgcatgatgaggtactttgagtactcgtcttttttttcttaatgcatcttgcatcatgttttggcttctgagtgcgaggaaccttgatataccccgtaacataggaagtaaacaagcttaatgagtttttcattcgtttgtgactttaaaacaacccagatctctccggaaactggagaatggtaacatttgtggagctatatatatctttgttgaccgtttgaattttgatcttgtggcaaattgaattgcagttgggtacttcttctcaggacgctgcaaaagctgttccctattcttttggaggggaaactgcaaatctccccaaaccaccatctcactcactgggaaataacaaaccggtacttccatcgatctcagtagccaagcccttccaaaaatgggcagtcccttcgggttcaaacgctggcttcacattcccggtctcttcatctgatggaacaacatcatcagagcccacaactccatccatcatgcccttcacaacaagcccaccagtagcaagtggtggtggtgttgccattacgaatcatcacgaagcgagaaaagattacgagattcctcaatttagtttcgacggcagcaacagaagaggagataagtcgcccctggtgttttcgtttccctctgtaagcgaagaggtggtcagtgaggatgatgatgcgaggtttggtatcaaatacacatttgggtcagaaaagccggagaggatatcattcagctcagcaggaagtgacggtgtctgctgttaaaagacaaggacaacggtctttgtttcttgtatgttttccaaaaaaatttccttttttgttttctcgaattgtttttgcttctttacttttgagagtagaattttgtgcctagatcatgagttttgatttctattcatttgaggattgatttctttatgaatccgatttttataaaaataaaaggttaatcgagatttataggtcgaaaatgtcatttgattactttaaaataatactaactttttacgttttaagtattttctctcgtatatccttaatgttggaagaatttgattggtgaaagcagagttgtagcaatataaaattgatgtaattagcagagtttgtggtgggttcgaattagagaacaaaagatatgccacgttatatcgtccccgcgtattagccacaatctatcgaagacgcagcaaagttaaagcttctcttattttccagacgaacactcgtgtgtgtggtggtgggtgttcctgatctgatcttccttgactgtacttgtaaccagggtttgttgaatcctcatgtgctcgattcttgctaggtttcaggttttgcagccaccacaatggatgagaaagaagaagacccgatttcagttccttctcaatcccaactcaaaattcgtcttttttcctcgcgcgatttcttcttcttcttcttcttcttccgacaacaacaacgatggttcagtttcatcttccagacaaaacaacgtactatattattaaaacctttctctatctcttacaaatcgtatacgaaaattctccactctttgtttgtactcacattgatggaatttcacttttgcccctgctttgaaacagcgacagatgggttatgatccttcagaggaactctttggtgttgatttcaagcccaggtcagacaatttcaaaacctcttttatactgaattcacgatcaatttcatgaaacagctctaaactcaaaacaactatgaagcttcttaatgaaaacaatcactagttttctcattcttttataaaagcaagagtatgataattttggcatctgcctgcaatgtcttatttgagttaggatcagacaagtggaagtcctaaacaatctttcataaaaaaaaatagaaaaaccaagcatggatgcataagtaaactaaaacgtaaaagacaagcatggatgtagaagtaatcttgaaaatagaatagtggaagcattaaacaatccttcataaattcaagaaatagaaaatcctaaataaaaataagaaaaaaacataacattccagcctcccaaagtaaagtcttgtcctcaaggcttgctcctgtggtagtgtagtctattcttcttacatagcacgtatctctccatccatgattgccttatcctcagaagtcatcaaagatggagtacggctgatagccgggataacaaaggcctgttccttccatgtcaaaatattcttggtgcgacgaatattggcgtctaccctttgctcggttgttaaaattcaactctctctcgattgcttttgcggtgcgtatagccatctctggtccttcagcatcgtttggtcggaacatcacccggatttcttctttaagtccattaagaaacatgccttttacaagttggtccttattacctatttgagctgcccgagcacggaattcattagcgtactcatctacggatcctgtttgtcgaagtgatgccaattgttcttcaggagaggccgtaatatctcctcctccaaattcttctataagctcagtttttagttgagaccatgttaaagtcgggttctcttgtcgtagacattgtaaccagagtagagcatcaccttccatactcctgaatgcagtgtctaccttgcaaacctctggagcgagttgcaaagtaaagtaaacttcaatgatttctagccatatgaagagatggtctccatcaaaacttggcatctcaatgtcctcctcaaggacagttgcagattcttgtttagaatgcgacgattttgaagccgaaaccatccttgtaaactccaaaatagcatcctggatctctttctgtctcttatgaaacccaataaattcttcatgcaaggccttgtggtacttttctatcgcgatcaaacgtgactcaatcctactggtagtcattcctcaagttcttatttgcaggtagttaacaatcacggtcacacagaaccccacgaaaagctctctttattgcaagactcaaagaaacccaaaacgtataaaactcaaagctctctctagcttgtatgagtctcataatcgagaccctatctttatttatactaaaacgtaaaagcaaagcactctactaataggaaaaaaaaaaaaatgccaaaatggaaactctttgaagtttgaggaaaaaaaaaactcttaataatttcctaaaaagaaaaagaaaatcttaaaaaagtaaggaatacatattgttacttggtcaagtcggtgtacttgatagttggtaaaatacatgatccacaatttggctaagcttcaaaaatgtgcttttggtgatggtttattcaggttcatatctggtgattcgcgtgaaccaaggtcatggtttggtcctaacggtcagtacattcgagagcttccttgtccaacttgtaggggaagaggttatacttcatgttcaaattgcggaatcgagaggtcgcgattagactgccctcaatgcaaaggaaaggtacttaaaagtattaaattactttaaacttttgagtaacaaaagtctttccttgttatagaaactttgcttaaatttgtgtagggcataatgacttgtctcagatgtttgggggattgtgtcatatgggaagaatcaatcgatgaacgaccttgggagaaagctagatccaggtagtgttgttattcaagagttgaagtcttaattctgtttaatgtttgactaataaacctcatttttttctgccacagttctccatttagagtaaaggaggatgatgaggttgataatttagagataaagttcagtaaaaggcgaaaatcgaagcggatttatcagtcaccaactcctgaagttggacaaaagatcagccgatctctaaaagttagtttcattcatatacacttcatgttattctactctctccatgggaaattgtcatagtcagtccaaattatggtttttatagagtctcaatgccaaaactggactttttagtaagcgcatgaagattatacatcgtgatccagtgcttcatgctcaaagagtagctgcaattaaggtctgtaatctactccattttgttttatatcctaaattaacatggaacaagttttgttgtttttttcccttgaatctgcttagtgttgttgtgttctagaaagctaaaggaacaccagctgctagaaagcatgcatccgaatctatgaaagctttcttcagtaaccctgtaaaccgtgaacagagaagcctatctatgaaaggtaagtctcagtttcttggtagaatttcagagtttaggtccatgtagtactcttttgtttcttgagctttatctgtttacattctccaataatgtgagatcactgtgatgaattaggttgaggcttgtcacttaaagttgagatataatgttgattcgaagtgtagaaatgtaggtttcgatttgatttccttttgtggtgacagttccatgtgcaagctatgaaatggtaaaagaaccatttttctctcattgattcaggaactaagttttactgcaagaactgtggacaggaaggccatagacgccattactgtccagaactaggcactaatgcggacagaaaatttagatgtcggggttgcggcgggaaaggccacaaccgtagaacttgtcctaagtcgaaatcaatagtcactaaaggcatttccactaggtatcacaaatgtggaatatgcggtgagagaggtcacaacagcagaacatgccggaagccgaccggagtgaatcctagttgcagtggtgaaaattccggggaagatggtgttggtaaaataacgtatgcttgtgggttctgcaagaaaatgggacataatgtaagaacctgtccaagtaaacaagtttcagacagtgattcttgtttagagcaagaaggttcttgaacctgtttatttggttaggcttggttttgctattgaagctgaaataaccaatcactgacaagtcctttttagcggatggatatttcgggtttataatcggaccaatcacttgagtcccgattggtcttttttgaactatctaaactcaaacaaaaactgaagtgagtttgaccgcttttggtttcgggttatgaccgcattcgtttacgtgcaagtatatatacttgttgggttgatttttcttgaatacgacctgaattggtacaacggacccatgcaaagaaagacaatcgagcctagaaatttctgaacaattatcgacttatccatataaatgctataaacacctaatatctcatccatatccacatttaacactttgttttttctaacattagtatgctactattcttcgatgccttaatatcggatggttattattaggtagttatatttagtctgaacactaaattttataatcattacccaaaaagtaattagtcacgttttttacttgatctaaatttacaaatgtacaatgtctttacgcgctaaaaataacaattgtggacaaaaaaaacttagcagacaaaattgaccacaagtgataatatctaaatttggatttgttcaacgacacaacacgtaacgcgtcttcccgtatcttgcgtatgactccttgagagcctctctttaattgtcctataaatataagtctctcttgcaagacttttgaaaccacaacaaacacaaaaatcaaaaggggtcatttactatcttttaagagacgacatatatagttctcgaccaagaaaagaaaagggggtgacctgagttcttcaacacataacataatggccggagttttcaaaacggttacgtttcttgttttggttttcgctgccgttgttgtcttcgcggaggactacgatgttggtgatgatacggaatggacgagacctatggaccccgagttctatactacttgggctaccggtaaaactttccgtgtaggcgacgagctcggtgagttttattgttcttatagctgaaatatgtctttgtttttcttgttcttataacagtcatagttatgggatcgtgcatggatcatgtcggtgttgttctgtctttctttctatattcttatgaacatattttagctaaaaaagggattaattgagtttccaccgactgatgttgatattcttattacagaatttgatttcgctgctgggaggcatgatgtggcagttgtatcagaagctgcatttgaaaactgtgagaaagagaaacccattagccacatgaccgttcctccggtcaaaattatgctaaacaccactggaccacaatactttatctgcaccgtcggtgaccattgtcgttttggtcaaaaactttccatcactgtagttgctgctggtgcaactggaggtgctactcctggtgccggtgctaccccagcacctggatcaaccccaagtactggaggaaccactcctcccactgcgggtgggaccacaacaccttcaggctctagcggaaccactactccagctggaaatgccgcttcctcattaggtggtgctacttttctggtcgcttttgtttctgctgttgttgctctcttttgagtcacactcgaaacctagttatgtatttgttttaccttactctccttatttaaatagtcatgtatttgattatttgtgagaataaggacttgttttcaagtcattataaacgtcttatacttgtgattagtattgagtttcaatatatgattattcggttgcaaaataaagagtgggtttcaatatcattgagattactactatatattaccatatttcatgaaaattagtcatcttcttcatccaatttgtctagttttcatgtataattagacaaaatttgccttctcaatattttcaatcaacgagtaaacattacctgattgtgaaccgaagttagaataatattaaaaagacataggttatctactaattcaatataccaacaatatggtatttttgtttcagtggatacgtttctcacctgaattcacaacttttttttttttttttttttttttttgtgtgtggagatttttaatctctggctttatagtttgataatcgagaaaatgccaaaaagtatgcccgtactaagtacaaaacataagaccacaaaattccacaataaattgacacgtgtctgatcgacgtgaatcaagaaaaccataaacttgttttgttttcaacaaccaaagacattttccccataacaatgtaagcatgataaagtctaatggttataccaaggtctttggtaattacactgctcctttttcttttttttttttcctttttctaaaccatctgaatttaactttattttatttacttcatttgtcaatgtgatatcttcaactttcaataatttaatatgtttgattttttagtgtagctacgatattcgataagacctatatatgacatagagttcttgaaatagcaagtcttggttttgccaaagtaagaacctgtaaaaataaaagcaattctttacagagatttttggttttaaatctacaaagttgcaaaactcgttgctttcatttgatttaatggttagttttcgagatagacaaaatgggaaatttatttgcaaaatgatttagttgcaaaatcattgggacactatcttatttcacgttttatataattgatgacataataagatagtttcccaaagtaattaattgatgatatatgtggttggataagaaattatggtattatcatgtttgcctctcaaatttaaatttaattaattatatacatacacgagtaagctaaataaaagtttgaccacatttcatatgaagaattttatctttccagatatctagaatttgttttctctacacagttcattgaagaaaacatagtacggaagagaccagaggttaattaaacgacactttaacctatcacgagagagactgagatgatcaaatcaaatgaaagaaaataaacatcaatcacatgcaaagagtgttcattaagcaaaatcactaagtttgtttttactttattttattacgttacttcaagttttttttttatcttcttggtactgtaaaaaaaggagagaaaatagagttggctatgtgtaataagcgaaccaaaagcaagccttccatgactgtgccctcaagaaagtagctttgttttcaatcccaaactgtcaaagtctctcttcacctcaagattaatcaaaacatttctctctctatctcatcaatgttactttaaaaccaatgctcctcttcttgttcttcatataaaccacatatcctctcctccatatcttaacaatttcatagcaaaccctaaaattgagaaagagatagagagagaaagatgggtagaggaaagatcgagataaagaggatagagaacgcaaacaacagagtggtgacgttctcaaagaggaggaatggattggtgaagaaggctaaagagatcacagttctttgtgatgcaaaagttgccctcataatctttgcaagtaatggtaagatgattgattactgttgtccttccatggatcttggtgctatgttggaccaataccagaagttatctggcaagaaactatgggatgctaagcatgaggtaattttgctctctttttaatctaaagtttctttgtctcaaaaatattccatggccaaaatcatgtaataagttttcaatttctttaccaaaaacatgtcaaaagacccttgaatctttaaccctagatgcagatctactatagtgttttgtctcaaaaacatatattctgagctagatatcatgaaattggttatttaattttcttttcctaaaatatgtcaaagagaaagaaaaatactctaaccctagatgcagatctacaaaggtttctttgtgtatgtagcctaacatgcgtctttattgattttcttgtactcaacaagacatggagccacaaaacatggaagttattcttttcttttgttcctgcttaatttgtataatctagagtatatctaaccaactgtgttttgaaaccatcaagaccaaatcttatgcgaatcagatccgtagtttatggagttattaattgagagaaaaatctgggatgtgatatgtatctgggaatgagaatttctgattagtacactgattttacgtttctggctttcaaaactaattgaaaacttgaaaattgcttttgagttttgagtatcctttttaaattaaattttgatgcaaatattatatgtattattaattagctctgacaaatgtaggtttagttctcacaaatgagatatatctctatagggtaataagcatacagaggcttttataccatttaagtcactgcctagtagtatttgtgcatgtatatctgtgtatgcttttacatatactaatatcaatatatatacatatatgtgtgtcagtgtgtgtgtgtgtgttatatgctttgcatgaaacatgaacatagagagacttgtcatggattgcttctttgtatatctatatttatgtttagtttgtacagattactaagtattttttttgtttgatctaaattcttaaaacctttattgctcatctaatacatattttttgtctccagaaccttagcaatgagattgataggatcaagaaagagaatgatagcttacaactggagctcaggtcattattcttcacccttcattgccatatctttaccctagtatagtatatatataaaacatttgattataataatgttgaaatatcaaattgagaagttcatggaaattgtgactacaggcatttgaagggagaagatatacagtctctcaacttgaaaaatctgatggctgtcgagcacgccattgaacatggcctcgacaaagtccgagaccaccaggtatgtatacatttctacatacattcatacacatgaatatatttaacttcttatttggtctgcttggcacagatggagatccttatatcaaagaggagaaatgtgagcatataactaatcttatagtactctacttcttagctttcggattgaaatatgtattaatggttgcatcattctttcttaacaggagaagatgatggcggaggagcaacggcaactcactttccagctggtatacatataatgaatcttcatgcatttataagttttaataatgatttggtttgaaactattagtatgtttatgtaaagatatggtttttggaaattgcagcaacaacaggagatggctatagcaagcaacgcaagaggaatgatgatgagagatcatgatgggcagtttggatatagagtgcaaccgattcagccaaatcttcaggaaaagattatgtctttggtcatcgattgatcatcgagattttataatctcatcctgatcaactcctatctataatatcgtggtctttagtttgtctttatcaatctgtgtgtcttaatctcgagcaacatatatactcgctatcagactttttacttaagctatatgtgtgttgtttgcttatgacctctatgtattggttgtgttgtgtgcttaaacgtttcgaactaattgatctgtgtgaaacttattattctgtgataagctatttgtgataaagaagaagatccttttctctttctaaaagttagaattgttctctaactaatttggagagaaaaaaaaaagaaaaaaaattggagtaaaataaaaaggtaaacgtaaaatgttatacaatattttgtctggatacccttcaataattttactttgaataaatatgtcttcatacaaagaggttatggtcgtaaaaattaaaaaaatgtggttgaactttatatcttcccccttcaaaagcctgtattaacaaccttttttcttaagaaactaaaatctaaaaaatgtagaaatcagccttggccgctcttctttaaggctaaagagaatggtgtttatgtaggttattgggttctgactagtgactatatttaacgatatatgggcccttatccattgttgacccataaatacgttttagttaacatgtacaaagacaactttgtaatcactcaaccaatattctgcagtttaatcttgctttcataaaatttcaatattctttagcaaaaaaaaaaaaaaaaaaaaacaatttcaatattgatggtgacagagaaaattcatcctcaaaacattgctcctaattaattgatatatgagacgtgtagaggtttgaaaatttaccatggcttttcgtgataaattggtgacacagaaaatcgccaaaatagtgatggtaacttggtcaggtggctacctcttaacctccaaatgactgattggagaggaaatattttggttaatcccctaacaaaatgatgatgaataattttaaaaatacagttttaacaaaataaaaataaaattatgaatatgtgtgatgataaacattaataacctgacaaacccttatccgccaactaatgtataatgaatggataaacccatagggtccaattggacaacaactttctaactttttgttctctcaaaataaaataaagacaagttgatttgctttcccaatcactttctgaaccaaatcacttgctgcaagcgaatcatgaatcgccgaacatttcgttttctgttattatgagtataacaatgaaaacaaagaaacaacagaaagaaaaaatcaaataattcgttttcgtgtaggcgtgtagcactcgctctctctatttaagatttattttcatacaatgagtttttttttttctagaaaaccatgggcacttgtggggctgtagtgggggcatgcagccgcacattgctcaatatctgttgaagcaagttgatctgcgaagataatattgccacttggtatatgaaccttctgtccattgcaccgcacccaattgattttacacttttcacaattctattcaaattatattcttaagttttgatacatttcttcttaggtaaaagttacagaagaacctttaaaccaatacttgggttgggagttaggacattgacatagattagttataaccatataaattatatagatgacaatcccatttattagaatgagaagaggagatattaaaagttgagaagaaaaatcatgcaacaggaaagttttacaaatattggactaagaaaacaattaaatcattaaaagttaaaaacagtcaattttagcttacaagttgcaagaaaacttctattttgagattgatgttgaagaaaacaatttagttggtgataaggtcgtcccaattacccgctgacacgatgacacgtaatacggccgtggaaacaaatcttttaatccttaaaagacaaaatatctttaaatatccttatgtgttccagcatttatcctacgtggcatcctcatcctccctttaaaacttgtcaacggtcaactattgttttatttctttttgtggtattaatctttcattcatttgtcaaaaaaaaagtttgggtttataaccgtatgcgaatatttgagtagtcatgtcacatctttcgcaaaattcataatcacctcaacatttttgcataatttgaccatttaatacataaaccatagaaaaatatatcaattaatgtctgagattacttgcaatcttgcacaatacgaaagaaacaatcacaagaaacgtaagacgtgtaacttaaaaaccaaagtaattagaaaataaaagagagatccaattcaacatccaatttttttttatcctttatgagaaaaacaaaatccaaaataagaaagtatttatttaatattataaattcaactgagttaagcgtcctacaaacttgtaaaaaaactcaccaaacgaggaaagccaaagagagagagagagaaacaaaaatggcgtcacagagttgctacaatggaatccatcgtataaaaagggttcatcctctgattcactctctcacatttcatcgattctcctcatcttctcttccattcaaatctcacattccctcttcacaacaacagcttcgtattcgctcatcttcttcgctttctggtatcgcatcttaatcaccatctatctcctttcaatcattctatgttcccagattttgcgtctaacaacgactttttattgttttatctccatatcttggaaatcgcaggcattgttcgtctactcgaggatttcaattttggtcatacaaggtactctttctttcgatctattagaacccagaatcagacttcatctcagaactctggatctttgataaaactccgaaatttgggattttttttttacagagaagcgaagcagcgtcgccgttcaagacgaggtacagagaaaacgaagaagaagaagatatgacgattaaaccggcggttcgtatttccgacgggaatctaatcatcaaaaaccggacgattctaaccggtgtaccagataatgtcatcacgacgtcagcatcggaagctggaccggtagaaggagtcttcgtcggagctgtatttaacaaggaagagagtaaacacatcgtaccgatcggtacgcttcgcaattcccggtttatgtcttgtttccggtttaagctctggtggatggcccagagaatgggagaaatgggccgagatattccctacgagacgcagttcttattggtcgagagcaacgatgggtcccaccttgagtctgacggagctaacggcgtcgagtgtaaccagaaagtttacaccgttttcttgccgttaatcgaaggatctttccgttcgtgtctccaaggaaacgttaacgatgaggttgagctctgtttggagagtggtgacgtggacactaaacggtcgtcgtttactcactctctgtatattcacgccggtacagatccgtttcagacaataacggacgctattcgcaccgttaagttgcatctgaatagtttccgtcaacgtcacgaaaagaagcttccagggatcgttgactacttcggatggtgcacttgggacgcgttttatcaagaagtgactcaggaaggcgtcgaagctggtcttaagtctctcgccgccggtggtacgccgccgaagtttgttatcatagacgacggttggcaatcagttgagagagatgccacggtggaggccggagatgagaagaaagagtcaccgatttttcgactgacggggatcaaggagaacgaaaagtttaagaagaaggatgatccaaacgttgggattaagaacattgtcaagattgctaaggagaaacacggtttgaaatatgtttacgtgtggcacgcgataacgggttattggggcggagttagacccggggaagaatacggatctgttatgaaatatcctaatatgtcaaagggtgtggtggagaatgatccgacgtggaagactgatgtaatgacgctgcaagggttgggtttggttagccccaagaaagtgtataagttttacaatgagcttcatagttacttggctgatgctggcgtggacggtgtgaaagtggatgtgcagtgtgtattggagactttgggtggtggtttaggcggtcgggttgagctgactcgtcagtttcatcaagctcttgactcctctgttgctaagaacttcccggataatggctgcattgcttgtatgagccataatacggatgctctttactgctcgaagcaagcagctgtgattagagcatcagatgatttctatccacgggatccggtgtctcataccatccatatagcctccgttgcttataacagtgtgttcttgggagagtttatgcagcctgactgggatatgttccattccgtgcaccctgctgcagagtatcatgcctctgctagggccatcagtggtgggcctctctatgtcaggtatcatcattcaactactagtatatctctctagttgaacttgcctgttgattgcaaacttacattgttacatgttgtttgtgttcttaatatatagtgattctcctggaaagcacaactttgagcttctaagaaagcttgtattgcctgatggatcgattcttcgtgctcgactccctggtagaccaactcgcgattgtttgttcgctgatcctgcccgtgatggtgtcaggtaagcaaatttggcttataaagataattcttcaaaactttttggtttctcattttcttaatatgctttgttttggtttcagcttgctaaagatatggaacatgaacaagtacactggagttcttggcgtgtataactgccaaggagcagcttggagcagcacagagagaaaaaacattttccaccagactaaaactgatagcctcactggctccattcgtggtcgtgatgtgcattcaatatcggaggcctccactgatccaacaacctggaatggagactgtgctgtttactcccagagcagaggcgaacttattgttatgccatacaatgtgtctcttccagtctcactcaaaatccgtgagcacgagatcttcacggtgagccccattagtcatcttgttgatggtgtatcttttgccccaattggtctagtaaacatgtacaattcgggaggagctatcgaaggacttagatatgaagccgagaagatgaaagtggtaatggaagttaaaggatgtggcaaattcggatcttactcttctgtgaagcctaagagatgcgttgttgagtcaaatgagattgcattcgagtacgattcctcctctggattggtcacctttgagttagacaaaatgcctatagagaacaaacgatttcatctgatccaagttgagttatgaagagtgattcatacaattcattaaacaaaaacagtctcaaaacagttttaaatagtctttattatttgtaaacctttggttaccattgtagctactttcaatgttatactacagttcacgttattgttctataccaatattaattccccaaaaaaaacagagtatcactactaaggcaacctcaggtttagtcttctcaaccaaacagagtgaagaagcattctaagcatatcaaacggttgtgacggtctgttgatcacgaaatgtctctggacctgcaaaacccttctctgcaacaccctgtagcgtctccaggatatgctctttagtatggttttgatctcagggatcttcttagaaggaacatgaatggtgaacttagtccaatcaagaacgtctgagaaaggcaaggcgtagtgatcagagatgatgacagggacgcaacctaagttaatggctgcaacgactcgagggctagccacttcgtagccactaggacagagacagaaccttgccgtagccatgagcttgaagtagtctttgtttttggctaagtactcgtggacttggacctcctcatctttgtctttccaatgctgcaatagaattctgcggatataaccgtgtgaaccccctgcgaagaaagcaaggatgggtcggtcatggcccgaagagcgcgataaccgaggtggtcccaggtggcctccggggatgttgatctccgggattgagacgtctcgttggggcatgaaaccttctgatgtgttggcgttgcagagaactcttatcaggtttttcatcagctccgggttcgatcctgagacgtctggtgcctgcaagagtctttaaaaatgttacatttcagtagcaacatcacaaaaataagtctggttccagaaagaaaacaaacccaatcatggcaagaaacgtagaaatggtcggctccaaggcttctgttccaataaggatacttgtgagccacaacatcgacgtagtcaagaaaaactttgtgaagttgttccctcgagtaggtcacgagcggccggtataggtaatgaacgatgttggcgacgctgacagggaggagaaaggcatgagcctcttcggggttgttagccgcgaacgggctcatccctgtctcgatctcgtccatgaattggccttcaatgctgtatatgttgttcattggacccatgtgaactaacggtgtctctccttctctgtacacccacactttgaatttcttctccatctctatatggcttctgctcaatttcataagaaaaagtgttgttactactcgatcataattcataaacacagtgaagtacatttgttcctagctacaatttttgtttatttaaagtttgtctacgaatttgtgatagactaatcacaactcacaagacagtttttgaatacggttaggtaatttcttactatgtatttagagtaatttaattctcttttaataaaataactgggagcagcaattcaattttgcaacaagcaaagaaatgatgattttgaagtcaataaaaagtagtacaatacaactaaacatttttttttttttttttactctaataactaaactaaggttgtaatgtgaagataacatagagctgtgactacaattaccaaagcagggctttaagtaggcgctacgtttctctacccgcataccattgtgcatatatagtatagtcccttaattaagacacgttgactatataaaaaatttacatacttttctgaatattataaagtttacgcaattctttaagagaggtacaatttgctttaagatttgggagaaagatttattttggtatttactatacacacgcttggttgtgtgtaatataagcaatacaatgtattgaagtaaaaacaagtataagagcatggacacttaaatagttataatataaaccatataacaaagtgaaaatgaatacttaaatagttcaatcttgagtttaacgagacgcagagaactaaggaacgaggaaggattagaattatactcaatcgcttcgtttcccatagcaaacgagtaaataattcaagaaaaccgaatttatacatactccaaatgaagggaataaaaaggatttcgaaaataatttattcatgtaaacaataaatgtattttgcttaaaaatcattgtcgaatgtcggttacacttttgaggtaaattttgaatttctcttctttgaaatccaaatgatctggggagaaaattatgggtaacttaaatgaaaattgtcatatcattagcataaaatgtagttgtatacttaataattttcatattgactagtttttttcccccaataaaatcttagtattacatttatttcctagtatggaaagtaactttaaatgaaaatttgaaagacaaaaaaaaaaggagaaacgaagaaaaaaaggaaacagaaacttactgatgaaatgcaaaagcgtttctgtaaacggctcctcgaggaacaaaggtttcttctttgtccgatacaaacttcttcaacctcacggcttcacgtatggcggatcttgattttgctaaaccttcctcaattatgttcctcttatttcctttcttattacaacaaattatatatattcaaaagtcaaaacaaatctatagcataaatgaacaaaatcacgtaaattaataaaaacatacattttcaggaggactcgaaattgttgaaaggtttgatgaggcgacactaaactccatagacagggacggtgaaggagatggggcgagggacgtagcgtcgacgaaagaagagagagcgttcgagtttaggtttggagaagagtgatgttgataaaagacgagaagaacaagaagaagaagaagagttggaactagagagagtttcatattaacaaaatttgattgttccatattttttttctctagtttcttgggcagtgacacatttagggtatatacttatgtagtagaggaatataagagtctattatagtagagaatccaaaccagctaaaagtctaccaaataaaatcactagaaaggtaaaaaattaaagcagaaatggaccaaaataaatcctattagggaaggaaacggaagactaatagagtaattgagaagcaaataacattaattttgtatttattgctttataaaaatgtttaccgaatcagaagtaaatcttcatatcgttcggggtttggcaccgtcgatcgttactagctagctatcatggcatgcttaattttagggtcaattttgggtttggttgcaagaagaaaaacgaaaaacttttatacccattatcaaaccggttcttcccgtactgctataaccggtctgaggcaggcaaatcaaatttggggtggttaagcataaccggcattataaagctttagctgacatgtttggtcgtatatttgtcactcttgaagataatttaacaataacatcaaattgggttaattagaagaactgtttcacgtacgctatgtttcacacatcaaccttaaactaatggtgatggtgttcgattctttgttttactcattaaccacacataaaaaaagtttcatacatcaaaaggaaaaaaaaaaaaagatatatgaaaatatacaccaagtctcacggcaagaccaagacatttggcttccgaaattcgaaaagagtttgggtccgttcacgcattatcgatcaagagtctagttacagagtgaagcttggtctttaattatgtttatgtctgatcaatccttgtcttgcatctaattaacacctgtataacctagtaacacatatatttatatcaaatcaaaaagaacaaaaaaactttgaagcaataataagaggactcggctatgaagaatgaaaaaggaagcggagactttgatgaacatttgatggtgcatatatacatattaattctcttgtggttagggaatcctgacactaagctaagtgcgcatgtagatagatgaaagaaccatcaaccatgcatgaagtccatcctttgcatcattggtttttttttttttttataaaacaaatcattggttgtttcaaccgtcaatttttgcttttgtgtttacatcaatttttttttatgtcttttcaattctgtttgctttcatgatataaagcaaacaaacaattgaagtcatcatattcaaaaacgaaactattcagtggcaaatatttgatttaccattaacttctcatagagaaaaagacttctgaaaatcatgcatattcaacaaacataacaattaacacaagttgaattacaattcaatttaaaacaaatgggttattacaattttgttcaccacgatacaacaaattaataatattatatttaaaagaattacaaatatatggtttaacaaccaacgtggtcacgccagtccaagaacaagagagcagctgcatagtgagacaaagcacccaacaaaacgaacacatggaagatctgatgactatgtcccacacgatcaaaccatcccggtttaagcctttctggcactctccctacgtagaatcctgttccaacaagatagaacactgccataagcaactcgtacacgagcgtcacgttcctttgcgggtttccccaattgaccactagcgcgtgggcagctgggacaatcccaaacagccccatggaggcaaagagcaaagcgcggaaagctcggtacttgggagcggaaagtgatggggtgaaaagtgtgatgattgtgaagattcccatggatgtgatgcctgcgaggtagatgaagtaccaccgaggagtgcactggaagatgtagaagattggtgggaagaaggaagtgatgatcatggcggtgataccggcatagtctattcggagaaggaagacattaagctcttttgagtggcaacagaagaggtgacaaatgctgcttgcgagtaggcagaacattgagcctcctaagaaaacgaagaagggccatcttgttacattccctggactctttgcatcctacaatcatcaacattgataccaccattagctttacatttttattgactagtttgagatactaaaaaaacatatactagatatatgatcaaataacatatttgagttgatttctaatctagttaagaaatacattttcttcagttgtttagatatgtgattaaataatagatttgagctgatatataatccttaaaagaattacattttattgagttgtttagaatatactacagaaaacaaattatagtcaatgtaatattgtcaaagattttattcatcatttcgattcatgtctatatatctttgatatcttattcaaaatcatcataacaaaatccaggtatagcaacgaacaattcattagaaaattaagataagttaatcaaaaccaattaggtatatatctaattacttgacacattcacttgactaatttgaagttaatatagtggttgcatgtggatctcgagggaataaattgaaattcgggctaaacttgcgattattaaacaaaaacaaaaataaacgtgttgattaaaggacacttaccacggggaagaatccgtcgtgatgaataatattggcgacggttagtgccacaaagaagataaaaccaatcaaatgtctgtccaaaaaaaaaaaactattagaaaaaaaaatcgaagaaaaaataattgaaactagaagtaaaatttggtgtacttacgtccaaacattgagggactcattgtggaaactaaatacgctgaagaaagcatctctaatggaccaatcagctctgtaataattcaatatgtattcgttgtctttcatgtactccggtagctcacaatacgacattaattcacgtcgtttcattgtcttttgttgcgtttttctcttcttccttctcttggtaccactactctcatctccaccgtgatcatctccaggcacgatcttgcttttgcagttgccgttgccgcatgaaactgtttctgcttcgtcgttatgaccattttggtccataagagctctcgagtatcgattcttgagacaagaatactcaatcttgatctcaagagaagatggtgagagagaagatctgagaggagaggaaaatatataatgaagaaagattattattattattatagttgaagtaacaagtattaaaatgtgaatttaagtttgaggggagagagagagagagaagaaacaaggaagatgtgaaatgtaaggagacagctgcaacatttaaagacgaaactttagtatgcaggtagaagttggtgtcgtgttttcatcttttagttgttagttaggttatcaataaattcttcttttttgattattattatttcatttccctttctcttacgtttgtttttattgtatttttttttaacaagaaaagtgattcagttttacactactttttgagatatggaaaatcttttgaatacgagaagagtaaatttaggcgattttaagaccgaccgactcaaaattcactaccggcttgtacctcttttacatgattgatgccttgtacccaccggatcgtttgtatttataagaaagatataagatatgtgatgcaaacaaaatagtactcttgatgtaaaaataaaaaataaggactcatttagacttttactatgcttcaatcaacattaaattctgtgtgaaattaagattggtgaggggtttactttacttgaaatagacgagtaattttagaaaatttgcatttttgagttcttatgtgtaattctaagtaatttttttaacagaagaagttaggataacaacagaatttaatgtagttatgagttatgaagtgattgtggtaaagaagtgtcaaagctctttccatcaagtggatgacaacaaaaataatgatactaaaaacaagcatgcaaacatttcaaggattcctttttttaaaagagtagaccacaaaagccaaaatcatgaaaatttctatttttttcttgtgaaatgttgcaaaaaacattagtgtcattttcaatgagttaccacttgaaaaggacttgacctttaaatgcctctagcaatatagaacttcaagttaattaattaggcagatgactaaactttagaacaaatttataatttatttggaaatcaactaaaaaaggatgttaaaaattagacgaaaatatcttcatacaaggaattataaacgttttgttggcaaaaaaaaagggaattataaacgtttgtgacatgcattcatgtaatacatgttattatgctgttattatgaaggagttagtgagtaaagatcttgacgccactacaaggtttgtacttcggtatgtgtttcaaaacacgatacattctatatggagagaaagaaatgagaggagatatggacagacgccatcgaggacgaagaagataatcaggctgatagacaaaaacataaggaatggattaagcacgttgagggtaagatgtgaagagaagtacgcaagaggaatccaagtgtggtttacttttaggcaagaacaaaatcaaagataaataagatatacttttgatctatttttaagaaaagtttgcatttctgtatataaacagtttatttttctttgaatataatttaacactaaattcaaaaaaaaaaatatgttgttattatgtagatagtaattaacatctcggcgtcccatagccatacctttattttttctcttacaaaattcagttttgttatctaaaattaaagctgataaaatggccatagttgtagctttctggtctttcaagatttgggttggcttaggctttttgggaaaacattaaccaaagaggtcactcctgaaacacccccaaggaatcgcaatcatatacgcaaactccatatacgtgtgtttaagtttcttgggaaaatagtttattactaattcataacttaagattttgttaaatatggttgaagaagaaaatgactttatcttctcgacatcttttgtaatctttacttttggatataactgccatgtgtttgcaatctatttagccttaattatatattttgtcgcctaggcctaattaaaatcaaaaggaatggttttatttatatgaatgttgttctgttaattaaaataccgggaatatcctctttttctttttattattacaatactttgcataaatgaagtaaaatccggtaggtgtcaaagagacaaccatatgaagagttaggtatttccggcagcttatgtacgacgaagtaataaaacaaaccaaaccatgtggtcaatatgaaaaagatagttcgcatttggtaccaacccattgatgactggagatgtgatcgttttattttaggtttcagtccttgagaagctctaatttcttcagggcatcacgaacatccgaatctggtgatgcgtgaaccacgttgttgctctcaaaggagatcacgtcggtgagaggatagctccggttagcgtgcaagcatgcactgcacgacactccctttagaacaacgctcttgtgaagcccaccaagcaatccttcgtaatcagtatcacctgattcccccacaaataccgccattttcgccatgtcaattccccaccggacgaacaaatacctggttaaccatagccgttgttaagggcagtgctttgaaatggaaatcatagttacgtaatcaataagttacctcagagcttgtatacgagaagccagcaccggtatgacgtttattcgggtgccattctgactataaacgacatggcaacgtaaagcctggattctcagcagcttcctaagctctcttactggaggtacctgggaatggaaaccaaaacaaaagaatcttaacggaaagctacgaagattagtgaagacgtttctaataatgttgcgcctggttaaatttaccgctgcaggctttttgactgtaaatgtgtagcagtagtcagttgaaagatgctcagcaagagtgacaatctgctcgtcattgtcagcctttttctcgttaagcgaagatgcccaacggatcaaagtcttcctcagcccttcaccgccccacctatattctatgtgggagtggtagtaaaagtctacgacaaaaggaccgtcttcgttgttgagggatgtgtagtggagatcacttccgctgttacatatgaaagcgtcgaaatcattcgggtttaagcctcctgacaccaagaaagattgtacctcagagatcgttagagatgtcgacagtatgaacccaacagatccttctgctctttccttttcaaccgcatcaagaattctttttgtagcctctagcgtgtcttcttccccatcaaaatcaagagcaataacaacaataaacttccttctccgcactgctgggaattttccagagttaacctctgacctctccagtgatcccattttgcggctatctttgcctttagaccaattttggacagcagcttcgattttgctcttcctatccatggagctcccttcttggttcatgtaattatcattcccacttccatcaaatgaaaactttaagttcaaggatatatcctgtatatccctcaaagaatcactaggtgactcgggttctgaattatcaccgccatcatcactttgccactgtggatgtcttggtttgaagctggttatgcgagatagataagttttgcagtgctctggccaagagaattggtgaatgttcttcaacccgttttgccgacactttgcccataggtgcttatcagcaacaagcttaagaagagcttcagaaatagactgctgatcatgaggatccacaagaaggccattatccaggacctggtagaaattttccaaagtacattttagaacaaacgagcaggtatgtaatagtctgggggacttcaatgttttatcgtaaaaacacatacccggtgaatatctacaggaccaccattttttgtagcaaccataggtaaaccatgagctgcagcctagaaggaaaaaagaaacaaattttatccagatgacaagaacgagtcatgaaatatacacatgtgacaaaaagagaatacaatacctcaattagagtaagtccaaatggttcaatgatagctggattgatgaaaacaccctgcaaaggatccattaacaatgttaatctactaaagaggtgaatgaaagcaaaggatacttattattaactgtgagaccaactctgctagtacctttgactttgcagctaggcgatatatgtctggaacatctgattgtttgtgatgtttagggtacgcaacttgaccgtagagatcatacttgtcaattagcttcagaacagaaaggagaacagaagaacttgtgctcgacatttcatcaatcccatctcggttgcccataataagtgcctgcaaaccagaaatatggaagataaggaaaataaaatggtgatcaaaacaagacagaagacaaacaaccaaagttcagagaaatgtcttcacagaagtccccatatggcatttacataccaggttagcaagctctctcagtggacgacattctccaaaggccttcactaacgtcgtgatgttcttttttgggtcaggcctcgcaagggcaagtatcataggctttcgggaattcgaaaagaaacgcattatctgcatcacatgtagaatttggaggtctgagtaaattgcttaacggaaagctaatgtgaaaatattatttacaagaattaatctcattaaggtgatatagattgctaattaaagcaaagaacctcagcccatattggtggatctggagaagttggatgttcctcgttcccatctgtgtcttccatatcaccaccatgtgggacaatatgattgaactccatcccaggtggaattttctgaagaagaagtaaaaaacagagtacatttttatgatactacaaaagagtcagaaggatagagtattaaaaatgatctactgtgttaaaacgtaaattaaaaggcatgtctatacaaatccagagcaacaattttgctgcagctaaacgtatcactcatgggctatggcctaaacaaatctatcagtaggttgtcaccaaataagatctcccaatagtaagcactaaagtctcaactgtggaaagcatatatttcagacggtgttaaccatgccaatggtcaaggatgaagaaaacagcgaaggtttaagttacttacaaccatgcgaggcatgaaccgtccatagcagctcacattccgcttgattctggctctcaatttgcgctccaatatggggtcaaatccatcatacagtctccattgctcatcaatctcctgtcgagtgctagttattaccatttcagaaacatcaagagataattcctcaccctctatccgacgcataatcttgtacgttgaatttatttcttcttttgaaaggcggccttgtctcaaaagctgctccaatttatctctcccgagtgagtgaccagtaaggagcataggcacatttagtgcacccgacagcagggcagtggcatcaccagcatcagcatagtgtccatggatggcagaaggccaaataggcttcccaacaccaacttgctcgccgagaacatttgacatttgcatgatgtggctcatagcaccatcaacaaattccggaatgtgaggccatagaagttcttttggaatatacttgtcctttggaccaaatggtatcctcacaatataagcaccgctactctcccccatctcatccgagaaatcttcagaatctctaggagtcagcatttccgtaggttcaccataactatagtcaacatctggtgaagacacttgtctagtaagcaagtcaaccctataaactcctggcattgaacccagtgcacgtgcaagttccacaacatatttaacctgtaacgtaagaagcagtaagaggaggactagcctacctttgagccatatttcaatcacttaaattgtccatatcattaatcaagtatcattacctgtccaccggtgtcagagtcgcggccgagctccatgttttcaccacgtatgagaccatgaagactgcatacatactgaatgttaaacaactaacatacaagtttccatcactactattacaccttctcaattgaaagatcagttgccatatgtttacttactcagagtatatgttaaaacagatcctagaaggtgagcctaaatataactcgacttaaccaagtaagaaaattacatacggaaacagaacagaacaaacacatgtaaaaagcaaacgccaagaaaaccagagtttgagcacatacctaatcaaaacaagatagagcttatttcccttctgttggctagcccataactccatggactcagcagaattaattctgggcaaccttggtttggtgctttcaccatgagtagatatatcactgatgatatctcctttttctccctctgaaaactcctcagacatatcagctgttgcctctctgcgacctttctcacgttcaagcctgcgcttagccagcctctgtgcttctttttcctcatgctagacaaacataagaatgaaaaaaaacaaaacatcaattctcaatacgttcaagatatttatgtatcaaaaccacaaagttcatcaaattcataattcaacgatccaaggtcacaaattatgcattaaaagtcagctcccaaaggcagaacaggaaaagctacaaccaaaagtaacattttctcccactttttctaattgttcatcttacgtatgtacttttaaaaaaatgcaaactttgaaaaggttcaaattagagaagaccaaaaaacaattaaattttttgacttgagagtcaacaatttatataaaaagtcaagcatccgtcttgatgaattctctgaaaccaactttttaaagttaagagcaaaaagaggaataatagacaactgaatagaacagtgtgttttaaattcgcatcaaaagatgttgcaaaaagtagaaaaaaggacctgcttcttttgacgagcaagattccagatcctccaacacatattctctaacctcgtgttcctctcttgtggactcctcgtagcaacagcctaaccaaagaaataaactcataacatgaatcgatcacaaatcacaaaacactctgtttttgatcatgattattattattaacaccttaacccaggatctatgaagatcagtctcatcgtaaccagtgataacttcctcaacaaagtaacggctgggagtgaatcgacctctctccctaagaagaagtgatggagaagagcgagcatcgtcaagaccctgaccgacgtcgagaatcgcctctaagtaactgtttacccaatcgttcccggccatctggtgggacgatcaaagatcgagaatcgctttgtgttttgtggacagaagtggaattttgggattggagatgattgaatctcgtaccctttttctggtttgatagacgacaaaggactcagctggagtgtggtggtggggttagtgacgaatcacacagttctttggacacaagacacgcatccttttcgaacggctcaaatatttcttcccattttttatattttagaaagaaaaaaaagtgtcaatggaaaatatctttcttaacaaatgaaagaatattctctgtggtgaattttttaaatgtttagatccttttttagtgattttttttaagagtttaattaccaccactaatgatcttttgtcatcaaccaagtttacaacagaaaatatcattttcaaaattgagacactgagacacatacataattgaacaacacattattattaggtgatgtcaagtactgttctgccaactatttaacaaccagctattgatacaagcagattttgtgcaaccaaatttgataaaaaaaatttcagctcatcacaaattatttttgatctctctccctattttactatttttccgagtaggatagtgtttgaaggttatttacaagtttgtggctcagagacgcaacgttactttctagtttcaactttcaacccttaaaatgtctctttttcccatcattgtgtgtatagcctatatatgttcagggattccttatatactatgtcaagcacaataagataagatattattatgaaagaatcaacgtattctcttgccttcactattggtattaaaaactcacagaggaagaatatgatctcttttgagtaactccggccacattacatgcaatatattaataattagacctttaatatgaaaacactcgtgatcctaaaaacattaaataattttttggtcaaagttacataacagcaatatgatgaaattttgatacagtaaatacctgatcagtcatgatcataacttttgcttttcaacataaaaaatggggagagagatcaaaaactatccccccattttttggtcaacgttatgttttcgagtaggatagtgtttgcagttgatttacaagtctccccatttttttttagccagacgcaacgttactttctagtttcaacacttaaaattttaaaataagcaagatcttagaaaaccgcactacataaccctgcctggctggctgcctcaaagtcatgggcctaaattggacttaataacgagtaagcccaactggcatcatatcttgcttgtgtctattagatacatctaacatagcagattcagtcagagcttgtaacactttaaaatctttacactcccataaatagacttttgttacaatcatctcacaagaagttagatggtttataccgatctcacgattctttttaatgctacaacggatgaaacaaacagacaaagaaatttcaaattcaccaacagaacaatcttaatattgactgcataaaacttgagtgaaattatcgattaaaattataaagaaaatccaagacaaaaacattgtaccataatgggagtttcaaagaaataccacaagctaatccaaaaacatagtttctcagacaattgaaactgaaaactcaaaacatgttgtaagacaaaagctcaaggcagataagaagagactctaagcagcacccttgcccttcttcttctggatcttcttcatgtagaactccaactctttaccttccaagatgtatctgcacatcatttgcaaaacgtatgagcaaaacgtaattaaggacgtttcaacaaaaataatgagtgaaggcacataatgaatacccatcagcacgcccgcactggccaggccttgaagagatacaagccaacaaacgtccacttgcaaattggtcctcaatgtgtgaatcaagactgcgaccctcttgacggcttgcaatctttctcaggaggtggttgctcttcttgacctcctcaggagctgcaacagctgcctcttcaccttcctatatagttaacattatataatatcgatcataagtttcaaattactgctacaaaaacatgaacagactcaaacataacaagcaaatgaatcaattgttaaatggtctaacctctccgtccttcttggtggaagaagcactcttcttcttgcgcccaagctcaacaccatagtgcgagaggtaccactgcttgaacggagcagcatcaacctgaacaatagcactcttgacaagtgtcttagtacgtacaagctcattgttggaggcattgtagaccacatcaaggactctggtcttgcgggtagttgcttcacttccccacgagtagttaccagtatcgagcctcaacgcacgccacttaacatttccaccacgaactcttattcttctgaccgtcttgttgcttgagagcttggtgttggctggctgccttcccatctcataccttcacaaacccaaacataaaactcacaaatcagaacaacaaaatgaatccaagctagtaacatatcatgaatccgtgacacccagaaatgtgacaattactatgttttaacaattaaacgatagcatatgaagaatcacatactatgatacggcaaaatatttctagtaatctacagattttgaatctactaaaggcaaacactcagatttaacagttcacaacagcggacaaaactcttaagcgttttaaaacggagattcacaaactctaatctacgacgagcggagcataaaatgaatcggaagagatctaaaaaatgagaaaaacgaaagactcactttcgcttcttcctccattgcttctgcttgcctccagtggcacgcctcttgtggatagagtcacgagaaatacctaagagaaaccagaatccatatatcagaatctaaacaacaatagcataacacagaaacgagatcgaaggagtggagaaatcaaagagaaagcgaggagagattgttcgtacccattgtcgccgattagggtttctccaataaagtttagctgcgcggagttgagaggagtgaacgaagagcttaaatataaatatatagggagtataaaccctaggttatcatctggcccatccagagccggcctttgggccaagcccatgaagcatcagcttccggccgttttatgttataaataaaatttggtctagtgataataattttgtgtgttatttcattgttttggttgaagaaaatcgtaaaaaaaaaagagatagatcctggcagattgaactagggttgggtgaatctaaccgtgcatattttattgaaaacgtgttgggtttgagagccaaaatctgttctaacaacataaacatttcacactgaccaacgagagactcttgcacataagttatcaacaggacaagagtataacatattgaacaattgaaggaaatgtgcatatgttctgtcttccaaacatctcttacatcagttatcatctattcatatgtgtccaaaatatattttctttacctaatttttttaggaaacgagaaaattcacaatcttttcttcttcattttcctcagtcatttcagtcttactccgccgtactaaagccttgaacatcgttaacgctgatatcaaagcaatctcccagtgctcagagctgttaagtttcacatttatcttccccattttcctattgttcatgtttatgttgacgtctatgttcgtgccccgggctggtctaaactgagtctgtaaaccatagttcaagaccagttctcgcttgaaagacagagccgtcattgtcaaaccgatttgctcatttctgaccgggtaatctctccctctgatacaagcttcaaagctcccgccgtttgctgtttgccctgaacccctcatctgacctgcattcgcagttaacttcaccctcttcccaaccaataaggtatcctcaagctttccgcccacatagtatttcccaccaaaagatgtcaaaccaactccaacatcagttgtgttgtgcttaaatgtttgaagctttgtgccgccctgaaacgagtacaccagatcttctcctgatgattgaaggtcaacagctacagagaatgtctgttctctaaagtttctagtataagctgcattagtctcagattggatagtgaagcgttgcttgtctctgctcacctgtcctgtagctgaagcgaatagattcctatttatttttgcagccgtctcaatatttattccatcaaatcccacatcgcgatcccaaccttgtgggtcatagacaggtctcacgagccactggtcacctgccgatacgcatcgatatctgtgagccggaaaatccgaatcaaaactgtctggacctgccatgtcaggcagtggaacagctgcttgatcacgctgttcagtgtcctcgagattttcctcttcaactagcttttcatcccgtcgtcttcggcattcttccttcaattgtttcttcagataaagggtttccctgtaatcaagctcatcgagatactccttcttctgagactttgacagcttctcaaaccgggatttcccaaggatacggattgtaggcaactggtcatactcatcttcctcctctaaatccaaattcagaagcttatctatctctttctctgtttcatctgcacctgatgataagcgacggcgcagaaaaactgaaagaagatgaggaagggaagctgttcgggtactacttggctgacccaggccaatgctgtcacgaaatctcagtaaagactggacatcgccaagaactttggtacaaacgcacagaaacataaactgaggcttccataccaccccatttggaagaacatactcaccagcaagattctttttacagctgggatgattttcaactaacagaacagggttttctagttttgtatcagacacagcctgatgtatataatgttgaaccacatccatgcgctggcccacatatgactcatagttcacagattgtccattacgtccttctgtagtagctgcggaatgcgtcattacaagtatcgtgtttaaccatatagctgcaccaaagatttcagttataagctgcaggagggagaaatcactgtatcgcatgtcgatcatatcaaggcggtccaagtaaagaactacatcaggtggacgcttcttaacatatctcttaatagataggagaatctttcggttttttcttgtgctagaagatgacagtgggtgaaaaccaggggtatcaataaaggtaactttaactccactgacagttcccataacctcttctatgcgatctgtgcccggtcggaaagcatcagtctcacttttgggctgaccaaaaatagagtttatggttgcactcttgccgacacctgttttccccaggacaaggattctaagtgagaaatcaagctccggtatgccagatgattcttgctcccttgctaaagctttggccctatcttgcctaagttttacattcttaagttctgattcctcagctcgtatcagcatcgcaagatgtacccgatacaaaaccttggagactagaatattattctgtgactgcccaaacctttgaacaaggcgtaagaactgcacttgaaggccaccaatctttgctagtggattatgtttctttccgttaagatcaatacttgactggtacaagctttcaagtggaacttgttgctgagagagaggaggcagaatttctaaatcactactggttgaacatggtggttccgagagtgtcactggttgtggtgcggcaggtgcttgagctgaaaataaaaattgaaagttattattagtcaaataatacatcaggaagaagagaaacttgtgagattgatcatataatcaacctggataatctcaagaatttgctaaagtatcagaaagaaaagtccaattttcaatttgaaaagcaatgtaaagcaacgaaatcttcaagcaaaacacatgaagtactttttagacatttcaataaacgggcctaaagaagatatggtagagcacaaggagaggttaagtagatcagtttaagaggtagtaataatgtaatatatatccacacccaactcacaatgtttattttcattgtaacatataaacccataaatcaagtgcatcatccatcgttcagaagacaaacagaggatacacggaaggaaaagagataccatacagtggttatcttgttcttgatgagggtcacggaaaaaagggtcacttcccaaaagtggtctagatgatgccattgagttggatagagcgaaaacccagtctttgaagcctttcatttaactatctgcccaacagcaagaagatgatattaaagttatgccacatttcgtctcagccacaagtggcaatcttgttcacttgctaaaataatatgcaaaacacctgcaagatctaatggaacccattttccccaaattccatgagtccatgttatgtaagtgagctcaatggaacccaaaaacctaagattcgcaatcatataattattcacatggaaagtgttggagtattgacccaaaagagaacatttcatactagagaaatcgaaagagcaccaaaaatttcttgaagcaaacttgggtcaaccaaaaactagaattagacaaaaatcgagctcaagaaattccgatggttaagaagaagagagtgagaaactctccaccgcacaataaaccgactaaagaagaagaaaataaacacatattgttaaatccccagaaaaattcaactggaaatcgagaaaagtagaagacgagacattgaatgagaagaagagaaatcggagagaaccttgtgttggcgagagaaagagagagagaggatcaaggtaagacaaagggtaggttgaagataacgaggaagaagatgttgttttggttgttttttcttgtttcttccgtgcacgctaatgtgcgcccacataccagtcgctaaactgtaactaatgttgatatcaaaccgaactaaaccaacccaaaaccgaactaaaattaaaatgcagtaatggtttcgctaaatccgaattaacccaactccaaaccattaacgacaatttgcttcaacttcaagtatctcagcatcggtatggtatataatttaaaatcttcatcaagcgttagttccaacagatcttgttttcaacacggccagagaaacttgacttttctttcatgttgttgtttgaaacatattggtagtggtttttatgtttcaataacagttttttttttgtgcatgcatggcctggagttagctgcaataacagttctatttttagctagattcggttctcctctcaaagtggaaggggctttgatttttttctatttctctacacctctttttaagtcttttcaaatctcatattggctaattagatgttccattttgttgtccatgaaccaatgacgacatcttcgtctttagaatagtgatatatactttgccaatgtaacatttccttgagtggaaaatgatgtcgaatatgagagataatatggagagaaatgaagtaagggaagggcctatagctattgcaattgacagagataaaacaacaagctgccaagctcttaaatgggctgtcgatcattatatacctcgaggcgggactgtaaaactcgttcatgtcatccaaagatctgctttgaatatttctaatggatctcacacagatgatgaatcatctgaaagacaaagcaatgataaacggacgaccgctcagtttcttccattgcgctgtctttgtatgcgaagaaatgtaagtttttttagtctgttttctttgctttctttcttctttttctgacctgtcttctaaaagcatctctgatcaatgtctataattagatacaaagcgaaatagttttgctggaagatcaagatgtagcgaaagccttgatcgaatatattagccagaattgtatttccacattcattctaggtgcctcgttgaagaagagcattaccaggttcacaaaatagtatttctatatctttctctctgatgaaaccagtagtacctaataatcttgtctgaaaaattctccaatatggttttgatttgaaggctgttcaaggctgatgacattccaagtaatgtgatgagatgggctccagacttctgcactgtattagttttatcaaagggaagactttcaagtgtacgggcagccactcggcctttacctcaagtcttgccatcttcttcttcagggactgcacctttgtcaccacgcagcaacggcgatgaggctccctctgagatgtaatctaccctaaacccattattacattaggtttgtttatgccccatgtttatgatgaattggttggtccttacaggtcattgtcaagagaagacgacgttttccttgaagagttttcatccgttgactcagattctagtgtgaacattagtaacaggttcagtacagacagttcggttctcgccttctatgagaaacttgcagctccacccatgttggagattcctagattctctgttcttgatgatgagaaagccaagttttccatctatcttaatagtctttctgatgaaaagaattgtacattagcttccccattatcaccagtcgatgacgctacggctgagatgagaaggctgaagaaagagctcaaggaaacgatgaacatgtaccacgccgcttgcaaagaagctcttatggaaaaagaaagagcagtagagcttgtgatgtggaaaaagaaagcagaactaaggattcaaatggctgaagaaacagcaagaatggctatcatggagatgaaggcggtgaaagggaaagggagtgatgacagaaagatggtatgggatactcttggagagtctcatactgtggttaaacatgagagcttgctccatattttagttgtgcttttcttgttttatatttatttcacactaagaaaactctatttcatgtgaatagagttgagtgatgaagtctctcatctggtccaagagaagttgctcattgattctcttgtatagattaatcatatttcctttgttttcttcttcacgatgtcactcttgcaagcaaaatcttgcctaaaaaatatctctatttcgttgtcaattgtttcccctttctcctgctgaaactattctcaagtcaaaattttcacaccttttgaaaatgtaagaccagttaacgcttagttcatatattgtttaattaagatcacacaggaacatatttgatgcatgagagatgagtaaactatatttttggagcctatcatgctatgggttcatcaagtacaagtaaacatatacttatattcagaaattcagaagagcaatcgaagagaacttttgccgaaagctctccgctccaaaatctatggtttaaggttagttttcagacatccttttttctctttcgagaaattgtaggtgtcgatcatatatgctaatatgtagctctggtaaaagttatatatgcctatgataacatctatttctaaccgatatatagccgctcgagatcatcagcaaaggaatccagaatgcttgaggcaccatatagcagcttgggcagcgtgctctgctgcacctttcttcgttgctctagcctcaccataacattccaatgtcatattgggcgcatcttcaacttccaggattaccttgtagacgaatctgtattcatgcacacaattgatgacattaaattccaattaccgatattttgtttattaagtttctagcgcgctcaagttcagagatttagcagtgtgtttgatcaagttacttacgatttcaggtggcctggtccttcctcttcacaacattcgaagtgtggtggcttccaacagttagcaacacatgtttcgtgcaagagggattttgcggttttgctgcttggtccacctgtggagtaatagaatcgataattcaagattgcactaaatttacaatctcctgataaaatacacaagaattcatccacatacctgcttttatgatggccttttgaggaagcctgtcttctgttttagatggtgcttgggggagacctcgtctgatgacgtatgagctgcttctttcactattcccgccaaaagtttctaggatatttaggttttcaacgtccagcccaacaagatccacaacatctataggatcttcattgtagccaattaatttagcttcatttcggatgccattcttcagaacatcctccaacggatgggaggttgttatgttctcatgagcctgcggatgaattacacaaagaagttcttgaacaacgagttacatatatgaacactagatagcttaagatatatatacatcacatcaattgaagaaatttgttacactacagtttcttttgattttgagaaagtaccttcaggtttgtaatcatcagctgtgcagccttttttgtgccctctcttttgttccgaccagttgcagaaactgtaaggcaacaaccattcttggtcacttttagttcaacagtaaaagcaccatcctttttcgtcgctgatatttcccgatcccacttgtaagactggcaaagttcaatcagttcttttataggactaatctgaaggttagacaagtttttgaccggatctagaaatgatagcatcatagtccagacatgattcaagttgaacccacaatcgaggaaaagagcccccaaacaggattctaccaagtcaccaagaacctgcataagaatataataactatattagctcttccactaatttacctatgtatgttcttatgtaattaagatattaattgactgcaaactaaaactaatgagatggggatagtctcttccattctcaacatctcgtatagataaaaagatattaaggtagaaaggtaacagagatagttcgagattctcaaaatgtaagtaagatgatatcaatacgagtgaatcttatcattgttttactatgacatgtgaaagggagatcggaacgcacctttgggcatcttggaccttcagattgtccacttgccaatggggaagatgccaggaaattggtataatcctctataacttcatgaagataaatggactcgcaaaatagaaatctctttagcgaaaaactgacagcaacatttgctagcgcctcattatttactgagagagatcttagatcggtcagttgaccaggtttcagtttcgggaagactgtgaaaaaataggatgtcatcaagtagtccagaacagcatccccaagaaactccaatctctgaggacccccaattagagaaatttggttaccatagatggatattatcgagagaaatgaaaaataagaaggaaacacaaaaatacctggtagcagcctcctccatgcctgttgtaagatggatggataaaggcttgtacaagtagacctttgtggaggaacttatagtcaagctggttttcaagggtctccaaattattgcgagtagtgaggggcaagtagcgcctgcttgcaatacaagcatcttgtacttgcaaggattcaaaatcaacatttacaccaatccacttcagaaatttcacagcacctttgaagccactgtcaactaagaaagctcccacaagagcctcaaccacatcagcaattgttttcttgtacaaccaatgatggcctttgctacatctgatttcaccagtatttgactccaagatcccaagatccctattcaaggaatgaacctctttactggctacctcgtcacaggttactctgcatggatggccaaatgcaaagaactgagtaggatccaatgcttgatcacggatgtagacctgggaagacgcacaagttaatattatacaaaactaaacaataaaattaatacgtttttgtctgcctctatctaaaaagctttgtttttgaaaacatgtcattgagactgtattaattgtatggaggcaaagggtctgacggcgcttctgcacatgataagtatttgcgttgtgtgcagcaatcacagctaaaaccagatttaaattgtaccagcaatcaaagcatttataggaaacatgagaacctgcagatttttttttattgcaagcctgcacaagttggaattgttaacaacgttagagcgtctccgagtcaactctccttcatcaagactatcatggtgtagaaaaaggtgtcggctaacagcaaacttgaggaatgcatcaccaagcacctcaagcctttcaagagaaaggcgctcatgacatttctctgttgtgagcgcctcgagtacctataccaattcactcggtcagtaaagtatcaaacatcaacaaattttaggaaaatcaagtaaatgggttatcaagtgaaatgagatcataccctgtgaccagaaacttcagctatctcagggatcgaagcagacagcacatgtttcagttcaatagccacgagtaaattctccatacgatgcatgattgatggtaacaaggataacgagcttccgatgtctttagataatccttttatctttaagtgagaaagttcgggaggaatctctatgaagtattcgtcaagttcttgtggttctgttcttggcaatgtgagaatgttattaacatttgaaccaaaacatgagaattaacaattacagtatacaaaggtcaaaaggtgtgctgtgtgtacatgtacatgcacaagaaaattgtgatatgcaaaaatcagataagaaaatctacccaaattcgtctgcattcggttgtgaagcaagttccgaacatgacaaagtggtttcacacgcaagagtggctgtgcaggatgcttgagttccacgccatacctagtttgtgcataaaaataagaaggttcttaactcagaaaatcatataatcctcaaatctagagtctcaaccaattttataatggattgtagaaaaagaaaaagaacattaacaagaaagaaaagacagaatacatgcccctgagaaaagtcgcaatcaaacaattactgaataatagaagtttagtagcttacaacttatatatgctctccacatggcttttggtgctagattccttaacaggactgaaaccatttcttccatggcagatatcagcaacaaagtaaaattgtttactgtaggttgtaaaaaccaagctgttcttcacatcatcaatattccagcagccatttgctagctttaaatgagagcccgaaggaggaaatatatcttccactaaaacagatggagtcttaaagattggtgatgacaagcagtttctgatagtcacccaatctacagatataacactttctccatcatgcagacagagtggaagaagaaggtagaaggtggatttgcttgttctagaagagtcttgcagttccaagggaacaaagtccgggatcagctccccccgttcaaaaagaaccttcagggcaatctcctggaaaagctcagctagtcttatctgcataaacattatcaaataagaggagttcattctagtttattatttatctaattaaaatctcagtacctcatcgttgtcgaattctgtgacccctgatggaaaaatctttacacttacagatctttgatgagcaaggtgaagatcgatatccatagtctcagcctcaacgggaagaggtgacttcatgaagaaaccaaactttttgtagatcctatcagcgggatgaggcacaaacattatatagtaagaatgaagattgacacaacttgtagatggatcccacttttgtttaaacaagactggtacacgcatctcatacaggtcacctcgtgaacagccttcacctagcaggaagtaaaatagatggcgttatacaacaaacgaatagcataaaaaagcttagattttataactgaaccacgcatgcacctttgatgttatcaaaatcaaattcatcatctgacaattcgtcctcaatttcatccttggaatctggcaacagaaaatcgttaagtacacccaagttgtgcaactcatgcacagcctttagacaagcatcctttttagcagcttctgtcgaaggtagtagtgaactttcgatttcacttataggagcattagcaggtaaagttatgcgacagatagttccaccaaattcgtcaacaggcttgaattgaaactctggcttgggctgaaaaaatctgagggaatcaaaatgtggcaaagggagattcagttatgccacgaacaagctcccatttactatggaaggtgactctttttaaaaagaacacaacagaaaatttaaagccttactcatcatgtggaagcctagaacaatatttatagagaagggagatgctgcttccaccactgatacaagctcctgtctcatgaactttgtataactcctcatcaagtctaggacaagtttcctctgagcttctgtaagtaatttctagattcattcgatcttcatttactttaaaattttcaataagatccatctctttctcgtttccgctgaatcataaaagaaaacattgttaatcgcgtaaggactcatacttatgggcttatcattttctcattcgtgcaaacctgtccactagaaacgcatattcagactgaggcattcgagcacgacctctggactgtatgaagctggtaacagtctctggtaaatcataacggatcacaagacagcatgtctgaatatcaaggccttcttcaccaactttagtggcaaccagtaaattgagctggaacagtaaaaggaacctctagaagttaaatggaagtggcttgacgattaatcctagacaatacatgtttatcgaaatgggtgtttaaatatcatgggtgtaggaatattaagtgcagatatctccgaatactaactataggaataaagatggctaaattatcacctctttagattggaaccgtttaagtattgtttccatactccttcttgacatgctcttcagtccagaactaagtccaacaaggaaatcagacttccaagaccgtagcagttccaagttatttagtatgcatgacaatgttcttgcagtcacaatccgattgacaaatattatacatttcatgtgtggctctagcctgaaagaaaaagaaaaatggaagtttactgcaagaaataccattggtttctcttccataatgcatgacaagtgaatcaagcacaatgtggtgaaaagcaattaagatttcacaagacccagtggacaataacaactaccatgttcatatagaaatatccaatgtctttttaatggtgaatcaagagctggaagttgtttactaggaaaggacatgagctgaatgttgtttactcagaaaaggccatattctgacttttgaacagagatctatcgacgatagcaaattttcttgtgtatctataaagcttcatttctaggttctcagtcctatcttacgaatgaaaaaaataaaaaaagtagagaggaaaaaaaggtaagtaggactagactttcatacataaagtaagtttgtcatttttcgcgcaaatggtaactttgagaaaacgcatcgggttttggttacgtagccactcaataaagctaaggacagttcaatcatttatttacttcacacatgctttatggactattcggtataaaagcattctaagactctgtcacctctatcaagtaccaacctgaataccgaaaggatcttaatcaattgaactagctttctagagaataatggttccttcaacgccgctaagctgaggaggtcagatgcattctcatctacaaccacagaaaagatgagaaaaaataattaggcaatcaatggctagtttaatagggcattcacatgaaaaaaacaaatccagtgcagaatttgttaaatattttaaaagttggaactccagaaaaatatatgtaatgaaaaacgtttccgtttctgccatggccgtattggaagaaaatttaaggttcagaagaaaaaaacactcactatggtactatgtcatcttacctttagcaacaccagaagagagggcctcagcagccatagaaagatatgtatcacatatctttgacttaggattctttcccacaggctcgtcttgtacattatggtcactattcaattggattttagcagcctccaaaaaacgaagacaataaacattagcacgctacaacatgcattaagacacatatgacaccaacaagaaacaacatacataattttaatttggcaaagaggtaagtttacatatcgaggttagatggttgtaacaaattatagaaacatgcacataaatttaccaaaaaaaatctctaggaatttttatacaattcagcaagcatctaacagaaacccttatttgttttccactttttccctattgtacagctattgtgaatcttgccagtcattgtagtctttgacttcgatctagtacactactaatgcaaaagtttaatatagttggcaattatggtaataactgtaccctaaaacatgcatcagctgcttggtaaaacattgaagaaaccaggaaatacaaggtaatcaatacatctgaaagcaaaaactgaaaacctgatatcaaatctataaattggttcagtatgaaatttctacctgtattgctccccagaggccaagattcagcagagtatatatgagattatcatgagatcttttgagaagccttttcatacttaggagggtttgtgtttgatgagtatcaatcagcagcttaagtgatgccaagcactgttcatatcaggaagaaatataagctcatatatcgaggaacagtgattcaaaagatttatgagacacatttagacaacccgctgtttgatgtcctccagcatgttttcatatctgatggtcgattgagatgcatcacttaaagctgaccgataataatatactttgactaaaggagatgaaacaaaaccatccagctggacattgctttccactgaataaacctttcagatcacgagagacaaaaagggaaattttagaacattgtttcgaaagaccaactgaatgtaagaacattagtacgaatctaaacatgagaaagatatttctgccttagacttccaataaatgattagtttggtaccataagcttgggccgaaaataccaaaaaaaacaaaagattcaagctttctcagagtattatttctactttggtatcacccaaaacacagcgtgatagggctcaatataaataagccggcagtattcaattctaggaaagatatcttgctacttaaataccaaaaatgtgttctaagttcatctgccaacagccaaccaagggaatttcagaaccagcataccttggcattgagcaaattttcaaggctattaatgcttttcgataaattctctgattgaaaagaccctgaaaagtaggtaaagctgtcaagaggtggaccatctatagaacgagatgatcaaaagtaaacatgtattatcaagatcacgacaaacctcacaaccgaaagagaacgaacaaaaggaactcaatgcagaagctaaatcataataaaatctttggacagtaatggaccagcaatccatagtcaccattagaaaaatgggcctacctttgccaacaactggagatgcagtcattccaaatattcgaggccgttgtaaactttccgatttatagaaaacctgcatttgcaacaaagtggagcaactaaaagttgattatatgttaataatatttcaagcacgatataccaataatgtgaaggaagataccttcatgatttctgcataaggatggttgctttgttgttgagcatggtgacactcatcaaatattagaagggagatacactccatcttgatgaaacagtgctgtaagttatgcagaagtatttgtggagtcataacaagaacctgcaggaaaattcagtcccaagaacaaaacaaacaattgaaagaagatcgcatataataaagtgatggttcctacataattgtaaaatggaaataacaatcaacttaaatgagtctcataggctaaaaatagaatgagaaaacaggaaatcacctcattcgctgcaatctctctctcccactccgagtggctcttcacaatcctcttgcctccacaatgtattgcaactttgaagttgacagagtccgctatgaccttggcttgctgtaaacaacaacaaactcaagacagttagaactaatcaatccgcattaaacaccgacatataatcaagatgaacagcctcacacctgttcgaccaaagccacggtgggagcaagaaaaatacaaacacttttcttgggactaagaaccaaatgaccaagctcatatataagcatcactgcaatgtgagtcttcccacaacctgtacccaaatatacaataacgttctcctccgttgctttcttacacagctccacctgataccttcatacagcgaaacaaaatcattaagccttctcaaaaacgaatttcaccacaagcaacacacacaaacaaaaaaaactcgtcgcgatctttccctaaagacaatccgatacaacaacagaatcgataaaataccatccgtacaaaatcgtaagcaaggaagcaaagcaaaaccgaagataatgcgagctatgaaaagtgttggcaaagacgagaaaaaatcgaacctcctggcgatttttctagggtctttctccattttcggtgaaggatcatccgtaccagccgcggagaacaaagaagacgaagaagaggaaaacgaagaaacagaggaagaagaagtgaggtgaaggtcggaagaaacatcggcgtggtcaaagtcgagtgagcgaagatcgtcgccgatttcactgtacggcatggtcaaaggaggaggaagaaacttgtgagtggcagcactagtgtgaagaagaattgggtccttttgctgctttttagcttttttgtttttgtttttttcttcttcacaatttttttgttctctgtctcgcttccccaaaagcttcgagggaatggtcaagctcaagtcaacttcgtcacgcataattcacgatctcacgtctccctctctcttctcttctcttctattacagcgttattattaggatttctttccaataaattgattttatcagctaatcaatacaattataactttttaagggtatttttttgggtggagtgtgtgaaattctgaaccagaaatcatgtgtttctacaatcattgattctgaaaatttttgtggagttattgagtttagagattttaaaatacatcttttggtaaatttttagagtgctgatgtgtcaagatatatagatgaatatcttatctcttcgaaatctcaaatctcaattctttggctgttaagttatcctctctttgttttactataagtgttgttttaacatttttacgaaaattacaaaaacatatatattaaaatttatgttgattgttgttgatggttagggatgttatattacatattttggtaaattttaagagtattgatgtgccaaagtacatagatgaatactttatctctttgaaatctcaagtcgcgatttcgtggctgttaagttatcttctctccgttttactttaagtgtcatttaaaatttttacaaaaaattattaaaaacattataatttctattatacccttacaatctagatgactcttgattttgataaggttaaattaggtatttgatctcagattttgaaaatctaaaatgcgttcattttttaaatttacgtatacacttgaactaaatttaatttgaaatggatagagtatgattttttgtactgatatttgtagcatgaacttccgacttgttaaatgtcgaagaagaagattgaatcaccttgttgcaggtcttttagctctagaaacaatttaccatatgtgaaattgcagaagtttaacctcatttcatttttatgaggttaacacatacttgagtatttatttagtcatttttaatatgagtggtgatgcagcaatgataagtattataaagtaaaaacatctaaactacatatttttccatattatacaacattacattgattcattttgataaatttccaaatttttatagatttaccttttgttgattggacacacttgactacttaaaatttatattgatgtacctttaactaagaaattatggggaaaaaacaagtgcacaaattatgaatcttggttgacattccatcaaaatctaggatcgaaccttgtattctcccagtggcgagagctatataggcagtgagccactttctttcatatcgaatgttggactactcggtcagcttgtagtgtccaaaactaaagtaacaattaaaagaaatgactttttcttaaaatatgtttcttctattttaaaattaatattttaatttttttgggttttgtttgtttgagggtaatcttctagggtaactaagccaaaccgaaaaaagttgatgtgtgtttttggctagtttggttttcagtcgttcgaccacatatgttgatattttgatcgtcactcggttcgaccacatttgatgttatgatcgtcaccagttcggttcgaccacatttgaccgcgttatttactaccatagtaataatcggataaaactcgattgtatcatcgtataacaaattagtcaaccctaaaatatcattcatcgaccttttatccattatagagaaagttggtgcaagtcttgcatttaaaaataaaaaagattattatcgagaactttttaatattagtacaaatgagtacgtcgttatatacctataccgagtgaatatcattggaaatgtgattcttttataaacatcttcttaattctcatcaagctttataaaacattacaacattggaaatgttggctagcaccgttatatatcaacacttcaaacatgcaaaaagaaaattataattatttgcttagtggttttgtctagctagttatatgtatacatgtcacatgataaatctctttctcgtgattgtcaacgcgtgcacttgtattaaagattccgtgtgaaatatggaaaatttaattcatttaactctctactcaaaataaaaataaaaaatctttaacttatactactgtctattggtattcaaattcatgtatttaagtttttttgtttgttaattacacaaaaacatcgattatacatgaatttattgattatgtatatttaaaatttatgtacttagattcctgtatttttagatacgtttcttctagacaagtacagaattcaattagattaattttccgttcttatggaatagtaagattcagttaaaggaaagaaaataaataaatgtaactagttaaaaaggaaataaccaaatttgtaaatagatcgacggctaagatcacaccatgaaccaaaaataaaggtattttactattttattgataccaataagactgaaaatagaaatcagatgtatctacagtatataaatagatcctacagtttgcaaggaaacacacaacaacaaaaaaaaacaaatttggttcctttttcttcttcagacgagtaatatcttttgtcttcatcatgctctattcacctaagaagctgttcttgttcttcctctcgtgcattgtgctgtatgtcaactccaacaacagtggcttcgtaaccgcagcaaatagcatcggcttgaactacggactcctcggtgacaacctcccgtctccttccaatgttatcaacctttacaagtccataggcattagtagaatccgaatcttcgacccgaacactgaggtactcaatgccttacgtggtcaccgcgatattgaagtcactgttggcgttaaggaccaagacttggctgctcttgctgcaagcgaagaagctgttaagggctggttcgcggccaacatcgagtcttacttagctgacgtcaacatcacatttattaccgttggtaacgaagtcatccccggaccaatcggtcctcaagtgcttcccgtcatgcagtctctaaccaacctagtcaagtcgaggaatcttccgatctcgataagcaccgtggtggctatgtcgaacctggagcagtcgtatccaccttccgcgggaatgttcacctcccaggcgcgggaacaacttgtccccgtgttgaaactattgtctcaaacaagcacaccaatccttgtcaacatatacccttacttcgcttatgcgtccgacccagccaacatccgtctcgactatgccagctttaacactaagtccatcgtggtccaagatggatcattgggctattcaaacatgtttgatgcaatctttgatgcgttcgtgtgggcaatggagaaggaaggcgttaaaaatttaccaatggtggtgtccgagaccggatggccatccgcggggaacgggaactttaccacgccggctattgcgtccacctacaacagaaattttgtgaagcatatagcaagcggaaaagggacgcctaaaaggcctaacaagagcatgaacgggtttttgtttgcaacgttcaatgaaaatcagaagccggccgggactgaacaaaactttggtttatacaatccaagtgatatgaagcctatctacaagctattctaagtgtgaaagttacttagactttcccgattcactaataataatgctctactagttgttagtgaattaaagtaagattaacaatgatgcacatgctataagcaactggtgactatgagatgatggctctcgtagcgaacttagttgactttttgtaataaaatctgaatgtagtatttaaaaccaatttcctggttttataaacgaatgtactgcctcttcaataaagtaaggaacctttgcctacggcatcgaatttaatttgaagtcaccagttgacaacgaatgtactggtctggtttgtgcctctccacttaaagtaagttgacaagctaagtgctaagtattctcgttgttactgtataaactattcctaaattatagtttagaggtaatgcttagagcatcataatccatggtttcttaaaaagttaagaaaatctcttaaaatattatataaaacaaaatataaataataaaattaaaaagggttcttaaaaagtaaaattggctcttaaataagagattttttatactttctctcttgttactaagaatcccctaatattaaattattaatttgtagagcaaaaatgttaagattttatctaagaacccatcaataatgatggtcttattagtatcctcgttgttactgtataaactttatttataataaagcatcagtaactttataaatagagttacttatatgacgaccaccagaccaacacgaaacgaaacttaattaaagagtaatttacatggttttatgtttaaaacgaaaatctttcttttatgagatgtcgttaaagagattttctaacctaatttgtcccttttattagattaacagacgtaatctaatcaattcttatgttagattaggaatccaagtttatgtatatgtttgcgttgatgccctaatttttggtttgacgtttataaagttctaaactttgatacgaaattagatctttttggattttggtctcttctttgctggaataatgatcgtgacttggctaaccgggaaacccgggaacgacctaaataagatatcattatgttttgatgttttaaagttgcttttggacatttaaagaataaagaaggtgatagtttcattgaaaatattcgtttatactctgtccttttttagatacttaattttttgtttcataataaatggatattttatgttttcaatgtagatgtttgttaaaagaaaattatgttaatgatccttagtgtgttaatgaaggagaggtaacagtgaaactttaattgtactcttaatatgaacgaaacgaaatggaggaagctaagtaattaaggccatacacgttttagccttcaataatccaaagttgaatctattatcaccctttttgtttaacagttaagatggaacgtgtgaaaaaggaagtgattgaagcgttgcacgataaagatctcacaaccaagaagactgcccatgttcttatttatttttgtttgctccttttaatattaacctattttgtatctatctagctcatattacttgtcttcaatagaaatgaattttgtaggattaagatctcataaccaagaagactacccatgaacttgactcacttaatgtatattggtagtcaagtccatgtatgtttaagttgagtttgttagttatacaaaaacatcgattatacatgaatttactagttatatatattttatatttatgtatcagtttaattatttatgtactcaaaattcctgtatttttggatacgtttcttctagacaacaaaattcaattgggttgatttcagtttgttatggaatagtaagattcagttaaacaataaaatgtaaatagaaagtaactagttaaaaaagaaaacaccaaatttgtaaatagatcgagggctaagattacaccaagaaccaaaataaaagaattttactattttattcataccaataagactgaaaatagactcagatatgcatctatatatgcaaacaaatattttgcaacaaaacataataacacaaatcaagtttggttctcttcttcttcttcatagaagtacgatcttaggatatctctatatacacacattttgcagaaaaaaagtttcatcatgctctatttgcctaagaaactcttcttgttcttcttctcgtgcattgtggtgattgtcaactacaacaatagtgacttcgtaaacgcagcaaatagcattggcttcgtaaacgcagcaaatagcattggcttgaactacggtctcctcggagataacctcccatctccgtcaaaagttataaccctttacaagtccatagacatcactaaaatccgaatcttcgacccaaacactgaggttcttaacgctttacgtggccatcgtgatattgcggtcacagtaggagttagggaccaggacttggctgctctttcagctagcgaagaagctgttaagggctggtttgcgaccaacatcgagccttacttatccgacatcaacatcgcgttcattactgttggtaacgaagtcatccccggaccaatcggtcctcaagtgcttccagtcatgcagtctctcaccaacctcgtcaagtcaaggaatcttcctatctcgataagcacggtggtggctatgtggaacctcgagcaatcatacccaccttccgcaggaatgttcacgtctcaagcgcgtgaacaacttgtccccgtgctgaaactattatcccaaacaaattcgcctatcctcgtaaaaatctacccttacttctcctatgcgtccgacccatctagcatccgtttggactatgccaccttcaacactgaggccatcgtggtacaagatggatcactgggctattcaaacatgtttgatgcaatctttgatgcgttcgtgtgggcaatggagaaggaaggcgttaaagatttaccaatggtggtgtccgagaccggatggccatctgccgggaatggaaacattaccacgccggatatcgcgggtacctataacagaaatttcgtgaagcatatagcaagcggaaaaggtacacctaaaaggcctaacaaaggcatcgacgggtttttgtttgcaactttcaatgaaaatcaaaagccggtcgggactgaacaaaactttgggttatacaatccgaatgatatgaagcccatctacaatctattctaatatgtgtgaaagttgcttagactttcccgattcatcaataattatgttacactagttgttagtgaattaaagtaaaactaacagtgatatatacacatactataagcaactgagatgatgagatctcgtcgcggaacttagttgacttttgtaaaattattattatttaaaagcaatttctctggtttagtaaacgtactatgtttcttcatatatttttttttcttctaaaatcattccattatgtttcttcatctattaatacaagagtatgcattttcaaaataatactttttttatatatatatgcaaaccagtgttttttttatcaaaataagaaatcactgtcccaaaatgattcaatagttcaaggttttataaaagatttcttaacatttataatataactctttttgtcaagatatgaaaaatgaaaaagtatctcttatgattaagacagatgttttgattcgttcatattccattgaactatatatatatcactcaactagccaggtataatatttcccattacatacaaaaaaaaatgatcatgaaattaatcaatttataaatgttggtttttttttttttggttaacactaaaaccaaaaaataaaataatgttgggttttgtttgacaaaaaaaagttaatgaaatgaatgaacgataagaattgagagcaagtctgtctctgacccgtcttaatccgattcttagtcaattttttgagttcgtcaatcatattcttcttcttcttcttcctctgattcccccagaaaaaacctagctccttccctcatttccccccaaatctcacgacttatttatgctcgggggagactaatcaaaggtcaaaatccattagggagggaatcgaatctcgatcgatctcaatttcttctgagaaaagaaaaaaatgtcatcggagattgaggtggtggaagaaatccaatcgaatcccaaggagaatggggaatcgagttctaaagggattgaagaagagagcttgaagaacgatgtctatactgctgccgcttatggtgatttggagaagcttcatagattggttgagtgtgagggttcctctgtttccgagcctgatgctcttggctactatgctcttcagtggtctgccttgaacaaccgcgtcgccgttgcccagtaccttatcgaggttttgtgtcattttacgaattgtttgttgattgctaaattagatttgaactagtggttttcaagtttctaaaactgatccttctcgatttctggtttttccagcatggtggagatgtaaacgcgacggatcatactggacagactgcattgcattggagtgctgttcgtggtgcgatacaagttgcagaactgttattacaagagggtgcaagagtagatgcaacggatatgtatggctatcaggttcatatctcttctttaactacgcgtccatgttctctgctgacttctatcaaatttcccttcttttcttgtttagttctcaatgggtgtatgttaatacttaattttgaactgcttgtaggcaacacatgttgccgcacagtatggccagactgcttttctttgtcacgttgtctcaaagtggaatgctgatcctgacgtgcctgataatgatggaagaagccccttgcattggtatgcttgctgcaaagcttgccttcgtgaaattgttacttagtaattggtttttggcttctttttattttttcttacaattgtttagccttgcacgcttatttggagactggataattggttttatttgttcccttttcttattattcctatagatttaatatctcttcgttcaattttgttctagttgccaagtatactgggtggattagaattaatttttgtcaactatttgcctatgatagttctcgagtttttgttatgaagatttgtgaatacgtattactgttttccatctagagactaaggttacataggttattttctctcccgtttttcttactgagacttcgttaccgttacatggattattctactgcatgatttttagctttcttatgttgaccttttgattttatcctatttttacagtatcttttcagaagacagttctaatttcgtctttatattcttctcataatttgagaaattcagggctgcatataaaggttttgcagattccattcgcctacttttatttctagatgcatatagaggacgacaagacaaagaaggtggttacaaacatattttttttttaaatcttctttgtttattttcttagattaactatacgtttctaacatcttctccgttatattgattctgttatcaggttgcactcctctgcattgggctgccatccgaggtaatttggaggcttgcactgtcttggtgcaggctggaaagaaagaggatttgatgattactgacaagactgggctaacccctgcgcaacttgctgctgaaaagaatcacagacaagtttcttttttccttgtaggtatctgttttacttgtttgttgtgtagcaatatgtattcatactgtttgatttgatgctttcgtagtggctgtactgcttgcaataattagtagttgaatcattttattggcagttatgtgcatctcatttgacctttgcatacctggtgtagttaactctacttatagctgtactatgttagtttttccaagtctgtagattttcttatccattcaaaatgagcagcattatgcttaaattattgagaaaattgtgtcgatatttgtctgaatctgtcttataaacgctactgtgcagggtaatgctcgaagcctgcttgaaaagcgttgtgacggaagcagtcccctcggaagattgtcaaagttgggactcgctccagttctttggatcatgatcctgctgcttctgctcgtatatacgaattcggttgttttgggtagttaccttggccttctcaattctcctttgtctgcatcatatcaagtaactgttctatgcatgcctatcattttatgaaccctttgaccattgcagcatccaatctgccaaagttaacgactgggattggtgcgcttgcatggctgggattcattcttgcaactgcaggattatttttgttctaccgctgtagcaggtatatgctcaccctgtccttcctcgatttccatttcgtatatcttctaaaagtagccatgtctgctctctgttgttatctgattattagtatagtgtatctttggctcttcactatgcataaatttcttatatttcacctgacggttgcagattaagatattacattatagtattctaagccgattctcttcatggtttcattcatcacctagcgatagcagtttgggattttaaggcctttacttcgttccagctgtagtttctattgtgaactccttatttttccatgtagtgtaaatacctttgtatcacaagaagcgggttttcttattgttttatattgtaattttattttttctgcaggaaggatccaggttacatcagaatgaatatccatgatccgcaaaccatgaaagatgatgttagtagcttattgattctcaagtttaacttacataattgtccatattatatccggttcggtatgattttgagtactattttcttgttcaagtgtctgactggttttcttacccctttacaggaaccactcttaaaaatagagctaaacaatcctgctttgcttgctgggaattggacacagctctgtgcaacatgcaaggtacctgctcaaattccgttttatgtctttcttcaatcttaacaccatacttaatcatcgatgctacatatttacttgttttggtccactgtgtttcattttattcagattatcagacctcttcgagctaagcactgttccacctgtgatcgttgtgtagagcaatttgatcaccattgtccttgggtatcaaattgtgttggaaaagtaagtacagttcctttcctattttagtttttgacatagaagttggcaaaataggagtagacggatcaggcttttgtttgatactaacatttcatataaactaaatctgccttgctcttcattgtctcttttggtgtgacctaacttacagttcttttcgaaaatgcttagtggtatatttgtgttgcatatttgggtatacagatcaacagatatgcttcttggtgtcatatcacctcttctatttattttggttgctagtggtttgatttgttagtcttgcagctcgagcatgatactagtctgtgatactaatctgtggattgtccttgttttccaacctattttgcagaaaaacaagtgggaattttttctttttcttctacttgaagttctagcgatgctgataactggtggcgtcactcttgcaagtatgtttgtagtggaaaatgccctttaatcattatatgtaaatgtagagaaaactttcggacaaaaatgtaaatgttgtattatctacatgcaggagtcttgagtgacccttcagctccatcttcttttggagcatggatgagccatgtcgctagtaatcatgtgggtgctttatcctttctgctagtggaattctgcctcttcttttctgtcgccgtcttaacagtcatacaagcgtcacaagtgagccctcattcctttttccttatctgcacatctttgttcctcatacaaaggctgctctttcgtactttgcttccccggattactcatctctagaatagctccagagctaaaactcactaagtagactagattattcgattttcatggcgtggtgttttgcctcatcctgaagatccattctccctattttcccttacagatatcaaggaacataaccacaaatgaaatggccaacgccctgcggtacagctacctaagaggtccaggtggtcggtttaggaatccttatgatctcgggtgcagaagaaactgctcggacttcttagtaaaaggttataacgaagatattgagtgtcatgaagaagacgcaacacagagaccagagggtattagcatgatgcagatgcagcggaatccaaatcttcaaaatggcaatggccatgttgctatcgatgttaacccgacacataattcacagtcagcacatgttcattctgccaactgcagccatagccataatagtaagtcaaagagtgacaatgttcctttgggtttgggacttggtcttagccgcaacccaacccgacctgttgtatctccataatatggcccgtgtcccaaatgtgcatttgtgttgtaagaaacacgttttctctcctcgagtcattgattacatcattatccgtttcatgtgaagatagtaatactcccttgttttcaattttctatgcaaaaattaaatgtcatgtttcttatcaattatttttagagtatattttcttattggttgaattcagtttactcaatgacacagagaatataacagaaatggttgtacattatgttttctggctgaggtatggaagtttgactccgtcaatacactgatacgacttgcttatatgtaacaaaaacatcattaaattttatatgtaacaacgaattacaagacaatgactgactccgcaccaaaatcttgctaagggcccaaaaatagaaaatgaaaaaaaaaagaaaaaaaaaacaatttgttgtttgtgtatgaatgtttcacgccaaatgcaatctgagtcataaaccaatgaataaagtcacaactcaccctgtggcagaagaagaatctgcatgatatctttgcttcacccctcaccaaaatcaatggtataaatgttacacaaacaaaatagaacatatatgtttttttctgtctacaaaaatctgaatttggttgtaccacaacaagacaaaaacctgcaaagagagattttgtggttagctgatgatttcaaacccaagtggtatccagaatgtgaacacttattggttcaggtcaaagaagtaaaagcattgcctataacagtcgcaataagtaaaataaaagttaggtagttatgacagagcatagtctggacaatgaaatgaaatggactaagtatagtctggtctgattaagtttctttatcatcttgaacataaggttcagccctaacactggccaacaacatttagttcctcagaagtcagacctaacaatttcgtgagattatatatgtaccttgaaatgaagcttgatcaagataatgaccaaaatcattctgagacactttgtcatggaaaccgcttcaaccacgttggattgctatatttggcacatgaaatatattttcagcccttctctttagtatctcttccaactggtctgaagggatcccatttgtccaatgttttgcttcatatatctcgtcaaaaatctgtataatctcttccatgtgaaaccttatatctgcagcaatgaaaaaggattatatcaaacatcatggcctatctttttcaaaatcaatattgaactagatcacgtggtacctcgtaatgtattgcctgccacataatcttcacttattatctcaacaacatcatccttacaagttccagctaactcaaatttctccattgcagcttctaaactctctcgccagaacggttggtcaagtttgtactccatgattgatctctcataaagtacagcacacaataaaatatctatccacgactttagccttcctgcttcttttgctgggttattttgagttgagctacccagatccttttcatgtgtcaggcaatcggttttgcctgcttgagaaggctcactttcctttccggtttccaaattttctaacacttccatagactttttgatattgctttctgcgctttgataaaactgtactacatctgcatacggccatgttttcaaatcaaggtgactgacaagtacataataccatgaaagtcttgcttcctcaaactgctgcagacctagtgccagaaagacttcaaaacactctggctttattttcatggcctcttcatacttttcttttgcatttgcgtgctccttcttagcgcattcataagcagttttaacttgctcagaaacagattctccagaaacaccttgtaggaggctcaaccttttccttgcccctgacatgtgcacatatcccaagtttaacaatgatcgagctgcaacttcttggaattgctgagctgccctgtcaaaaggaccttgagctgcatcggaggttaccacttcctccatagcttctgaattaagtttcatcccaagttcttgaagattcaagcatctatcagaatcaattctggcctggatcttaaaaagatgagcaaattcaatcatccaatcttcaactttacatccacctcttccgtttacctttgctttaaaagaatcagcagtaattttgagtttcttcatctcaactaatcttccgaaaaagggatcctgctcaggactaacttccactacatagaacctcatagtgccctgtgaccttgatgacacctcactcattcttaactcttcatctgttgtgattgtcactaaatctccttcttggtccctgtactttatatgaactgctcttaagcttgggaaacgctcatgaacaacttccctaagtttaaagagagtgcaatttataggcaactcagccaatcttatatcgtcagagtatacgaatttcacatccttgtttacatcttctacacctataaccagaagttcttcctcaattatcactttttcctgttccttgctcgtatcacttctcttatccgactgtttcccttttactttcattttaatcttttccttgcctttttcagctaaaacattgttcttcttctcaggctctacatcctcaccctcaccctcgctcttctcttccacttgattgctctttttagttttcttcactcgtaccttgcctagtttagcccacagtgctgcaggggaagcaccaacaggttcaacataatctggaggcaactctatcactgaattattaatccttaaccctttgctctctaaagttctcttaagcttctcaacaatttcggatgccatgggattcttgggatccagtttcgaaaccatacaaacatctctcaaagccaaatccaacttattcaatgcctcataacatcttgccctcttcaacaatgctttattatgatcaggagtaacacttagcgctaaatcacattcatgaatggctttggcaaactcacctggttccaattgcatataacaagaagccacattagctcgaacatgagacacttctacatgatccttaggaagtatcttgattgcttcaccatatttaaacattgcaccatcataatctctcttctgaaacaacttgttcccttcttccttcaaaccttgtgcctttgaaacacagtcatctaaagtttcaacctctgaaacacaatcatctaaagtttccacctttggaacacaatcatctaaagtttccacctttggaacacaatcatctaaattttcaacctttgaaacacagtcatctaaagttttcacctttgaaacacaatcatctaaagtttcaacctttgaaacacaatcagctaaagtttccgcctttgaaacacagtcatctaaagtttcaacctttgaaacacagtcatctaaggtttcaacctttgaaacacaatcatctaaagtttcaacctttgaatcatccactaattgactttggcttgtttcagcatcatctgtagatatctcctcattttgcttctccatggcaaatcctcagaagcaaaacaacgagaggaagattccaaatttacaaatgatttctactcatgaggagattctatgcccgagcttcaagagaaactataaaaaccgctaattccacagtgcacacaaaagaaagaagaaagaatacaaatgtatttttaaagtataatatacaaaagccctagagagattacaagatagaacacgaacgaaacgtgtctacctcttatgaatcgagatccttgaatcggaaaagaaacggcaattttccggagctgtgtctgggaagattatatgggttatctcgggtaaagagatatcaatttcccaggaaagagatggggatggagagaagacgaagaagcgatggtaaaagaagaggaacgacaaggaagaaaagattggaccatgtggctctgttacgagatagcttgctttgtcgtaaagccacgacgactcgttgagccaaacactttattaaattttttaataatataagaaaaagaggagaagacgaatcgaatcatccccgtttgttgacacgtgtcgaatctttacagcgaattaatactttcggaatttattcaattcccatttcttctattcatgcatttatttttatttaaatacaatctatactgtaatgtgttttttctcaattgaaagtatatctaagttaattcatagtgattcaatggttgaaatattcaaaaaacaaaagttaattattctttcatatattcttgaaattattttagctttcggttgtgtttacatttgtaatttacaagttagtaataatatgtcgatttgttgtaacaaaatgcaatggccatgccatcaaaaattgcaatggtgtaactgtatcaatacagtgataattttccgtttttacactatcgactttcataaaagttgtgattgtgtgaccataccaaaataatagcaatgtgcaaccattaattcgtcacatattgcatattgtgcactaatttatcaccataaatacataatgccagaagaaatgtacaagatacaacaatcgttaagaaggctccttaacatgtagtgtttacgtccgataactttttttggatgagcctaaaaactatatttaattcactcccttttatatttaaaaatctctataaaaaaaaaacaagtttatactaaattagacccatatgttttccggcattttttaaaacacgtacaatattatgaaaaccaaagtcagatgtaattacaacaacgacatttaatggaatagtaagaacttgtcataaacaaattctctagctgctctgtcaatatataatatattatcgagctcactagaaccaagtttgaggattacaatattaggcacactcttgcgcaaaagaaccttatacaaactatattatagacattttctaattttcacttggttttctaaaaaaaatagaaatagttttcatattcaaaaagcacgaaatgtatgtgcatcattttgctcgacctcttacgatggaaaaagttcgaatatatgtacatcattttgttttgatttcatgggaaatcttaaattctaacaaggtagattttataactaaacgaagttaaatattagtttaaagttataaaaaagtttatattttacaatttaataaggtttcatgtatgtttgagtttataaaaagtttaaattttacaattaaacgagattaatatcggtttgggtttacaaagagaattaaaatttagattttgtaattcaaaaaggttaaatattgatatgagtttataaacatgtttagattttacaattaaacgagattaaatgtcggtttgggtttaaaaaaacggttacggtttagattttacaattaaatttaaatgtaggtttgaacaaaaaaaattaaggtttagattttataattatttattaattgatggcagattatgattgactgaaataaaaaaaaagtgaacaagaggattaatcaacataccaaaaaatcaaattgactataagaaaacatgcttatttaagctaaaatagattcattgaatttgtttggaaaagatcatcagaattcattaactcctaactacaccaatcgcattaggaaaatttccaatcaaaattaaggaagaattcgagcagactgattaaatcaagtcctaagaaaatgtgatttatagtatctacacaaatgacaaaagttcatcaatatactgcgacaaggaaaaccctaaaaaagttccttcgtacgcaagaaaacataaagaaaaaggaaattcgaaaccctagctcgttaatcttgatcttcatggaagcggctaagtcgtggccggaactcaggacggcgatggctatgaagagacgacggtttagccaaattcgctgctaaagatctcctaaacctctccgcctcaacactaccgatcttcgctaacgaattcatcaacgccaatttcctcagattcaatccaacattaaccctaatcgtattatcaccacgattgttacgcttgaccgtcgaagaagctagggttttggatttctcatgttctaatcggcggtgaaaagagcaccggaaagaaccagggtgcgtcgtaggagagcacaaacactttctcttggtctgatgattagaagaaacggttacgacggatggtttcgggatgcttccgggagaataaaacttcaatcggagattgagattcttgttgcaaggagacggagatcgttgacgatgatgatgatgatgattgttgtgtaatctctgtgaagaagagagaggacgtagaactgatcggcttgatcttccagtagccgccatttctctctgcacaagtgaagagatcgatgagagttttaagcgttttgttgttttttttgtgttaagtgtttaattaaattcggttctgtttgttgaagaagattcagcgattccttttgtttcgcatcatctatttatggagtatatctacgtagagatctctggcggttgcgaatcgtgtccagggtcaaatctgtcatttaatgtcacctgtaaaatgttattttttcctttttcctaagcagaattaatgtaccgaattggaaggaaaaatcagagtcaatcctttcaatactccaccttttacccattaacactgagtttaatttgcatctatgcaaaaaccaggataaggcagtgaacaaaattaccactgctctttgtttttgctttcacaacagaaaattttttaccatttcttttttacctatacaataacaaaagtttctccatgtttttgtgcctcaataacaaaacttatgagtcttcctttctgaacgtctgaggctcactgcttgcaaatgccaaccatacaaccgtccccgtcaagtagaagaatattgatggcacgaatagagacatctacacggtgatcagaacctttgagttaactaatcaattagggactgatcatcattgaaggtaaagctagcaacttacagtccaggaatgggtcgagtctaggagaaaaccagttagggccactcctacaattccaggtactgccccgactgtgtttgtaataccctgaaatatataaatatcacacaacaagtttagagggaagctagttcttcatacacatatataatatcatagctcattagcatctagcaaggttcatatgagaagtaccaggagtatgcttgcatattcgggtgaaatgtcctgatgagtacaataaagtcctgtaaaaaggaacatagtgtttgtcaatccattacaaaaaactccttcgggtgcatcttcttatatgaagttacttgaagacttttgacagaagatagagaggtagaacatctccaggtacctgataaagcaaaacttgatagggccaagcctgctgtcaaaattcctacaatttcccatggtggcaatccaatgtccacagatgaaagtgtcatgcagatcgctggtgccacaaacgcaatcgtttgacaaatctttcggacctacatggcaaattcccaaggagtttacatatcgaagtgacgacaggttgttctagatatccgggtaagcataggtgcaaaatgagaaaagggaataaaaaaaagaatttgctaaattgagtatagaataaccgatctgcaagagccttcaagtgaagacccttttggtttgttacaaggctacatacagggagaagatatgtgattttataccgtggtagtatcaactccatttgtaattaagtaatcagcaaattgtgaagcaagacttgtcacgacaatcgaagccagtggaggaaggatggaaacctgatcttcacatccacatattaaatcccgaaatgttatacctttgcaaaatgcaagctgaactgatttttcaatattccagggaaaacacaagataaaagcagttttatacttacccaagcagcttctgtcaaatttagactcagagcctcactgtataccggaaatataatcagaattactctcgtcatcaacaaagatacagaatgaaagagacagaaaactggtataaccatcaatgtgttttttagagaacaatttaaaagtatttttatctaaatcatggcccggatcggaaaagatgagtaatgaaagcaaaacataaagcaagtatcaattaggtcttgaaatgagaacacctcttgtacaaattaagctaataaatattagaatttcagtctacagatatatagcttttcaacagataaagcagcttaagcattgcccagtaaaatctaacatggtgaaagtagaccccacaattacctgaaataagttggtagccaagataaacaggtatagtgaccccaacttccacaaaagtgagtgtatatcattgcccaaacagccgggctttggaaaaatgacttccatggaatctcctgtagtaagatacccaaaaaattgaagcattgacttaaagcaaactataaggttttggttgttcaaaaccatttgcttatttcttggccatttttgcaccatattaggggacatggttttaaaccaagtgactacaactaaaatataattccaatcctccttcgctagaaggttatgcagttctcctacatagttattgcaactacgtacttatagtagacacacataggcttcaaaggcttgacaaagtgaattctcgctaaattcaaccttcatatcaactagaaatgaaataaaagaacgtagccagacagacataatattagataaccaaccttcaatgagctccccaactcttcctttgtagcgttttctgatttatgcgaagtagagatctcattacctatcaaagaaagggcaatcctattgtaaatggtgttcaagtccaagatccaaacaactgagtggagtattagttataatagttggccaataaacagacaacaaaagattatctggctaagtgtacattcaaagaattgcttcactccccaatacagtctatgcttcagttcaagatgatacgaacttaatagtgggttagagaaggatttacaagtaattctcatctgttacacttctgtttcacatattataaaaagaaacgactaggatggttttcacaatataaatcacagacaaaagtaagtaaatgtgtactaaatacaattatgtgacatctaagctccctggtttcacaattatattcaagattaaataaagtttgaataagcaaaaagaaggagaaaccacctttatatgaaacttcttcttcattaagaaactgaaacccgacgaaccttcaacatataggggaaaaactgagaatacagaaatactaaaatagcatgttggcatcttggtatggacgatgaaataaataaattcagccatcaatatttgaaaaagaagtatagtcagaataacaatgttgtgaaagtctttagtcagtaatcgatgagacttaccagccaacaccaaggagaccaaacaagtaaaagacagattcccaattaaaggtttcgatgatgggaggagccaagagaagcctgcagacataataatgttaggtctgtgcaagtctcgaagctgtccattcgtcttcattagagtattaaccaaatcatatacattgataaataaaaaccacatacttgtaacttctatagtttaagtatcacaacaagaaaaacataccccattacactccccaaactcagtcctccaaaaacaaagcctaccgctcttgagcgctccttaacaggtattgtcctgtacccagcaattgaatggcgcaatcaggatatgaaagaaggggctaaaagctataatgtaatatgtgcagccagaaatttaagcataacgcgactaaatacatgcatatgtaatttcagttttagttaagaaagggtttcatatgaaaaaaatgtccagttcttgaagttgcccatcggctattgaagaccaaactatggatttagtagattatcatatctagatcataagctaaatttaaagacaatgctgcataagcaattaaacacacataatttatattcgattaaagtatgagcactctacaaatttgctccagattaatacatgcctggcaataaggtctgtcgcagccgatggggaaacaccttctcctattcccacctggagttacaaatctctgtgttaagacaaagacataatgtaaggctagagtagggtaggggagagaaggaaagagcttaagagtgttcatgggactttttacaagcttaataaactaaggaatttgtaacaagaccatgagtcgaaagaaactagaatgatttgcataaatcactataatgacataaacaaatggacatgcttaccaaaattcgagaaaagatcaaaccgggcataaatccagcaagtagtggaacaagagctgtagcgaaagaccatgtaaagacaccaatctcaagcacttttctgcatcaagcatacaaactcatgaactgccctgaaatcaaaaatgggaagagcctagaaaaaagaagacacaccttccgccaaaaatcttggaaagccaacctccaggcaactggctcaaggcataaccccaaaagaaggaagactggaccaacccagccacagatgagctccatccaaactggtgtgacattggtattatagcaatactcaagttcacctgcaaattctcaccagacaatatacatagtcaaattatatggtcctcactcctcacaatcatcaccaaaaaccacctaaagaagaaactacaagaaaaactacaccttaactaaattgaactcaaattcacaagaacctgatcctcatatatcatgtaagctaacctaaaaccataccataagaattgcaaaaaaaaatgtttcaattttaaagcgagaaaccttgtccatattgcagataacaaaggcgagagaagtagcgccgataagcttatatctctgaggtatatttttccatggaggccaattctgttcaaaacccgtttccgtactgagaacttcaggaatcggaagctggggtttagggtcttcgataggatcctttggaggaagcttcttactctctctgactcgttcagtaccactggcggagcacttaacccttgatttgataagaggattttggtggtggtgggggaagatggtgtatacggagaggaaaggttgtttatgtgcgtagataggagatgagaagaagtgattgtggggtctcaaggtaagtctcgccattgttggtgtcagagagaggagaagaaggaagaagaagcaaaatggaaaatgaagaatgattgcctgaattgaagaagaagaagagggagagaggaggacacggtggaggaagaagagagcttgtgtggctctcactgtgggcagtattgtcttcattgtgggtcccttttccttctgtatcaaaagcttcctttgcgtgattctcttgtttacacttttttttttttttaatgactactatataaaaattgcaaaaaacattattagagcattttaatttttaagataatgatttaggatagtataaatatatttatatagcagccactgttagtaatttgtcaaaaacaataattagtaatatttgttgtagactaccaaattgtgccaatttaaaaaaaaaatgaaaaaattgtgccaatttacttgtccatagctaataagatgttatcttttctggtgctagagttctgcttcttaagtttttttatttaagaagatcatacaacatataaaatgaatgttgttgtagatcttgattttatcccgctctattacaactattagagcatcattaatttactaatgatttgggatagtctataaaatcaagaatctaaaaatcaaaacatcttgtagatgggcttcatatctgttggattatataacccaaaattttgttcggttcccgctggcttttgattctcattgaacgtcgcaaatagaaatccactaatgccactctttggtctctttggcgtccctttaccgctttccacatgtttaacaaaattggtattgtatatagatgcgatatctggagtcgttaagtttccgttaccagcagatggccatccagtttctgttaccaccattggtaaatccttcacaccttctttctccattgcccatacgaacgcatcaaatatcacatcgaacatgtttgtataaccaagtggcccgtcttggaccacgaccttgttggtgttgaagatggcatagtcgagctgaatgttgataggatcagcagcatatgcgaagtaggggtagatgttgacgaggataggcgtatttgtttgagacaaaaacttcagcaccggggtaagttgttcacgtgcttgaggcatgaaatctccggccgaaggtggatatgactggccaaggttggtcatagccaccgtggtgctgatcaagatcgggagactcctcgacttgacaatgttggtgagagatttcatgacgggtagcacataagagccgatttcccctgggatgacttcgttcccgacagcaatgaacgtgatgttgacatcagctaagtaaggctcaatgttggtcacgaaccaggtgttaacagcttcttcgctgaccgaaagagcctctaagtcttggttcttcacgtctaccataactccgatattgcgattccctcgaaaggcgttaaggacatccgtagttgtgtcgaagatccgaatattggtaacacttaaggacttgtagaggttgataacttcagatggaggcgggaggttgtctccaaggaggccgtagttcaagccaatgtttgttgctgcgtctacaaagccaacattgctgtagtttaacagaaatgccacgcacaaaaacttcaacaagaacgtctttctatgacaatccataattaaaggcgtgcctgcaaaatagaggataaatttaatattttagtttcaaatcttatacaagttttttttgtatgtatgtctatatagagacagcagatgatcatacttgtatgaagaacgggtacgagggaagcaaaccaaagatgtttgatgtttctcttcttttcttattcgttgcaaaacaaaagattgtagatgcatgcaatttatatccatagttgagatatgctttctattttattagtaccactaaaatagtaattttttttgttatagttaaacttttcgtgtctatctttttttgggggcatagtttaattgtctattatgcctattttcaaatttgctttccactatttttgctctatacttttcaaaaataaactacattttatctagacgtatgtagccccctgacattttaaaattataagaattacaccacaaaattaataatattctttacactcgaatttttatgtaaagctttgattttgaaaatagttaccatatacatatgtcatttatttacatttcagtgaaaatattttgctccatttataaattagtcatttctataatctattttaatgagataaaaaaatataaacacgctgaataaatttctgtggaaatgatttacttgggggaaaaacaagtcttcgaagttcgaaatataacgttatcaaaaggcatcttgaaactgggcaacttgcttcttctgcatattaaagtaatatatctttagtcttagaaaatgccaaagcaacgacaaagtcaagatcgtcgttggtctataagaagcaaaaacgctcaacaaattcaagatcctctaaactcaagtagaaacaatggagaagccaaagttcaagactgtccaagaggtggttgcagctggcgaaggactgccggagagatatctccacgcacccaccggagacggcgaagttcaacctcttaacgcagcggtaccggagatggatattccggccatcgatctgaatcttctcctctcttcttctgaagctggtcaacaagagctgagtaaacttcactcggcactctctacatggggcgttgttcaggtttgaccctcttagtgattgatcagagtaatgaaatcttgtagaagttccggtgaggaggtgatatcatggaagttggtttcttatcgatgcaggtgatgaatcatggaattacaaaagcgtttcttgacaagatttacaagctaaccaaggagttctttgcgcttccgaccgaagagaaacagaagtgcgcgagagagattgatagtatccaaggatatggtaacgacatgattctttgggatgatcaagttcttgattggatcgaccgtttgtatattactacttaccctgaagatcaaagacaacttaatttctggcctgaagtcccacttggattcaggtaaagtttattataccttttcagtttaaacagcatctttgttcattgagtttggtgattttgacatattgtttgtttagggaaactttacatgaatacacaatgaagcaacggatagtgattgagcaattttttaaggccatggctagatctttggaattagaagagaatagttttctagacatgtatggagaaagtgctacgttggatactagattcaacatgtatccaccatgtccgagcccggacaaggttattggtgttaaaccgcacgctgatggctcggctatcactcttctcttacccgacaaagatgtcggagggcttcagttccagaaagatgggaagtggtataaagctcctatagtccctgatacaattttgatcaatgttggtgatcaaatggaggtaatcagtcacctacatatatgaatatgattttgaaagattaattgatgtagatttgacataaataaatctctatttctcgtgtgttttcagataatgagcaatgggatatacaagagcccggttcatagagtggtgactaacagagaaaaggaaagaatatctgtggcaactttttgcattccaggtgcagataaagagattcagcctgtgaatgagcttgtgtctgaggcaagaccaagattatataaaacagttaagaagtatgtggagctctacttcaagtactatcaacaaggccgaagacctattgaagctgcattgatctgatcacacttttcaagtctcatttattggtttcacaaatgaatctgtttctttcgttacttgagatcctttataagaataaaactgtttccttgtttgttggaatgtgaggctgcattgtgttgcaattctgagaccagaaatataagtctaaagttgatttccatattcagttctaacactaaaaacagaggttaacccaaaaacagagctcaacactaaaacagataagtaaaattatttttgcatagttgttatatactactgaatattcttttgttaataattctaggtttatattacttttcgaggaccttgaatattcgaatcttttcaaatcgaacattccaaaaataagtcacgattcttacggctgtcatcattggacaaccagtcttctctgtttttcttccatgattctctcttacaacatcaatcgttcacccaaacaccctttctttctctgtctctttcctcggaaatttctccttctccggtgtcgaatcgccgagggaaggtgatttttccgggaaagtctccgttttgtttcacctaatcatctcaaagactcgtcctttataaatggcgacgacggtcatggcccttgcagagaaagtactcgaaagagtttacggaacttccaaatccgccgtttccgtaacaagcggcgacggcgaaaagactcaccgtcatacccatcatcacattcaccgtatcaaaagctacgacgacatcgacgaggatgaatcatcattggagcttatccagatcggtgctgagaggactaagaacgtcttgatcctcatgagcgatactggtggcggtcaccgtgcttccgctgaagccattcgtgacgctttcaagatcgaattcggagacaaatatagagtaaaaagaacaatgctgagaaattgtagtttattctcaccctaaaaggattggtttttgattgagaattgtatggttttgacaggtaattgtgaaggatgtgtggaaggaatacacagggtggccattgaatgatatggagagatcatataagttcatggtgaagcatgttcagctatggaaagttgcttttcacagcacatcacccaaatggatccactcttgttatctagcagccattgctgcttattacgctaaggaagtagaggctggtttaatggagtataagccggagataatcattagtgttcatcctttaatgcaacatattccattgtgggttcttaaatggcaagagctacaaaagagagtcctttttgttactgtcattactgatctcaacacttgtcatcctacttggtatattttattagcttggtttagactttgagagaagaaggtagctgcaaagtttgatttttttaatcttctgtggtttaggtttcatccgggggtgaataggtgctattgcccgtctcaagaagtggcgaaaagggcgttgtttgatgggcttgatgagtctcaagtccgtgtctttggtttacctgtgaggccatcttttgcacgagcggttttggtgaaggatgatctaagaaaggagcttgagatggatcaagatcttcgtgcggttctactgatgggaggaggggaaggtatgggtcctgtgaaagaaacagctaaagctcttgaggaatttttgtatgataaagagaacaggaagcctattgggcaaatggttgttatctgtggacgtaacaagaaattggcatctgcattagaagccattgactggaagattcctgttaaggtatacatgatttaaacaaacccttttccattattagaggttcataagattcatgtttcatggatattgactttataggttcgaggatttgagactcaaatggagaaatggatgggagcttgtgactgcatcatcacaaaagtgagaggaatttggtttttatgcctacctctgttaaccaaaatgttcataaagctaaatgttctacaaatcttgcaggctggaccaggaacaatcgctgaatcgctgattcgatcacttcctatcatcctcaacgattacattcctggacaggttggttgagatctgcatttttaatgtttcctgctcatatatatatatatgtataattctcatatcaattacacttgaaaccaaacaggagaaagggaatgtgccgtatgtagtggagaatggtgcaggagtattcacaagaagtcccaaagagacagctagaatcgttggggaatggtttagcacaaagacagatgagttggaacaaacttcagacaatgcacgtaaactagctcagcctgaggcagtcttcgacattgtcaaagacattgatgagctctcagagcaacgaggtcctcttgctagcgtctcttacaatcttacctcttcttttgccagtttagtttgatgtcccatgtttatattaacatgtctcccttagtagttcttttgtctgttattttttcctttccttatattccctaatttgtttattgattgaagttgtatgtattatttttaagcaaaaggttcatgatgtctttgcattattgttagccattaacaatatcaacaagagattcttgttcatatagaatcacattactattaattttgtcgatatatttcacattattagagacggacttacacattattagtatatgatacatttt

SEQ ID NO: 1455 - DNA, 70169 bp, Arabidopsis thaliana
gaattcggagacaaatatagagtaaaaagaacaatgctgagaaattgtagtttattctcaccctaaaaggattggtttttgattgagaattgtatggttttgacaggtaattgtgaaggatgtgtggaaggaatacacagggtggccattgaatgatatggagagatcatataagttcatggtgaagcatgttcagctatggaaagttgcttttcacagcacatcacccaaatggatccactcttgttatctagcagccattgctgcttattacgctaaggaagtagaggctggtttaatggagtataagccggagataatcattagtgttcatcctttaatgcaacatattccattgtgggttcttaaatggcaagagctacaaaagagagtcctttttgttactgtcattactgatctcaacacttgtcatcctacttggtatattttattagcttggtttagactttgagagaagaaggtagctgcaaagtttgatttttttaatcttctgtggtttaggtttcatccgggggtgaataggtgctattgcccgtctcaagaagtggcgaaaagggcgttgtttgatgggcttgatgagtctcaagtccgtgtctttggtttacctgtgaggccatcttttgcacgagcggttttggtgaaggatgatctaagaaaggagcttgagatggatcaagatcttcgtgcggttctactgatgggaggaggggaaggtatgggtcctgtgaaagaaacagctaaagctcttgaggaatttttgtatgataaagagaacaggaagcctattgggcaaatggttgttatctgtggacgtaacaagaaattggcatctgcattagaagccattgactggaagattcctgttaaggtatacatgatttaaacaaacccttttccattattagaggttcataagattcatgtttcatggatattgactttataggttcgaggatttgagactcaaatggagaaatggatgggagcttgtgactgcatcatcacaaaagtgagaggaatttggtttttatgcctacctctgttaaccaaaatgttcataaagctaaatgttctacaaatcttgcaggctggaccaggaacaatcgctgaatcgctgattcgatcacttcctatcatcctcaacgattacattcctggacaggttggttgagatctgcatttttaatgtttcctgctcatatatatatatatgtataattctcatatcaattacacttgaaaccaaacaggagaaagggaatgtgccgtatgtagtggagaatggtgcaggagtattcacaagaagtcccaaagagacagctagaatcgttggggaatggtttagcacaaagacagatgagttggaacaaacttcagacaatgcacgtaaactagctcagcctgaggcagtcttcgacattgtcaaagacattgatgagctctcagagcaacgaggtcctcttgctagcgtctcttacaatcttacctcttcttttgccagtttagtttgatgtcccatgtttatattaacatgtctcccttagtagttcttttgtctgttattttttcctttccttatattccctaatttgtttattgattgaagttgtatgtattatttttaagcaaaaggttcatgatgtctttgcattattgttagccattaacaatatcaacaagagattcttgttcatatagaatcacattactattaattttgtcgatatatttcacattattagagacggacttacacattattagtatatgatacattttcttcttattagtatatgatacatattcacattattagtatatgacacatgagttccagagacttaggatcttccaagccatggctaaaacagagaactaacctttttgtttctgtttgcggaaaattccaggctctcattattctttatgtatacaaaccttcatttaccctgttgaagccttctcattcttcatgatcatatggaaagatttaactttatcttctccaacgatctctctaagaatatcatcttcaatcttctcagcttgccacagagatggatccgcaacaaactcctcactgaatatcatacacgagacccactctttccatgttgtcctcctgtacttgtcttcctctaatgttcctctggacaagagctgataaacgtaaacaactttctgctgtcccggtctgaatgcacgagctatagcttgctttgtcttagaagggttccattctgagtcgagcatgatgacccgtgaagcagcggtcagactaatcccttctgcgcaagctgtgatcgaggccaggaggactcgggatgggtttccaggttcttcgaatttgtctatcactcgacctctttcaaacagctcaagatcaccggttaaggtcaagatctctctgcctctttgccacctgaaaatgttctcaaacagttcggtaaacatacggattggcgcaatgttgtggcaaaagatcaagatcttctccctcttgaccactcggaaaataaggtttaacacaaacatgactttagatcctttctttgcgtcgtgcttgagttttccgatctcggaaagttcttgcgggttgaagaattttgtgcaacagtttgagcttgtgaccaaccacggatgtatagctgctaatgttatctgaagctcgacctcaagtggatacccaaagtacgtctttattacatcctgaagtttcgtgagtatcttatgctgtatatccgtcgagttcatcactaatgtatagatctgtagacctggaagagcatcaccacttccacttccactcccttcatagttatcaatgaaaccattagtcatattcttcaacatattgagaccttgaaggcgttcatctcccacgcttgcatcaatcttcttggcaattatatcgaggaataatttacgagctctattctcgagcaagtgaggcgccttattcacaccgtgattggtcttgaatttctgatctaactccattagaacctcatgaataaactttggtctagccaaacatagcgtgttgaagtactcgcaaaagttgttctgaaacaaagtacccgaaagaagtattcttaagtcagtaccaactttcatcaaggccttacgtagtcttgacttggtactcctcgggttatgcccttcatcaagaacaagaagcccgggactctctcttagcactttagccatgtatttccggtgagcaaacttcgagtcttccctcatcaaagtcgtaaacgaggtgtaacccattacaagaacactcggatgagcatgccatttctgtattttttctaggcaatcaagaacatgcataacatctcggctcggtttaggaactccattgaactgaaccgttttgttctgtttgaaggtacaataggttcttcgaccgtggatcaaatgaaccggaactgggatctcccatttgatgaactccttgtaccatgtgtacaaagttgttttaggagcaagaaccaaaggtcttttcccgggaaatagcttcaagtagctagtgaggaaagcaatgattaggaatgttttaccagctccaggtgaatgagagatcacacaaccacctatgttacctgaagtgggatccataagcgagggttccacagatcctgctacatttctccagagaaactcgaaagctcttcgttgatgcacatgtagttttctcttaagcttaggtattaatgcccaaacgttgtcactttcttcagccgcaagcatttctgaagaatcacttatcatagagaaatctttagtctgggcttctttgtggctcaacttagtctttatgtcatcttcttcgatatgcttagtctctatggtccatttcttatgttctgcctattcaaaccaaaccatgaaatataatcatttattacaagcccagtaacattaacattatgcatttgtaagttgtgagtttcacttacaaatggtgcagatacatcttttatctcacttcctacatgaccacataacctgcaacacatcccgatttcttcctccagcctataatcgtgctcacaaccacttctcgccttttcgaaagcctcgttatccactcttacctagagattttgatacaccacaacaatggaattagcaggcaaatgcttgtatatagttttagttttagtatatgcgatatctcaaagagaattgtacctcgttgtcatcgagaatgtaagaagaagccaagcatagttccatttctctccataacatttcgttctctgaagtctctccctcaccatcctcactcaagttcttttccatatccccatgcagtttaaatgcgaaattcgtcttctttaactcctcccactggtcaacaacactggtaggctcgtccttggctgcaattgtggactcaatgttgttcatgtatgtatctatcagcttgttatatgcacctgcactcaatgttactttcttatagacccgtggttcatcagaatcctctgtttttggagcaactgaccgcgaagatcgggatgttcgtttttgaaacgacttcacctggttaggacctttccaacatagatcagcttccatcatctcttccatttccgtcattttcttcccgtatttcatgcctttacttcgatacttttcagtctcatcaaagtactggcttcttgagaaactaccacccccaccaaaactgttagcattaagaccaaactgttccaacggtataggctcaaacaccggagtgaaaggaataaccgaaagctcggatttcctctcttttctaccaaatccatgtactctcctcttgtctatcacaacgatctcgccttttcgacttttcggtttcgcttctcgagaattagttttctttttcttgatgaataaacgcgataatggtatatacaaatcatcattagtatcaccatcctcattgttatcgtcctcgtcttcatcactctcaacattaacagcacattttccaaactggtacggcatcatccgcacccaaccgtcaattgtatctggctcataatcacatccggtgtagatatccggtctcacgtttcttcttttggacctacgtagttccactacctcatcttcttcttgataataatcggtttcttgctttatttcaagatcttgagaatcatccaatatatctgccggattaaacttaaccacttttgataacgaaacaccgtcttccaaagtaatattcatcgaactcaacgtactgctagagccttcttcatctgttacaatctgataaaccatcttggtttgcactgttcttatttgaaacacaatgcttttcaaagttgaggtaacagtcaaccacgaaagatccggcaagaactttcccaaagacagtcttgttttcatcaaggaagtgcagtcctcagagaatctccatctgtagaactgatcagtactttgttccttgtaaaacttttggagaatggagatttggtttagaccgataaccacggaatctctattgattctctgtttctccgagccaatgcagccttggtcaatgtaaattctaacattgatcttgcaagagcattcagactcatgaggcttcctctctatagaaacaatcctcgcatccacccaaacctatgcaagaaacagatacagagtattttgatgagtttgaagatgcagagtatttgaagaatcaaattcacgcgatttcagctacatgtaccggttccaagtcatcctcgtggatacgatagagaacacaaacatcgatatcaggccgaaggaaacagatacagtcgctcaaagccgcttttcttgatctgagacgaagcctttggaaaggacggatatcttccaacacataaccattctctaacagacgtattgtcatcattccatcttcgatcctcatgtattccacaggcttccatgtacccgagcagaagaactcgaaagctaaagagtaagaaccggaacattgttatccattagtcaaagtaatccagtctgtactttggcatttcaatccaacaatttccaacttctcaaagtactgaatggtttataactttaagttcagctctgtggctaacttgcacttaaatgagaacagaagaaaattgatataaagggaaatgcacttacgacatggatcaaatggatgcttcaaattgtagaaacctcttttcttcatatttttttataacttttgggccaatcaaccaacaacattgttatgcgaagatcctacaacggcaacataagtataacaaaccccaaaagtcagatgcctatttttatagcaataactcaaagatcagcagaaaaggacagaacagtgtgctctgctctgctattatgaggtaacttagttttcagtcttatgcttttttgattgagggaaatgctaagtgcatatgtgcatgtaatcaaaatttggttaagagttataattgatgctatatctttccaaatcgcttcacatttcgaagtctaatcttacatacaaaacaaggaacagagaactctgcatatatgaaaacttgatcatacacaaccaaacccacatcggatacacgaaaagactcaaatcttacgttaagaatcgaaaaagttcacaaattgttaacatttgtgtttttaggtaaaaaacaaaacccatatattttcctggaacagagagtccagaagaggcaaaaaaatatatattaaatcggtcatcactaaaggctaaaagcatcgttatcaacaaaacccatatatctaaagaacacaaaaataaaataaaaataaagagtatttgatgaatagggtctgattcaaaagcaaacgatcatgatctagaaagcagaatcttgaatcccaagacaacaacaagactcagattgaactgaagaaaagatgatcggaccttggaaacaaaaccagattgtgcagtgaaattgaataccaagagctatataatctactattccatgattcaagaaatatgtagagaaaaaggacggagagttcaatacctcctcagtagttatttcagaatcttgttggccactgtgaatataaattacttaataaagatttgcatgaattttgttgtatacaacaaacaaaaaagagtgagtgagtgagaaagggagtgttggcaaacgaaccggacaagaggaaaaggttcaaggagaaaaggtaattagaaaaatagacggctgcgatttgctatgttttatctagaggataaaaatagacggctgtgatttgttacgttttatctaagagaaaaatagacggctgtgatttgtacgtttcatctggaagagaaaactagacggctgtgatttgttatattttatctgtttagatagattttctgtcacaagaaaagttatatgaaacttttgtggggtccacggtggagatatggcggtaactctttgacagcgagtgttgtagggagcctaagtaggttatgatgacctataacttaggtagtagttgtacaacgtaaaaaaaattgaaggctggaaggtagctttctcattcttgatattcttttagctgtagatttctacaaccaaataagccttttgtatgctactcttaaagagttctgcacacccaccacttgcccagttatgaaggctggaaggtagctttctcattcttgatattctcatccatcaattcaaatccaaagcttcttgatcgtaaaacaatatatagttgtatagcacagtatcgatctttctcggtcttattgtttgcagatatgagtatcgatgggcagatggaactactatggtttcagcccctgaatatgttgagcttctcatgaattggattgaaactcagatagataacgaacacatctttccgaaaaagactggtatttgtgaagataattcatagttttaaacatgatcatgaagttggtttttagtttgtaacacttgtttctttctttcccattcaggagaaccattccctccaaactttgaggatttcgtgaagcggattttgagaaagttgtttcgtgtctatgcacacatctatcattctcactttcctaagattgtcactctcaatgaacaagctcatctcaacacttgcttccaccgttaccttctcttcgtatctgtgagttgattaatctttctctaaatcatgatgagtacttaggactgttctcatatagcggatggtaaaagtttgtatatttaacgatgatgcacgattttggcaacatgcaggagttccagttggttgataaagaagaaatggttcctattcaaaagctcgtggaaactattttgaaaccatagaaaactcttcgtgttttcagggggaaaagggattttcatatatccactaataacatcctgatgaagtttatgatatatgtaataatgactttggcttttacaaaatgactttggcttctataataggttgatcttgtgaggtttcaatcaataaacaagatcagcatcaaataccaacagaaccgctctttaacttcattgtacagaaacaacaggctattttttttcccctcttcgttggctagtcattgttaatcacaaaaccaagggatgtcttggtgttgtgtagaagtggttaagtaaaaatgagtatagactcaaattcacttccaaagctctaggtgttagtttttttgagcattagatatcaatcaatttaatctcgggttatctcctattagcaagcatggattcactgttaagttagatgcggataagcatgtccttagcaaaaatgggacaacaacagagtgctctgctcttatgcttttttattatcattgaggaaaatgctaattacatctgtgcatgtaatcaaaatttgattaaagagtgataatgatgttgctctacctttccaaatcacttcacattcgttgatgaaaaaacactaaaaacaaagtctaatctcaaatgcacacacaaggaacagagaactctgtaaatatgactatttgatcatacactaccaaacccacatcggatgcacaaaaagactcaaattttacattaagaatcgaaaaagtctcacaaatgttacatttaattttcttgggaaaaaaacaaaaatccagaaattttcctggaacagagagagtccaaaagaggcaaaaaaatatattaaatcggtcatcactaaaggctaaaagcatcgttgtcaacaaaaaccatatatctaaaggagcacaaaaataaaataaaaataaagagtatttgatgaatagaatttgattcaaaagcaaacgattatgattaagaaagcagaatcttgaagcccaaggcaacaacaagactcagattgaactcaagaaaagaaaatcggaccttcgaaacaaaagcagattgtgcaagtgaaatggagaccaagagcatataatctactattccatgattcaataaatatgtagagaaaaaggacggagagttcgataccaaactagttatttcaaaatcttgttggccactgtgaagataaaatattgaataaagattgagaaaatgtcggaaaaacatcaatttttaaatttgggacgaaaagactttgaattttcaaaatgtcatttaagtcataaagttatttttgattctttgataagttttgttaactggatcatttcagacatgcagtgaaatttccataaacagagttaacttttcgttagaaatttctgttaaatcaaacgatgtcgtttatgagcttataacaaaaggacgtcggtttagatagacggctgtgatttgttatattttatctgtttagatagattttccaacacaagaaaactctttgacagctgagtgttgcagagagtaagtaggtttaggatcctatccttcaatataaaagataactttaagtagtagtagtacagtgaacaaaaaaaagtagtagtagtacagtgaacaaaaaaattggtcacaaagccggataggtgtaagaagtaaaggttttcatctgcaaaagaaattgaggtattacaatcatctcactcatatcatgcatcgttttcgttacaaatcaaaattattgtttctgacagtgtaatctagtggcatatctaaaaattatattttaaatgacgaagtgcatctgaagtattatataattccaaatcatctacgtttttactgtttattgagatttgtttcgctttgcttcgaatctcgttttattggaggcgatactaaattcgtataacgaaatcaccaaccttttcacagttttaaattagtttttaatataaaaattgagagataagtgttatttctctttttcttttacgtagatatgccagtaagtttgaatctaaatcgcttcacactcaactggttcattgcttcgaaccttcttttcattggaggcaatactcaattcttataattaaaccaccaactttttcataattttcaattcgattttctttgataaagttttgacagataagtgtcattttattttccttttaattacctagatctgcatgtagtgtgaatctaaaactcacactcaattggttcattgctccagtgaaaaattggctggagagtgatggaccacaaacctttcatgtggtactcttaccaatccataaacacactaatacccaataacaacaaaactttgcaaataaagataataccaaaaaaacagataccattatatattacttcaaaaggaaatggaaaaatttcatactatataataaattcatgttgtatttatctctatgtaaaaacaaaaaacttaataagaataagtaaatacatgtaacatctttttttggtcagatataagcttacctatacatttttctttgtaaaagctacacaactttgctaatcaataatattttgtccacaatcttatttttttctactaataattacattatatttttctctttccaaaatacctaaaagtgatatatctctaactattgtttatatgaaaagtttaggttcttgagaaagaaagaaatccattaatttttttatatatcaattagtcttttcctagaaatcaagtatgggaatccaccttctttataccgaaacaaaaaataagtttaaggaaaaacttgaaaaagtgaaacattttcttttgtttagaacaatttctttccataaacataaacgccttatatgactattttgtgagcttgcaccttttttattattatatatattatatataaagtcagtgttcaaaatattctatgaattggtcatgtgtatgtatgtgggtattatgataaaccaataaactacatgaagaagtatttcgatcaattacaccaaaaatttgaaaaccttagagctaataatgatttgttttatttttgaaatttaaattgtatactatttattggtaacgtcttcgcgttggacttaagaaaaaatgttagtaaaaaatgcaatcgcctggtagaagatttttaaacatataatccagacgttgattctttgattttaggttgatcaagcttcggttatttctgcaagttttcgtcctctgcctcactctctctccagacatgggtggttttttggttttaaacagcaggtatcttccaaagtttcaatacatttctttttcattctctctgtttttgtattagtaaactttgtaatgtattttaggtctcaagtttacagtttgtattgcttgttgatggggcaaagtccaaatcctgataatccctaaaacttagcttctccttactcttgtgttgtgttttacattcaaactacaacatgatggatgatcatattttttgtcttacagtaacaatgttgtgaggacagttccatcaaagaagaggaaacatcctgaatataagagcaaggttagtagtatggtttaaattatgactctgtgatcacatttttaaaaattgtacgtaaaattctaataaaacttatagggatctcagattcgcgagcttatctcagggattaggagtgacaatctcagagaagctgtgagactacctcaaggtgtagacattaacgagtggttcgccatgaacagttaagacacaatcattatcatccatagttactttttccaaactcgagtgtttcttctaaatttgttctcgtgtcttgtcttttagctgtagatttcttcaaccaaataagccttttgtatgctactcttgaagagttctgcacacagaccacttgtccagttatgaatgctggaaggtaactttctcacttttgatattctcatccatatcaattcaaatccaaagcttcttgatcgtaaaacaatagttgtagcatagtatcgatctttctcggtcttattgttttgcagatatgagtatagatgggcagatggaactactataactaagccaaaaacggtttcagcccctaaatatgttgagtatctcattgattgggttgaaactgagatcgataacgaagccatcttcccgaaaaaccctggtatatgtgaagctgatacgtagttttaaacatcattaggttggttttaatttgtaacacgtgtttctttctttcttattcaggagaaccattccctccaaactttgaggatttcgtgaagcggattttgagaaagttgtttcgtgtctatgcacacatctattattctcactttcatgagattgtggctctcaacgaacaagctcatctcaacacttgtttcaagcattttcttctattcgtatctgtgagttgatgaatcttccatggaatcattttgtgttcttaggaatgttctcatatagctgatggtaagagtttgtatatttaacgacgatttttcggaacatgcaggagttccagttggttgataaagaaaaagagatggctcctattaaaagtctagtggaaactatgttggaccaatagaaaactcttcatgttttcagggggaaagggattttcatatatcccaccaataacatccagaagaagtttatgatttatgtaataatgactttgccttttacaaagcgagttgatgtaatgcaaactattattgatcttgtgaggtttcattcattaaataggaccagaccatagccaaattatgtctttaatgatgccaaaaggctgtgttttggaaccagcagaacctctttttaacttcattgttcagaaactacaggctattttttctcttctcgtagctagaaatttgcagagcataattttgctaaaagtcctctgatatatcatgtgaggtcttgcgagaattcaagagaattaatatcaaggcaggtggtgtttgatacaacaaactatggatatggatatggggaggtcaatatgatgtctatcataccagaaatcaatgatgatgcttggagtgttatggagtcaagttgggaagatcttaaaaagtggaaaatgaaaggaactcagtagtcaaaccaaaaactaagtgaactaatgatgtgaagagactctcagaattcatttccaaagctgtaagtgcatataaataactaaaacaacatctatcctgaaataacatataaataacatcaaaataactccttaggtaaagactgcatcaaacacacctatgccattttatgatggactgccttcttcacgactgagtaagaagctgagacttggtttctcgtggatcaattgagaaagctcaatgtcatttacatcacttgctgcattgattttgataaatcctccaccgcgaatgggatgctgtgttttgattcattgcctagcgttagttacggaagcttattaaagagatttgaccactaaatttttagattacctcgagtcctcggccaaaagggacgaaccggcatggttcgagtccaccatgactttactattttgttaattttctaacggatcctcaaacttacattgtttgctttcattatatttaggtaacttctcaggcttcccacaatacgttgccaatgaacaatccgttcttttgggtttgagaatggccatggtgcctgtatcatgtaaacatgtcttatacactatattgacaagtaaatgacatctaacctaaatgaatcagcggatctataaatcgataaacacagacgtaataaagaagacattacctgtttacaatactcaaggtgaggaaggatctctttctttagattatctctcatcattccataaatcttctggaggaaatcaataagctgcttcttgaaaagcattgcagggcactttggtacgacttggctttgtctatccagataagagactagaacaccactcatcaatccctatttggattgtaaagaagacacaacattatacaggaattgaagcaaataaatgttaaggaagataatatttttatataaattagatttgcagcttcttactttggacgatagcattgtagagcttctgaatgtgcgttgcagtacgcaaactaacatggctgaattagataaccaatacgccaaaacctcgttattatctgaaaccttgtaactatctgaaacctgtaatggaagaaaacagttttcatattgatattcaaaaacttttcaaagtttaggttttttagaacatgttgatttagttgataaatgtttatgaacaatgaagcaagaaagaatcagcttacttcaatggcggaggctattattttcacgatacggtcaaagatgttggttctttcgacttcaaaagatctccagtgaaggagacatttgtaaatgacacatgcagcaacaggcttgcctccatcatatccaaggttttgtgagatgcacttcactagtacttcctggctttcctgattgacaccaagccaaaattacatgaataaataagtctttttttattgacctgggtgatgacatagtgacgatactagcacagagcactaggttagttgattaccgattcacaaagctgatctactcttcttgtcacattttcaagttttgtggtcagttccaaatttctagcctctgccagggacaaagcttttctcaagtcttctgctgcttgttgttcagactggagcgaagcctgtaatgaaaaatgttttaaactaacatatccacttcacaaatggtgacatagcgacgatactagcacaaagcactaggttagatgattaccgattcacaaagctgatctactcttcttgtcacattttcaagatttgtggccagctccgaatttcgagcctctgcctctgagaaagcatttctcaagtcttctgctgcttgtcgttcagactgaagcgaagcctgaaataaaaatatgatttaaacaaacacatccacttcacaatataagtggcctaatcaacgtatatctactaacttttgatagtgaatatataaaaggatgatctcataagttaaaaacagatacctttagagcttccacctctgatgttaatgaattgaatttttcagtatcctcagaattctccttaatgacttgaggagcttcttcaatagctttccttgcagtctcctgttctctaatcacatcagcttttgcttcttcagctagcaagcacattgcgtgcaaagcctcctgtagttttgcatattcaaaagcaacaacttttgcaaacgattcagggtctcttaatgtataagttgggtacaagaatgacagacactaatgaagagggttctatgataatgacctgaagaatcctagtaacagcctcagtaaaaggttccaagtcctgtgacatttatagacgatacccaaattgaagaaacaatgaacaaacatgatttcttgtatacatataatcatatgtaacagaaattgagaaaacgaattgattcataagttgagcaaacgaaagacgctgccgtgttcataaatgatctggaacatgttgagagagtacacataaacatgttgaaatagtacatacattattctaaaaatgatgaaacagaacaacaatgaagcaagaaacaaccaacttcaaattttaacaaaagaaaaagaaaagaaaagaaaaagcaatcaacttcaaatccatatgtaccatcatcttcaaatcagagccacccgctaagaaacggcttgaacaagacgagattcaccagtgaaaggagttcgaaattgagaatctactacgaaacaagctacacgaaaccagtcggaggattacaaaatcgccgatttggggagggactaagttgggatattcttcgcttgaagtgctcgtgagtgactgagtaggcttagtattgggctttggtatttgggctttaaagttttggtctacataaagggtttaacgatgataacaattaggtcccttagttttttttattggtttttagtttttggtttttgatttttgtagtttttgatttttgttgtagattttagtttttgcaaaatcatgaatggaaatttgtttaatttatagttttctacatattaattttaaatgtttatagttttctacatattaattttaaatgtttttaaattgtgtattttttatatatattttgtgtttaaaataaaaattagttaaaacttcacagaataatgttttagttttagatgaaaatctatggaatagggttttacgttttttttggataggctaataagattttatgtttggatgaattggtaaatggtaaaaatagcataattaaataataatagtaaattaaaaaataaatgttacgtaagtttaatgttccaatataagacactttaaacgtaagtttagacaatataggcactttccaagttagaagcacttttccttctttttgaaggaaaacttgacttttataccccttaactaaacaatcgaaaacaataattaaatatatatcttaaccaaacaattaaaaaaataaaagaatttagatacgtagttattaatatagaccattagattgaaaaataaaaattaagatctatgagattaaagacaataaatggattaattttttgatgttatatatctgattagaaaaaggtatttctcttcgtctctagaactaaatctctctctctaaaaaaacaattgtttctccgtttctccttcctgaagatcgttttttcatatatccatagtagtttaaaaacgaagcagagagatgttgaaaatcgtttctcatggaattaatcgattattctctgtgaagttctttaatccacacaactttcctcatgaacatgataatagtagtaaatggaggtttttcctatggttactctagacgaaggaggatctccttgtgttggacaggtttgtgatttctttccatggattaaaaaaatttgattgtttgtttatgatgaacgattctttggctacggaagagtgtcatggagttctggcgaattctttggctatgtttggtgatttcgtttttaatcaagttgggaaccaataggaaacaactaagcatacaacatagattagaagagatatcaagatggatctaatttaagtaagatttggcgactaattctagatgattagggttatttgtgatttattacaaggcatttgtgttctcattgatttggcgagtaattctgtataactagggttatttgtgttttcttaaaaagaatttgtgttcttgttgaaatcttgttcattggaattatttgtgtttggtaaatcttcattggtggctaaggatgtgtttgtagctcttacggcgtttgttattggtgatgtccattatggatggcaaattatggatggcacattatggatgatgaatcatggatgacatattatggatgacgcatcatggattgtatattatggattgatatggtgagatttgtaaatcttttggtcttacatgttaagagtaaaagatgaagaattggagaagcatgtctaacatcctaaaaacaagctatatgcggttgatttgctacaaataaatttttggtatccataataacaagtccatttaaatatatccattcagaaacctttctactgatccgtatccattctatataccatgtcaataataataggagattcgattaaccgtgttttgtaaagaaaccaaagttccatgtccataaggttttgaaggtggaggtctctgcaaactgaaaaaaaaatcaacaaacaattttttggtgtccataataacgaatccatttcaatatatccattcggaaacctttttactgatctatatccattttatataacatgtccatgataacaggagattcgattaactgaaatctcgatgctacgtagatgaaacgagtttgacacatgagagagagcaaaaatcaaatcaagccgccattgttgaagaagaagaagtttcttctcattttttacaaagatgaagagagagagagaggtgaagagagagagagagagatgaagagagagagagagagaaagagagagatgaagagagagagagagaaaaagagaaaacgtgggttaagagaatattttagttaagagggtattttagtaaaataacataaaaaaagtgcctaatcttttgaaagtgcctaaacacggaaatagttttaaaaaagtgtgtaaaagtgtaatattctctttaaaaaaaccacaaaacttggtttttaaattctatgatgaaatagttaaaagctcataaaatctggttttcctattttttaggaaatctactttttgtagaatcatgaacgggtaattatttggattttgcaaaatcaaaatccaaaaattacttcaaaaactccagccgtgtcccgtgtctagttttttggtttttgattatttgtaaatatatttttttcacctttcgatattttttaagaaattagtttcttaaaaacatttagggaaactagtatttttttaatggtttctctaaacataaagtagaaagtagagaccatgattttcagctttttgtggaaagcttttatttttaggaaataaggtttcctttttatttattattataaaacttttatcaacgaaaaactaaaaatcaattaaaaatctttcgtcgttcataacctaaagaatttggatgggatatggaggaatgccatgttgattgataaagcagaattggctcctcttaaatataagttatgagtcgtttattgcaacaacactcaaaccagcaaaatatataaataactaaattaaaatccatcccaaaaaaaagattgaatacattctcaatgcaggactacatcgtcaaacacaccaatgccagtttatgatggactagcttctttacgagtgagtaagaagctgaaacttgagttttcgcggatcagctgaggaagttcaatgtcgtttacattcacttgttccattgactctgttatatcccccaccgtgaatggaatgctgcgttttgattgattccctcgcattagttgagaaatgagaaggatagaaacagattgcctaaaaaatattatcaggttacctatcgtcctcgtccaaaaggaaggagctgcttacggcattgttcgagtcctctgtcatcataaccctcatgtttgcaataacctatggtttcggaaagaacacaattagtaccatatctagacaaaagaaggaagcctagttattttaaaagtgaaacatacatctgaagaaacactatgagtgccatatttctcatcccagtaatttgtgctgattctgtatagctgctgtatacttaacacctgacccagaaaagcaacttcaactataatctcattaaaatacacgagctaaagacagctttaacagagtagacgagactaaataccggaaagaaacttgtaattacggctaagctcatttttggcttttgataagtaacctaaacaaagagtcaaaacaagcaaaagtcacataagcacaatttaacggcagtgcataaacggagtggcatagcatcgactaagagttttaccaggaagccaacagcctgcctgatatgccttaactcatcccaagctgagccagcatactttacgaaatgaaacaacaattccaattcaaaagataaaaaaatattcaagcgatctagaggcaaagcgtgacgaaatctcggcttacttcatccgtagcctctatacaccactgctctaattcagccaaaccagctttaacgtactccccattgctgaatgagcaacactcaccacgtagaagaacactgcacaagtttaatgacataattctttctgtcaaccaaggaaaaagtggtttgacaggaaaaaaaaaggaaacaaaagagagattcgaagtgaaacatgcctgtggaagagttgcaagttgatgaaggagaagatttgtgtgaataattggccgactatgaagggtggagcctgtatcatgttaacatatattgtattaatcatcatttgccaaaagaagtttaatttttactattgttcatttctaatggaacttcagactcacattgtttgttttcattaaattcaagtaactgtttaggcttttcctgatactttcccaatgtgcaatcagagcagcatttgcgtgtgctcttcctttcaccaaactttccgttgatgtcattggtgcctgtagcatgtaaacattaacaaaaccaaagctaaaaagtttcagcataattacttttacaaaagagaaacaacaaagaactacatgcattcccttctcagtagcattaaaagaaataatattcctggatgttttggaggccttgactaggaaatgtttatccagaaaattcggttattaactttcaagcagtcgagttattacctctcttccttagaacttgtatgaacacaaagcaacataaagattacctgtatacataagctaaggagaggagagatctctttctttaggttatctcttatcattgtatatatcttcttgaggtatgcatttaactgctgcctgaaaagtagtgcagggtgctttacttgcatagagagtcgaacactttgaagagattccctatattcctattaagattgttaaagaggcacacacgatgaattgatgctgacatgcccaggtagataaaaaaaaaaaaggtttgagaaacgaactgatttgcaggttcttacttgtagcagggtccctagaaatatggatgatgtttgtcttcgcaatatggatgatgtttgtcttcgcctctccggtttcaaactagctgatctagctgcgttgattatttgttccagaaacaatgataaagaggctaaattagataaccaatacgccaaaacctcattgtcttctagcacctggatgaaagacaacatttccaattaatattcagaaacatatccccttctgggctttagaacattgaaatagtacataaacgcttctgaacaatgaagcacgaaagaatcaactcacttcaacggctgaacctattgtttcaatgatacggtcaaagacgctagttctttccaattcaaatgatctccagtgaaggagacatttgtatatgacacatgcagcaacaggcatgtccccattgtatccaagattttgtgaaatacacttgactagtatatcttcctgcatgacacgaagtttataacatgtgttaagagcaaagcagagtgcaatatttctgtggtttctcctcagactctggttctcctacagaaagagtcatgtcctgtgacatttatagacgataagcaattgaagaaacaaaaaagtatccaagtctccttttgaacgtgcaatttaaccagaaaatgcacttccccttaccggtgtagtctttgtttctccagaaatagcaagtgcctgttgacggagtacttgaatctctgactctgaattcgaaagcttctcttcgagtctgaacaagaagcaaaatcgacatgtaaaagtccggaacagaagaaatacagtgattacttatttaatcaaccaacaaatataacaatgattagtaaaagtctctaggaagtagtatcaaaagttgtaagcaaaagaatttattttacgaacctttgtactgattcatgaagctgatctgcttttcttgtagcattttcaagctctgtcgccaactctgaatttctagcttctgtctcagagaaagctttttccaaatgttctgcggcttgtcgttcagcctgtaataaaatatgatttaaaccaaccaatccgcttcacgttattaagggactcatctacatatatttacaaactttgttagtgaaaacattacggatgatccaatacgtgaaaacacacatacctttagagcctccacctctgatgttaatgaattgattttttcagtatcctcaaccaataccggaatctccttaatgactggaggtgcttcttcaatagctttccttgcagcctccctctctctgaccacaacagcgtttgcttcttcaacttgcaaccacattgcttgtaaagcctcctgttgttttgcatattcttgtgtttttgcttcttccaggtcggtctacattaccagggattatcaatgaccgtgtaaacaaagtttgatatcatgccagtgtatggaaatgaacttactctctgtcgcgtttctagttgtaaacgcaatgttaattcctcaacacgcttttcaagtttgtctttcgcctctctaagggctcctgtgtctcgtgcggcctgattcagttagttgtaaaggtaagaaacctgattcgtcttatgaagttgtgaaaatttagcagaacagttttactaaaccaaaaaaagactgaaccatcttaagtgacatattcaaatattcattgaacctttgtaccgattcctgaagctgatctaattttctggtaacagtttcaagctctgttgccagctccaaatttctagcctctgcctctgataaagcttttctcaagtcttttgctgcttcttgttcagaatgaagccaagtctgtataaacatcaaacaaaagaaaaaaattaagatttgaataaagtcaaacacgatataaaggcacaaccgaaattcaggttttggttcccgtacaagtagaaccatgtcctgatgcatatctagacgattaagtaattgagcatgtaaaagcagaaaagacaaacaaggtttctctcaaggatacaacttttatataaactctccctcacgttcgatggagttcattttcttaacggttgcgacttgagagattctttttcttatacagtttcgttattagtgtatattaattatttttaagtgcattacttaattaatctatttcaatagagaatttcccacttggcctctaaacttacaaagtctttatctaattggtcactgtctcaagcgaaaccgttgattatttctctttaagtgaatgaaatcattgaccttaggtcagtaggaaaaatatatccgcaagttgatgattatacaattaattaacatttccaaaaatctctgatctgtctttgatccgtagtgaaccgtaaagatttaaccttcattccactcattggtgaacaaatcaaatacttttgttgaaccgatgattattctcatagttactttctaatatcagtttatttgtaaaattacatacttttgaacatcaattggtttgtgggttaaacaattgatggaaaacaatgaggatgcttggacagagttaagtcaagttgggaagatccaaaaaaagagtggaaagttaaggaactgtagtactcaaacaaaaaactaagtggactaatgatgaaaagagactctaaaattcatttccaaagctgtaggtgttcaatgttcacctcatggaaaacataatgatctaagggacggatttgactgagtaaataccggacagagttctcttgttagtttttctaaggtcatttctgcttttcacgaatgacctgaacagagagccaaaacaatgtaagcttataagtattgggaacataaaaagattggcatagcatcaactaagaatcataccagaaaagcaacagcctgcctgatatggtccaacttatcccaagctaagccagcatactgtaagagatttaaaccgtaaggtcattttttcgggtgaaaatgtcgaataggcaaaggcgtgtgacgagaacttgtggcttacttcatcggtagcttctacacaccattttttttagttcagcctgacctgctttaacgtggtccccatttcttggtgtgcaagattcacgacattgaagaaaactgcacaagtttattacagagaaatctttacgtcaaaattggattgagagatactaaaataagtaattactagtgagcatgcctgttgagaagatgaagattgatgaaggcaaatatttgtgtgaatacttttctgactaagaatggtggaacctgcatcatgtaaacatagaatataatcacaatttttattttgagaagccattagaattgaacaatgcatgggtttttgtttattcaaagatgggattttattaagattgactatatcatacaaaggcttaaacaaaagccctaactttagatttacaaaagcccaagaaaggcccatcaaataactaacttttgcagaagcaaatctatctgaacttcatccatggatacgtttccaacaatacatgggcttgtcacttataatcgtggcttgtgtcttcaaattataaggtcacataacaaaactacatgcagtctattgtttttctccttcgtcgacgaactacttttgccgtttaatagatcataaacaccacacatttctaccgtcacagtgacaacacttcccaattattctgattatggcgcaggggattcgccggaagatccaatctgtgctgattttgcaagaatcgatgggcttcctcaaattatcgggcgctttttacgacactgcaattgatcgaaaccttcgcaaaaaatcgtaaagtaaaaatcctctttttatttttatttaagaccctttagtagtttatcaacaagtaaagattgcattttttttggtacatgtaatttgtttcagaatttataaacaagaatttctatcaatgtctttgaattaactttgataaattcaaactttctgatggatggttgtcaatacaagtttcagaagaagattgaaaccaaaatgactagacaagacgtttggtgtatgtcgaccaatgtgttctgttttgggtagcactttgccttaactctgtttacacacacacgtttatgtgttttgactgttgaaaaaaaaacgaaagatatttcaaaagtctacgcagtacacaatttgtttgtttgtgaccatttgcaatgattttggaccgcatttaattgccccacgactgtaatggggatcacagtttggattttgcttcttgtttaccttaaacttcctttcattttaatgttgaagcagaagaacctttcttttatctttttataatcgacatgaagctgtccttttcacttgttttcaatgctctcacgttgcttcttcaagtttgcatctttgctcaagccaggttttctaatgagactgatatgcaagctttgcttgagttcaagtctcaagtttctgaaaacaacaagagagaggtcttggcttcatggaatcactcctccccattttgtaattggattggagtcacatgtggccgcaggagagaaagagttataagtttgaaccttggaggattcaagttaaccggtgtgatctcaccctccattggtaatctctcctttcttagattacttaatcttgcagacaactcttttggaagtaccatccctcaaaaggtgggaaggctatttaggcttcagtacttgaacatgagctataatcttctcgaaggaaggattccgtctagtctttctaactgctctagactgtcgaccgttgatttatcgtcaaaccatcttggacatggtgttccttcagaactaggttcactttctaagcttgccattctggatcttagcaaaaacaaccttactggaaattttcctgcatctttaggaaacttgacgtcacttcagaagcttgactttgcatataaccagatgagaggtgagattccagacgaagtagctagattgactcaaatggtgtttttccaaatagcactgaatagtttttcaggtggttttcctcctgcattgtacaacatctcctctcttgagtctctatctctagctgacaatagcttttcgggtaatcttagggctgattttggttatcttctaccaaatctaagaagacttcttttgggaacaaatcagttcactggagctattcccaaaacacttgccaatatctcaagccttgaaaggtttgatatctcatctaattacctgtctggtagtatccctttgagctttggaaagttacgtaatctgtggtggttagggattcgtaataactctcttggaaataactcgtccagtggtcttgaatttattggggctgtggcgaactgcactcaattagagtacttagatgttggttacaatagacttggaggtgagcttcctgcttctatagccaatctgtccactacattgactagtctgttccttggacaaaatcttatctctggaaccattcctcatgacatcgggaatcttgtaagcctgcaagaactcagcttagaaacaaatatgttgagtggagaacttcccgtctctttcgggaagcttttgaacttgcaggttgtggatctgtattcaaatgcaatatcgggggaaataccatcttattttggcaacatgactcggttgcagaagctccatttgaatagcaatagtttccacggaagaatccctcagagtcttggacgttgtcgatacttgctagacctgtggatggatacaaataggttgaatgggactatacctcaggaaatactgcaaattccatccctcgcttacatagatttgtcaaacaatttcttgacaggccattttccagaagaagttggaaagttagaacttcttgttggactaggtgcttcgtacaacaaattatcaggaaagatgccacaagctatagggggttgtctttcgatggaatttctctttatgcaaggaaattcgtttgacggagccattccagatataagccggttggtaagcctaaagaatgttgacttctccaacaacaatctctctggccggatacctcgatatctggccagtcttccttcgctgcgaaatctgaatctttctatgaacaagtttgagggaagggtgccaacaacaggagtgtttcgaaatgctacagcagtttctgtttttggtaacacaaatatttgcggaggcgtccgagaaatgcaactaaagccatgcattgtacaggcatctccaaggaagagaaagcctctgtcagttagaaagaaagttgtcagtggtatttgtataggtatagcttcgcttttgttaatcataattgtggcttctctgtgttggttcatgaagaggaaaaagaaaaacaatgccagtgatggtaacccatctgattctactactttggggatgttccatgagaaggtaagttatgaagagcttcatagtgcaacaagtcgcttctcttcaaccaatttgattggttcaggcaatttcggtaatgtgtttaaaggattgcttggccctgagaataaactcgtcgcggttaaagttttgaacctcctaaagcatggagcgacgaaaagctttatggcggaatgtgaaaccttcaagggtatacgacatcgtaaccttgtaaaactgataacggtttgttcaagccttgattccgagggaaatgatttcagagctctggtctatgagttcatgccaaaaggaagtctggatatgtggctgcagctagaagatctggaaagggtaaacgatcactcgagatctttaacacccgcagagaaactcaacatagcaatagatgtggcttcagctttggagtatctgcacgttcattgtcatgaccctgtagctcactgtgatattaagccaagcaacattcttctagacgatgatctgactgctcatgttagtgactttggtttggctcagctcctctataaatacgatcgagaatcctttctaaaccagtttagttctgctggtgtcagaggcaccattggctatgccgcgccaggttaataaacatctatatgcaaaaagtattgtttaacaaaagagttatccaacctcattgtgtgttgtttctttgaaatatgtgcagagtatggaatgggaggccaaccatcaatacaaggagatgtgtacagcttcggaattctacttttggagatgtttagtggaaagaaaccaacagatgaatcatttgcaggcgattataacctccacagctacacaaagtctatattatcgggttgcacgagcagtggaggcagcaacgccattgatgaggggttgagactggttttgcaggtggggataaagtgttctgaagaatatccgagggataggatgagaacggatgaagcagtacgagaattaatctcaataagatctaagttcttcagttccaagacgactattacagagagtcctcgagatgctccgcaaagttctcctcaggaatggatgttaaatacggacatgcatactatgtagacccttctcaactacttatggggacacagtaaaagtgtatttgcgtgtgcatcatcgaaacagaacaaatgttgggaggaggagagactactagttataataagagaataaattaaaatctatctctgctgtagcctttttttttttgttgtgggtgaaaatgattatgatcacatatatatggtcgttgaatatcctttttcatttcacttttgatacacgttaaagttctctgtgtccataaagattggagaaaccttgtttgaaaatgttcactagtagcaaaacttacttaacaaaattcactcattagaagacaaatcacattaattaacaccgagaaaaatgttattttatacctgaactttcaaaaagtggccaaattaaccgtgaatttttgaaatgatcgttttatacctcaacaaaaagttgacttctaatttaacctataagttatcgttgacccggccaaatcgactcaccattaacacttcttaacagctctcctaacagcgtaactaacaactgtttttgtccttaaaccaacaataacggctgttaggccatgttttgtaacggctgttaggaacgctgttaaggagtgttaacggtgagtatatttggccgggtcaacgacaaattataggtcaaattagaagtcaacgataaattataggttaaattagaagtcaactttttgttgaggtataaaacgaccatttcaaaagttcacggttaatttggccattttttgaaagttcaggtattaaataacatttttcccaattaacatccataatgtgactgctcattcttcttttacagataacacttattgtttcgtttcagttctgcgattggacattgctctgttattgtattctggactacttctagaaacattcaatacaacaacaaaaaagtctctttaagaaacacatgaaaaatataagatgtgcaacctatataaatagtgaaaacaaattctagttcattcattacaatttcccaaaacgagtataagaactcgcccaaaccaacaaataagtaattgactaaaacaatactctcctcccctctctgggcaggacagcatcaaacacacctaaagccattctatgacaaaaccaaaatggcaaacaaataacccctgtgagtttccataactacacagggatgcaaagaatgaaataaactcggcctctccacaaatacaaaggccggagactgaaccccaaaacaaagaagaagaaagaatggaaaccgaaaagaagataatatacacaaaatgcccataggaatgcagcggctcacacgatgtatttatgtatatgcggtagatgcaatcgtatttgatggaccataccgagttctccgagggcagttacgatgtactgccttctttacgtgtgagcaagaatccgaaacccgagttttcacggattagttgaggaggttcaatgtcatttacatccacttgttgcatggactttgatatatcctccaccgtgaatggaatgctgcgttttgattgatttctcaggttagttaagaaataagaatggtacaaagagattgacaacatatcataatcaggttacctcgagtcatcgtccaaaaggaaggagctgcttacggcattgttcgagtcctctgtcatcataaccctcatgtttgcaataacctatgtttttggaaagaacacaattagtaccatatctacacaaaagaagaacgcttagttatttacaagcgaaacatacatctgaagaaacactatgggtgccatatttgtcatcccagtacattgtgctgattctgtatagctgttgtatacttagcacctgaaccagaaaagcaacttcaattatcatctcatggcaaaataatttaacacgagctaaacacagctttaactgagtagaatagactaaataccggacagagttctcttgtaatttcgtctaaggtcttttttggcttttgatgaataacctgaacaaagagtcaaaacaagcaacgttcacgtaagtacaatgtaacgggagtgcataaaaggagtggcatagtatcgactaagaattttaccaagaagccaacagcctgcctgatatgcctcaactcatcccaagctgagccagcatactgtacgaaaatgaaacaacaattccatttcaaaagataaaaaaaatattcaaatgatttagaggtaaagcgtgacaaaatctcggcttacttcatcggtagcctctatacaccactgctctaattcagccaaaccagctttaacgtactccccattgctgaatgagcaacactcacgacgtagaagaagactgcacaagtgaatgtcaggaatctttctgtcagccaagaaaaaagtgcttggacataagaagaaaaaaaagattgagtccaactgaaacatgcctgttgaaaagctgaacgttgatgaaggagaatatttgtgtgaatactttgcggactaagaagggtggagcctgtatcatgtagacatagattgtaaacatcattgccaaaagaagttaaatttttacttttgttcattcttaatggaacttcagactcacattgtttgctttcattaaattcaagtaactgtttaggctttttctgatactttgccaatgtgcaatcagagcttgttgagcaacagcatttgcttgtgctcttcctttcaccaaacttgcccttgatgtccttggtgcctatagcatgtaaacattcccttaaacaaaatcgaaaaaattaacgaaactaaaactaaaaagtttcagcatatcaacttccacaaaagagaaacaacaaagaactacacgaattcccttctcagaagcaataaaagaaagaatattcctggatgttttggaggcgttagctaagaaatgtttatcctgaacattctggttattaacttttaagccgtctaattattacctctcttcccagaaacttctatgaacaccaagcaacaaaaaaattacctgtatacataagccaagaagaggagagatctctttctttaggttatctctgatcattccatatatcttctcgaggaatgcagtaagctgctgcttgaaaagtagtgcggggtactttgcttcaacttgcctcaagtcgtcaagcttggtgagcccttgtctattcagaaaagagagtccagcactttgaggagatccccttaatccctattgagattgttaaagaggtacacacgatgaattgatgctgacatgcgaggcagataaaaaagtcagaaaaatgatctgatttttacagcttcttacttgtgacatccttccaaaaagggatgctgatgttgttcttcgcctctgcggtgttaaactagctgctccagttgctttgagtgtgcgttgcagaagcaataataaggtggccgaattagataaccaatacgccaaaacctcattgttatctggcacctggatgaaagacaaaatttccaattaatattcagaaacatatccccttctgggctttagaacattgaaatagtacataaatgcttctgaacaatgaagcaagaaagaatcaacttacttcaatggctgtagctattgtttgaatgatacggtcaaagacgctagttctttccacttcaaatgatctccagtgaagaagacatttgtatatgacacatgcagcaacaggcttgtctccattgtatccaagattttgtgaaatacacttgactagtaaatcctggttttcctgcatgacacgaagtttataacatgtgttaagagaaaagcagagtgaaataatgcaagaaatggggtcccatcattacaattagtaccataaattcatatatatgatacctgttgcttttcattcagatgtttctgtggtttctcctcagactctggttcccgtacagcaagagtcatgtcctgtgaaatttttagacgataagcaattgaagaaacaacaaagtatccaagtctccttttgaacgtgcaatttaatcagaaaatgcacttccccttaccggtgtagtctttgttcctccattaagataatttccattctctggagttctctgaacattgaaaaaaaaaaaaaaactacattaacaaacaggccatcttgaaattttataaaccacaatgaggagaaacagtgcaggttgtaggcaccggtaaaagcattgtttttgatcgtgtggccatagttctgctggttggcgaaatagcaagtgcctgttgacggagtacttgaatctctgactctgaattcgaaagcttctcttctagtctgaacaagaagcaaaatcaacatgtaaaagtccggaacagaagaatcacagtgataacttattcaatcaagcatcaaatataacaacgattagtaaaagtttcttagcagtagtatcaaaagtacatggctaagttaaagaagcatgacaaattcaatatggcctttttctgttgattgtacatcaatatattttacgaacctttgtactgattcatgaagctgatctgcttttcttgtagcattttcaagctctgtcgccagctcggaatttctagcttctgcctcagagaaagcttttctcaaattttctgcggcttgtcgttcagcctgaagcgaagcctgtaataaaagatgtattaaaccaaccaatccacttcacgttattaagagactaatgaacatatatctactaactttgttagtatacataaaggatggtctaatacgtgaaaacacatacctttagagcttccacctctgatgttaatgaattgattttttcagtatcctcaaccaatacgggagtctccttaatgactggaggtgcttcttcaatagctttccttgcagcctcccgctctctaattacagcagcgtttgcttcttcaacttgcaaccgcattgtctctaaagcctcctgttgttttgcgtattcttgggtttttgcttcttccagctcggtctatattagcagggattatcaatgactgtgtaaaaaaagcttgaaatcatgccagtgtatggaaatgaacttactctctgtcgcttttctagttgtaaacgccatgttaattcctcaacacgcttttcaagtttgtctttcgcctctctaagggctcctgtgtctcgtgcggcctgattcagttaattgtaaaggtaagaatctgatacgtttcatgtttagtggactagttttttaaaaccaaaaaaagaccgaaccatcttaagtgtcctcaattcttttcgtgcaaccctgctcctccagccacattgtgtagaaagggcagctttctggagttgcttgtagtaagaatgtgtgagatgacttcgaagacgagcctaaaattaaaaaaaaggaagaaccatcagattgctgatgtaaagaataaattatgcacattgacattttcttattttctcagttgggtacaaaaattgacccaaagaggtttctaagaaattacctggataatagtagcagccttcatttgctttctaaacctgaactcattgcgagcaaccattccccttagcgctgtttgaactgttattgttgaatgtctaattcttaaataagattctctggcaatatgtcttctgaaaatcttctgaatcttcaccgctgctgcctggcgtcgcatttcctcataaaggttgcatgccaatttgccttgcatgcaacaaaaacgtttgagaagctcaactccaaaaataatacaatccactaatatatttcacatctgcatggaaatatgaaacaacggaccataacaagccactaatttcatgtttacacacagaagcaagaaaattctgaatccaatatgctggacaactacaacaatagcaacataagagaagatcaaaattttgcaataaattacggaacaagatacctcggcagttagactgtaacacgatagcagctcctcgtagagcacggaattctttgcacgcaataaaagtacggctttgcctttgaattctcctagctgcatttccgagaacctcagctcttcttgcatccaactcagccatctgcccagccctaaggaatacttttgttttccctaactggaaatggcagcatgttggataaattagaaatagttcctaaaacatcaaaggaaccattacataatgcaattacaaatggcttacttcataaccctttaagcctatcttatccagaagcattttgcatgcaactttgtcatcataactgcaaagaaaatagaaaccattagcttgtttcaaagaaaaaaaaaactgcaagaaacaaaatagatcagttgtcttttcaaaaccaaggccatttttggattatacataactacgagcgaaaaaacagttgatatcaattgggacttactttccttccagaacttctggagcaagtacaccaaaacgattgagaaactcataaaacgtccgctttgtaggataacctgcacagctgattctaatagcttccagaacacccttaacaaaagaaagacaaatagtaagcttgtaagtttcataaccaaacatttaggttgaagagcctcaattataataccactgaacagacaaaaattatacggaaggttccaattgtacttacaccacaccgtaattgttgaattacgttcacattctcgaagatagcaggcttaagtacattatttggcttcacacatctgatatagtgaggttctgttgaactcagtgtctccatcaaagattgaagttgaagctgaaatttgacattgagaatttcttgttagatacagataaactcgctaacataaagggtgaaaacttgaaagccatagaataaaaataataattacaaagtcaatgtgaattaaagaaacaagttaatgatgtctgaaattctgaatcagtgatatggctgctttatcatgcacactcatgacccaaatgttagagatgaggccactgtatacagactatccatcattatctgtctaagaggaaaatcctagttccttaaatattcattgtaaaggagaataatagcatagcagtctaaggaagaaaaaaaagcataccttaaagcgtgacccgatggaagaaaatttggttttacttgatgtttcttctggtaggcgaggaaatagaccagctacaaaagtatcactggaagcaatcaaaagatcctgatgttctgccaccacgtaatctttattcttatcaaggaacaagtcagcctgatatgttacctgtttcagcagaaaagagagaatgttaacaggaacatatctaaacttatcataagcatgtgaaagatgttatacctctccagcataatgcgatattgcaaagctggtccgagatagctttggtttggtgaaccgcttatagtttttgaacgtttgatacagcttctgagcaaatgtttcatgtgtcgacttcggaaacatactgcaaaagaatcgaatatccatttcaagcaaaagcctactttgaaaccttggagtacttattccaggttatttaaaagtcagcattttcatcagaatcgtagaataactttaagcataaactgaaacagtttcctctaaagagtctagcagcctaccatgcctcatctagaagtgcaatgactcctccaggtttctgaaagagcaattcatatacacacatatgtgtcaagagatgaaaaagttacaatcttccacaaaaattagatagcaagacagtaggacaccttctcaatgagctccaagacatccttgttatcaacaaattctatgtaactccagttgatctcttctttagtataatcttcttgttccattttgaagacgtgctgttaaaaaaaaaagttgtatgtcaaagcgaagtagggagaggaatatatattcgaaagatagcagtgtgtaagaacacaacggacctggttgaaatgttgttgcagcttttcattggtaaaattgatgcaaaactgctcaaagctgagaaaaaatacatagaaatcagtagacctttaacaatattacagaagaagaaatcattctgtaagccataaactttacctgttgatcttaaagctttcaaacccatagatatcaagaacaccaataattgtcttagaattcggatcttgcccgatggaattgttaattttgtcaacaagcctgaaaacaaattatacgggttttaaaaagttgcaaaacttcaagtggcagatgaactgaaatatttccataaagtaattgaacacatttcaaagtgaaacatgccctctatagaagagtgaactaagtgaaaccagaaaacaaataaaacataagaactggaaagtctatagagagaaagtttttttataccaatcaaacaagcgtgaatagatagtttttgctaacgcatccctgctacccgtggctgaatcaggatcaagtgttcttgtaataacctcttctggtgtcaccattacacgttttatcaatgcatcttccattttctttgcatcacaccttttgaaagaagtgagtccacgatcaaagatgtaaaaaggaaacaaaatagaaatcgagattaaacaagtaagttgcacatacctaagaagttcagcacatacatcaagatgatatcttgatttctcatccttcaaaactgaggagtcaatctcttttccttttgcaaaattgacattacctagatgaaggattgcagcaacaactctaaatattgcatcctgatagcaattatcagaatggtcaataagatgctctaccagagaaatcatttcttgttggaaaaggagtaaatggaagactgacctgttcctcttcactgatgccaacaatatccatagctcgtcgggtagcaagatactcctcggtgtcatccactccatccagtttatagcacttcgattgatttaggtagtggaataacttaggatctcccaacttgaacttttctctttcctacagattgggaaaataaatgaaatccacaaccacttaatcatgtgatttaaagcagaacgcctaacaataaggtatattggcatcattgtgtagcaccaatacctcaggtggggcagcacataaaaggtaaaagcagtggtaatttctttcaggatctgatatttgacacactcgagacctttccaacaaatatgttcgcacagctgctccagatattctcccacagttgtcaaactgaagctcgacaaactttccaaatcgactgcattttgattgaaaataaaagttacaatgaggatatctgccttgaagcttaaaataactctatagtacaataatcaatcacgtacaaaagtattactattgagttgattactctctaactttaccgataaaaaaggccaagagattagcatagtttatatgtgattaatttttcttatgtaccatcagtgcagttgatgccttggggtttgttatatagttagaaaacaaaattgtgacaagtggtgactgaggaagctttgagccaaaaacaactttgactgtgcaactaatgacaacttttcaagagaaagatccaaaggaaaacctctaagtgaacatacgcatacgtacctggagttgttattcctgagagttttagcgttgccaaaagcttcaagaactggatttgactgtataccatcaataaaaccaaaatagtgaatcaggctagcattacaagcctctctataaacatatcaatgcagtaactaaaagtatctgtgtaaaggcttagactcttctccatgacaagcttcaaagccaagataaaagaaacatatttttttgaagcctcacctccagaacttgctgttccactgtccttccttcaacgccggatcgaccaccaaggtaagcaaggtagcgcataagcatctttgttgtctcagtcttaccagcaccactttccccacttaccagaattgagttgctcttgccctcatttatcattgccctacccagagaagcaaaagagaatagactagcatgagaaatgtatgaataaagagtgactacgagaatttctgctagtggatcattgattgggattaataacctgtaagcaacttctgcaatggcaaacacatgggggcttagttccccaaagcctgctcctttgtactgctccatcatatgagtatcatagagatgtggtaacctttgaaacggatttacagcaatcaagatgttaccagtatatgtctgcgaacatattttaacggaaatatttaggaatgttttctactgcttaggaactcagtaagtgatttcataagtaatcagtgcagaaaatgaataacaacttacataaatttcgttcaactcatatctcatggccaagttattcaaaacacctggttcatgtaaatatgagagctttgtcatgtcatcaacacccccagggggagcctctgtatcctttggaaatacgtttgcgatattggccacaacctgaaattaaatttgattgattgattgatacataatctggtttcaatgattgtataatataattatgaaatagggatgtcaatgtcatgcaaaactcatatgttagaggagtaacacggtatccacagggaaaggggttagaggactagtgacattttgttcaaagttaaacagacaccctaagcagaaacaccctattcattccagtgacattatttctcaaaaggaaatttacatgcaaaagcatgggaggaggatagacaacttacggtcttcccatttgtggtatgtgcatgaacttcttcgccattaattttgacaacttcaccatcaatccatgccgctccaggatcttcaatccaaacatgagaaccaactattatattgactgggccaacctacaaaagatacaaatattgaagacgtgaggtacaaagattttaataacctcacacaagctgttacataagttcctctttcaaataccaaatatcatcagttcaagcagttgaaatagatggcaccagacatacgaacctaaaccgaaagtaactaatgttatagattaaaatttcccgcaaaaccaggacaataacactgcctataatctagagacaacactcacttagaaacacaacaaagatagcataacactgcgcatttccctcagtttccttcattctggaaactaaatcttcagcctttatatcaaataaaacttaggtatataaaaaaaaaatggtctcacctgaagaagtttcctgatgaaacatatatataaagggacagtaatctaacatagaagcttacataacctcgttactaataatagaagtaatccaaaatggtgagagccgctaagtgaaatgttaataggaaatgataagtccacgaaatgaaatttaagataactgaaatggtccaacttcaacttgttatagaactcttgacccttacctttcaataacactgtataatgttccccaaaataacaaaattcaacttttctactatagttggattgagaatctctcgtgttaatgggaagacgaactagggatcgaaaacaaaacgcaaacctcatacaaagatatctctactaacgaacaccaaatcggacaagtgttaaaaatgaatccgtttaattgatttaaatccaacataaacccatttgagaaaatacaataagcaattgaataaaacgacgaggatgatgatatctatgattttaccatggctactcctttttttccaatagatcctctctctttttcccagttaactcatccaagagagaccgattttgcagaaagctgactcagcgagtcaggcaacaagacgagtcagatcgggcagattctctcgagttggtgtgtctgagaaaaattctccttgaagtcagctcaaagcagacacggagaaatcgggagatcggaattaacggagccaaaattcttttcaaaaagctgaatctgaatgaattttttaatctctctcaagaaagctgattgattgttgaagaagcagaatgaaagaaagctagacttggccttcttctttctttgcagacgacgttctctaatggcttttttttttgtttttctctctcctcgagcaacaacaatgttctcttttgagctgtgtgtctttctctctctaacacttttttttcttaattattatttgtgtattgttttcaaacaaaaaaaatgttggtgcttgagaattgagattggtcaagtggggtccaatgaggagaagggaggtggatcgagttggacattcacattcgtggtcagccacccacaacactctttgagtctacacacagacaacaacaaagattgtttcgtaaataaaaaaaacattactacatcttttgtttttgtctctgccctttgaattgctcatttttacacttttatccccttttttgttttaattaagactagtaaattatggctaatttgtcttcgttagtggattggttagatgtggaaatattttaaaattcttacgagcgtttctgtttttgaaattctcttttataaaaaatataggatataacttgtgaagaatgtttacaaatgatttgactcatatattcaaaattgatgtgacacaaatattaattttaggttttgggatgatgtatgattttcttagtttagcggaaatcaaattgaacccgcaagatagtgttaagacgtctaataccagctttggtcatgtcattatcattatcatcctttatactccaaaaatgttctatgtttttgaagcccagtaaaaaataattgtttttgttaagttcacccaatttatgtaatagtggttgggctgaaacaataaccttgattttgggctttaatacgacccttatttagatgggccgggttaaaccgtacccgccacaacacacctacacctactttccacagtatcgatcctgcaagtcatcgtcttcaattggcatctgaagaagaagaagaagaagaaaggagccatgacaatgtttagatctatctccatggtaatgctgctcgtcgcactagttacattcatttctatggtttcttctgctgcttcgtccccagaagccgactttgttaagaagactatctcttcccataagatcgtcattttctccaaatcctactgcccgtatgtctctttctctgctcatgtttaatcactttttatccgattcgcagaaaaattggatcttgggtgacttcaatttgcgattttgttttttagatcttaatatctgaaatatgagtgaaaacttgaacccaatgaacttgtattcgttagatttggatttttatgagacaactttgttatctctgtttacaaatggtggttgaaatcaatatggattttcgtttaagatatattcaggttcagttctcagtatttgttctctttgcttttcctttggccttaattgagttgtgtagagagatcatgtacctatgtatatgactcatctctacttttcctttgcttccttgtggtttggtcaacagctactgcaagaaagctaaatcagtgttcagagagctggatcaagttccttatgttgtcgagcttgatgaaagaggtgtgttttaaggttaaagggaatcatgtcttcatcatccaacaatgtttcttagctctcagacatttctgtcatttgaaactttgtccgatcactatgtagaagattcatttgtgactaatggttggtaaaaatttggtcttgcagaagatggttggagcatccagactgcacttggagagattgttggaaggcgaacagtaccgcaagtcttcattaacggaaaacatctcggaggatcagatggtatacttaacactccttttccttcaacaaaacgtctttgcttatgccaacatttgctgatcgatagatttatctttgtttctggttatagataccgtagatgcgtatgagagcggtgaactcgccaagcttcttggtgtttccgggaacaaagaagctgaactctaggttatatatagttggaagaattgataacactctctgtgatgcttaggtgtaagcaattcaatttccatttgtattgtgttctgcagcttgatcatgaccttgtgacagcttgatcttgccttttaaacgtatcttatcaaagaccacattctgagttatacaaattgggttgaggaatcaaatctggacatgctacaaataacttatctgaacaacacacaaactttaagtgcattgtactgtttgggggataaatagagagtagctaagactagtggaaataaaacaaaatagatagtagctaagattagtggaaataaaacatctagggtcgtgctcttttgttgctgcaagtagggcacttgtaatgcttgatatgctccgctctagctggagtgatcttcacacactccccgtggaaccatttctcgcacatgtcacagcaaatccagaattcatcagaagcatagttatctccacatgctccacatagggtttcaccgtgttcgtcttcatcctcatcctcttcctcttccccttcttctaactctaatccttcttcctcatccttggcatgtatcgtctttgaacttttactttctaaacctctctgcattccagatcaagaaatgtattaactacaccaaaatagcagagagtaaactataaaaagtaatcaacaagtgtcactggagcggtaagcttgtgataaattggccatttcattgcatactgatacagtaattccagacctgccgcttagatgattgcaactaaagatacatctttgtgctgcctgaaacttaagaggtttcttatgccacacaattcacaaactacgattatggaagtaagagtattgtgttcagttaatgttttagaactcaatagcaaactgtgtaagatctcaatctataatgcatatgatgaaacagatgtttaaggaacaaacttgtgcagcatacgctcgaggttagcagaaaatgagaagtattgtaggtagtaggtacgctacaacagtaaccttaaagcacaaaaacaaaacagtttctgatactttaaccctgatcaaatatggttgtgttatctgaaacataaataaatatatatgtagttataatataagaaggaaaacctttcatataactataaataatttcaatgttcaaatatttccaaacgtgtctcttaaaaagttagaaatcaaggtgttctgttaaactatagttgaattgtgtagcagctactcaaatgagacttccaagatagtgcaatgactgtatatgaaaatgtcataaataggttgaatcctttacgatgtgaatgtgaataacatatgccagtgctgtgctttattgaatatccatttaaccattcctaatttctgaaatactgcaagacaaaacaaaaaatgataagagtagacgaaggacaaagcttgagtatcgaaaagaaggtctaagaatgaaacaagagctatttccgcaaaactttcaggataccattaacaatcatagacctttttctgtaggattgtagttgagttgtcagctcaactaacgaacaacttagaccggttagtgtactatgggaggagttatatagagaaccgaaggtgataggatcgcgatactgagttgagaaagggtttggaagagtagcatagtaattaatgttcatagttcccagttcatagttaataaaggatttggtttgttcttagttcataattaatgttctgtatcttattaaaggagagcatgagacttaccatttttgaatttgacttggatctgttgccattttgatttgctgaagagggcatttcctttgtttgcttctctgcatttccagttacaacttcatatacagtaggaacctcatttatcatactaaacaagcgcttcctgaatttgtaagtgtacgggttagtatggaaatgcttcagatatcatgataattaatggtagagaattgagcagagaagatattaaacaacgaacaccaggttagaagagaaaacacagcaaccaagaaagaaagaatgatacctgtcagctctatcgaaaccaaatcttgaaccaaagtaaaaagacacagaaagtaaccacgcatcactgtggacagcaacgagagaaagccagtttctttcctgcatcccatctctggcaaagttaatgccgagtgcaggttcgggaagctcaggaggcacttcttcagctggtaagttaacttcccacacttcatttgggaatccatacaagcagagattctgcttctctgaaatgtcataaaacagtcatacaaacttcagtttatcaacgctacttaattagcagagaaagcaacgaaatactctctgaaaacgatatttagctacgtaaaatcaagacaagcagctatattcaataacgaaatcatgtttattaaattaatatattgatgacaaaaaattaatatattcctcttaactaaaacaagttttagagccacaagaaatttcatagagacatgcaacctctaaatggttatggttatgtcgatcaaggcacaaagcatgaagtcaaaagcgagatatagagaaagataacagcaccaaatgcgaaagagtatatagttcatggggagaccaaaccaccgaactaaaataaaagttgctcaaatgttcaacataatcagtcaccagtaccaaaacacatgtaagcagcagagcaagatcttatacttttcagtgtgagtgtcgatttggacaagcctatgttaccatctcaactttgcatattcaaaatcaggaataactgaaacagcttgagagcatacttaaggctagagagagaaaaaagctaaccagggtcgcattgctggaaaaaatcttccacatctgcaaaaaaaagaaattaattgttcttaattcgaagaactaagcatcatcaacacaatccataacactagagcacaattgttgaaaaagggtctaaataaagccaccaaacgatcgtcatgagaagaattcccacgaaaaactcaaaacccataagaaaagtttcaaactttaaaaagcaaagagaagaaagaagagaccagtggtgagagcttggatgatgccagctcgacggcccttaaaatctcgaaagacttcttcgacagttcgagggctgtagtgcgcagttcctccttccatgtccgtctctcctctctcggaaacgatgaaagaacagtgaggtttgcttcttttttttttctaaagcagaatttttgttcttaagtgataaagtaagaaaacttaatgcagactaaaaagttgccccgtggacagtgaccgacccggtctagtcacaacacttatttaaaaataaaaatacataaataatggacattaataatgtcttcgtgcgtttagtttggtgttatctcattttcaaacataatcaagtttgtcgggaaaaaaactactctacagatttcataaatattatgaatgacagacgtaatcaacacattcaagatataatcatataaccatgtcttttttcacttttctcaatcatctacaaagccatgatcatccagaggaaatagttacgatcagatgagaaacaccaacaacaattggaaaaaaaataacccaaaaaaaagaaggaaaactgagacgaagcaaatgcatctgattagcttacacttgccatctccactagctggttctgcttacaaaagttcctgtccaatatctcactctctgaacaagttgtatctgtcactcccaaatgcaacatacgtatacacatgcttataacaaacaataccgtcgtttcaggttgcaataggaaataagtgagtcgaatcttcctctaaacacagcatcgttgatcgttaccttcctgtcatcagattagagaccaacgtcaagcctagtattctactttgggaaaaacatcccaagaaacatctctgtaaaacaaaattgttacttatacttggtagatcatcttacctgtatcttctttccttttctcaggcgcatacttttcgagaaattgcaagtttgttttccagtaaacttcaccaccagacagccatgtatccatatgcatcccacttggaaactccacaaatgtgcactgagggttacgggcagccgctttcgcatacagcattttcatgtgaaatggagggaccatctcatcttgcagtccagagaggaaaagcactggttgtttgatctgtcattgttgcaagatcagtttatcacaggttgctacagaaaatcaaacgatgagacatttttttaacagggatatgtttttagcagcacatcaagctcctttcttgtttcctttcaagttttactccatagaacaaatcagggagcaatcaatcagcttgcggcatacatgaataattttatagttcgggttagcttatcatgaattcaacatattccgcaaagatatatacactatgtcccgttaaaaggaaatgaaggaatgcaaatgcatgagatatattaatatatatgccagtgaggtcattggggtaccatagtgttttttgcttaaatgagtcattttatggcatatgcaaacagtaaacgaaaagaatccatctaacatctatctgcaagagtctacatttgcatcttacctcagcaatagcatcaattgttttccagggagaacgtacaacaaaattaagaagcttcaggcttttcgtaccacttcctccaataaaccacttcaagaacggcagcaaaacgccagccatatcaagaatggatgtgaaagtattttccagaatcaatgcagatacctatatagcgacattgagaaatggtaaacatacaactataaggcgtgtggatatcaaatgaaatactggaagtagagacaacaagaacaaaaataatagcttaatcaaggcatctacaaatttcatttaccaagaaattttctgagaaggataaggttcttgtgcatataatagtaaatatcagtgggggtgataaaaggaggcctataacaaagctcaaacgaatacccctatcaaccaggttcttttattgccagatgactaaaactttaacacaaaaaataattatattcagatagtacaaaccgcgtagattgttactgatgataagtgactagaatctaaataaagaggtactctagaaatttttatacaattggactccaggtcatctgccaaagaccatgagttataataatttgcaacagtaaccagaatctcattaatatactgataagaagccatccaaaccaagcccctagaggagagaggaaggtgcccttaggcgttataatttataaggcatttgttagtctcattcgtaaccatgtgggactctcaataatacttctccctttaaacagtaacatccacagagctggcggctggtacttggcctatactgtctctcttctaataaaatatacattttccctactcatgaaatgctaccaatagcaatatgtactaatagtaccttatctggattgtttttggtaagcacagctccaacagctcccccaagggaccttccaaatacaactattctagatgtatcaatgtcagtccttccagaaaggtgatccaatgcagcctaacaaaaaatatcaggcaagaaaatggataatgaatacatggagacgcaacagaagagatatgtggataaatttagggagacaagcaaacctgagcatcttttatgataccttgttgtgaaggatagccttcacttgccccatagctggttgcacgggaaaatcaataagcattgtataaacagatccaaggtttagactcaaaaacaaacaatttatataagagatagaccagaaaccagcaaactgaaactaacccgcgatatgaaagcatgaatacattgcacttcaatttttgtatcatgatgcgaaccatctccagacgatgagcgatgtctgggattctaaggtcaaggtcgtaacaagacaaagtatcccagctaacagacatggaacataaaataggttccttagagcatacaaatataaacaaacaaaaaccaagaaatggctctggaaaggatacttccagcgttctcctggaaaaataaaatggttggacctgcatgccaaacataaactattagaaagacttcgaattaggctaaagctaccaaccacaagcaactagattttaggtgacagataagttccaaactaaagctaaaatgacttagggatcacaaatctgagaaaaggaatccaaaacctagctaaagacagagacatcaagacctaaaatccctcaaaattcagtagattcaaaagcttattcgaaaatgtaaaatcaaatctaccaggaaaaaaaaactgaatcgaaaggagactcaatgatcaaagagagtgtggacctcgacattcagggaacatcttgatgaaccaagcgtggagacgtacaccatcggatgattgaagccaaatatcttcgtagatgagattgagcctagcgggagtgatcggataagacttgcttaaacccggaagcactgggacgtacacaagcttctcctggaaagccacgagcagcgccactccggcgacgactatccctccgaatccgtagaacaacgcgctcacgtacgtcaccatttcctctggttctgctaaaggagcagattccaaatccaaatccgaatccgaaacagaagaagaagcaaaaatcgaacgcacttttgcaactttctatctgtttctctcgtggattttgcttttcttcttcagaggggagaaaaagagcttcttcgtttctttttttaagtttacaggtgagaaggattgagacagagtttcactgggccgaaactaaagcccatctatgcgctaaacccaaaccgattttgagtcttcaccataagaaaatgtagctctatttggtggtctaaattgttcatttgcgagtccaccaacaatactcaaatatgacatttcccgatgaactctaatcaatagttcggctaagttgtaaagtttgtactcaacaattatatagattattctacagtttctatcttgatttttatataatagtaacttgatttttgtttgtatcgcgaagttatttgcttaaatgagttaagtaaaatcattgtcatgcattttgaaatgttgtaagaaacttagcaaaaaaaaacttaaatatattgtaaacaagcacaaaccattttgacctctttaataatattataatagttttgggaaaaacgaaattttgtggataagatcttggtacatacaaatttgtatatgaaataataaaagtggagaagagaccaatttatcttagtgaccctagtgtaatgtttcagaaaggttatattgacactcaacgataacaagaccatagtggctggtcgaaaaaaaagaaaaatactgaagagttgtttgtaaactaaacaagtcttggaccaccaccctttgccaaaacattttaattttcagtttagtacattaccaaatttacaacaacaacaacaacaacaaaaatacttacactattaatattttcgagtcgttggatcattattcacttgaaatgtaatgtagacgaagacgtcacatacataaatattgtcggacggaacatattgctatccttaaattaaatgtcaatgagttgccatcagaagcgttatgaacaacacactacagtacccatttaatgaataatgctaagaacaactttttattattgtgatctagcttagaaccacacataataaattatttcgttttaggtttctcaaaagtcagagtcaaattttgcatacatatcgattaacttcaaatcttgcagcacacttggctacttgagtgtgaagaacgacctttgatacctctgaaagtctaaatccacaggccaaaaatcatgtatatagtctaacctctgtacaagtttagctaatcagtaaacaaacaaaaatgatttaccttaccttatgcaagaccaaaactttttacttttttcactttcgaaattttaaccaccggattgcgtaattaccgtagtgagacgcggaacctttattggaaaccggtaatcccggtttaaagtttcttaagcagaaattataaaaaaaaagagagaataaaacataaaaagagcaccgaacccaaaccaaagtagaagaaactgacaccatctctgtctctctctctccgtatccaaaaagagaaagaaaaaaaatctcaaatcaaagaccaagccagtcaccggaaaatgctgacgtgtatagctcgttcgaagcgagcaggcgatgaatcctccggtcaaccagacgatccagattctaaaaacgccaaatctctaacatctcaggtaaattgaaataaactcactcttctcctccgtctccaattttcgtaattctctcttctgattgagggtattttcgtcaattcaatatcagctcaaagatatggctctgaaagcatcaggagcttaccggcattgtacgccgtgtacggcggcacaaggtcagggacaaggacaaggtccgatcaagaacaatccgtcgtcgtcgtcggtaaagtcggatttcgaatcggatcaacggtttaaaatgctttacggaagatcaaacagttcgattacagctacggcggcggtggcggcgacgcaacaacaacagcctagggtttggggaaaggagatggaagcgagactaaaagggatttcgagcggcgaagcgactccgaaatcggcgagtgggagaaaccgggtcgacccgattgtgtttgtggaggagaaagagcctaaagaatgggttgctcaggttgagcccggagttctcataaccttcgtttctcttcccggcggtggtaatgatctcaagcggatacgtttcaggtacgttactgtgcaccttacttcatcctacggttacgattgttttgttgactctgtttttcttatcgtacggttaggtttagtttggcttcgtcgttgcctcgtttgtttttagcacgtttgttttggtcgtgattttgtgagaatgttcggaaaatgcttgattcttaggaacacagaactgaatttgatctcttattttttttctttataaaatatggatagagattaaattgaaatttagcgtagatgaatatggttttgtggatttccatgtctagggaatatattgttgaaaataagtgaaatactagagcatacgaatctaacaacaatcatgccatgtcttttgtagaaaatctactacctaaattttttaaaataatatagtatctcgaatttacaaattgaatattgcaaatttctataggaggtaaaataacagggcccaactgtaggtttttcagtttttgtttttacttttgatttgatcttggctcaggtatgatttttttttcattttgggtcatatgtttatgtaggtaaaataaaataaaatagttcaaagttacaatcgagttaaaaatttgccaatgaattttggtgcatttctaaactcaattaaactgaacattcccacgaaattaggacagtaagtgaaatgtatctgaggttttaaaaaaaaaagaattatttacccaatattgaactagaagatgggtaatttgtgaatttctgagtgtgaaaatgggaaagaaagtaggtaaaaataaagagagaatggggacagagttgtcgacagtaacgcttcacgcctaatgagaagcaaaggccgtaaaaggtccaaaaagcaaaattgggtgtcttcttttttaagtgctttctggggtcatctcttctcattctgtcttttttttttttttgcttttctcaatataaacttatttgactgataatcattttttcctcctctttttgttttcttcaaactttggttaaacctatgaattatcagtcatacatagtgtatgaaatcactctagaatgtgtctgataagtttgctactaacttaaatctttatggagttgttagatgtttacgaatgtaacgaaccttatttattttgtttaataaaacattccaaatcattgtttggtacatgttatattaaatcattttcaccaataatttttaacgtttttctaataaataaagaattttgttttattgattccttattctccgcgtctttgtcctgtaatcaaattattgctgttgttggagcatatgaaaatatggttcttattattattccaaaagacaaaaatatatatatatatatatatatatatatatattttactctaaaagacaaaaagatatactataaataaaacaaagcaaatagctttagcctctttagcacagttttgttcacgcctattgataacgacaagacaacttcaacggagtttgtctcttcctggcttcgattctttgtcttctttcagttttaaatcacacttctagttctatcacttactgtctgtttttgtcgaaaccttctctttctttcttgccctctacttgttttcttttcgatcagttttcgtcactgagggcataatcagatgatttagattgagtcctcagttacatgtgtgtttttttgtttcgatattggtacagaaaaatatagtattaattaatagaattgagtttgcttggagaaattctctcccacccacctccaccattattttcttgttactgtgtaggccacaatcatagtatttcttaattattagctttgaccattgttgtcgctatttcttcgtccctgctttttttctttatttctacgagtttttttttattgattattactatcagcctaccatcaatttagaccctaacaaacaaaaaaattatatccaaattccaattttcaaaaggttgtatttgtgtctcctgttttcaactctctttcttagtcccctagcctctgtgttcaatttgtcaaaaggtttattgaattagcttttgttattttgtctagtctccctttaatccgccttcgttaatgtccaatttggtccattggatctggttaaagtcgcttcttttactaattttttaatttaaccattacaattaactttgaatctcatgtgttgtgagaaaatttatgtgtcattgccaagttgtgttagtccagaaatgggatgcaattacactttaacgtacattatacttttggtcattgccaagttttcatcttttgctctttgactgctgtaacttaatcatgaccttttcctagtagcagcttgaagaaaattaacatgtttccaaaatgtatttgtgtctcactttttgttttgggtttttgattagccgagacatgttcaacaagttacaagctcaacgatggtgggcagataactatgacaaagtaatggaactttacaatgttcaaaaactaagccgccaagctttcccgcttcccaccccgcctagatccgaagacgaggttagcctcttcactgaaaaatgtgtgacaattaaacccctgattagtcactaatccctcttggaaatctttgattagaatgcaaaagtggagtaccatccagaagacactcctgcaacaccgcctctaaacaaagaacggttgcctcgtactatccatcgtccacctggattggctgcttactcatcctcagattcactcgaccataattcaatgcagagccagcagttctatgactctggtctactcaactcaactcctaaagtttcaagcatcagtgtagccaagacagaaacttcttccatagatgcttccataagaagcagctcgtcgagagatgcagaccggtcagaggaaatgtcggtaagcaatgcgagtgatgttgacaacgaatgggtggagcaagatgagcctggcgtttatatcaccattaaagttttaccaggtgggaaaagagagcttcgaagagtcagattcaggtactgttaaacttccttacattgtctcaaaacccgggtttatccatcggttctgaactaaacatcactcaaactgtgttttcttttgcattgcagccgagagagattcggggagatgcacgcgagattatggtgggaagagaacagggcaaggatacatgaacaatacttgtgatcataaatctaagagttttgttttttcctcattctctcggtatacagtctttttttccagctcaagtaaattcttccacaggtactcattgtgcctcccagaaatctcaaaatatcaattgtgggatatgttttaaggaggtttcttattttcttccttcaaaaaaatttgagaaagcttggaaaagataagatgttgtctcctttgctcaatatgtgtatccttaattagttctttaaaaaaatacgttcttcaaatttttagtattgtttcagctcatctataggtgttttcgataaagagtagcgaaacgtttaataactaaagaaactacaagtgctgatagtattttcaagaaggttaaactagaaaagtaatgcccattgtgtttcttactgtttgggtcagaagaaaccatccctgaccataggcggaaatgcaaaaccgaacgaatcaatcaatgtgtttattactgtatgtgcaagtaccaatcaatgtttctatgtgtcgtataagaatacgacttttatatttctttacgacatgcacaccgatacattgatgtcattatagttatttgatgtttataacgttaaacgtcatatgatttaacagcaactgataagtgggagcatcgattttagaccctctctattgtctcagaattgtaacacaaataacacaatgcagtcttacattctcacattccaacaaacaaagcaacattattattattcttataaaggatcaagtaacgaaagaaacagattcatttgtgaaaccaataaaggagacttgaaaaatatgatcagatcaatgacgctgcaattggtctttgaccctgtatatagtacttgtttaagaggtccacatagttttttactggcttatacaatcttggtcttgcctcagacacaagcccatcaacaggctgaatctctttgtctgcacctggaatgcaaaacgttgccacagatatcctttctttttctgtattagtcaccactctatgaaccgggctcttgtatatcccattgctcattatcttaaaacacacaagaacagagattatttatgtcaaatctacaccaatcaaatatttcaaaatgatatgcatattagttacctccatctgatctccaacattgatcagaattgtatctgaagcgacaactggagctttataccacttcccatctttaaggaactgaagcccttcgacatttttgtcaggcaagagaagagtgaaagccgacttatcagcgtgcggtctaacgccaataaccttgtccggcctcggacatggaggatacatgttgaatcttgtatccatcgtagcattttctccacacatgtctagaaagcaattctcttccaattccaacgatatagccatcgctttaaagacttgattaaacactagatgttgcttcattgtgtattcatgtaaagtttccctgaataaactgactgtcaaaatcacctaagtagatgctattgaaactgaaaggtataataagctttacctgaatccgacagggacatcaggccagaacttaagttgtctctgatcttcagggtaagtagtgatatacaaacggtcgatccaatcaagaacttgatcatcccacagaatcatatcgttaccatatccttggatactaccaatctctctcgcgtacttttgtttctcttcggacggaagtgcacagaactccttggttagcttgtaaatcttgtcgagcaacgcttttgtaattccatgatttatcacctgcatcgataagaaatcaaatactctcatttcacaagaacttatacagaacttcatgactctctgcttatcactaagagagtcaaacctgaacaactccccatgtagagagtgccgagtgaagtttactcaactcttctcgaccgtcatcagaaggagagaggagaagactcaaatcgatggccggaatatccatcaccggcacggcagcgttaagatgttgaccattgtcgtcgacggctggtggttggaggtatctctccggtattccttcgcctgctgcaaccacctcttggacagtcttgaactttggcttctccattgttactactgatcttgaatctgatgagcgtttaaggactacagagcaagttgactattttccaattttctaaacccaaagcaaacagtcacaactcacaacgctattttaaaatgcagaagaagcacgttgctggaaaaaaaaaaagatatcttttgattttcaataatttttacgaacttcctagacttgttttcttccaaaaaaattcctcttccttcaataatgttgaaccaaattcatagttcgatataaattagtccaacgtgtataaaattttaaataaatcattaatgaatataatagattatattaatagaaattaggtttttaaccacttaataaatcaattagtaatcgagcaaaatagtttatactattagttaaccaaaaaaataaaccaatgacatattcagtaaatgtttacaaatacaaagttgtatgcagtggaagacatacgttcaaagttggggatgcaagtatgcaactgacccagtttatatataaaaatatttcttcattataaaatagtatgagtctttagccatatttgtttgtgtttaacccccttaattattgaggtaacatgaccccatacttcatactgtttttagttcaaaaacattatttctttttaaaaaatatttagtttacagtttcatatttcatgcaaatatttatttttaattttttatcgaggtatcaaatgatatacatgcaaggctgcaaccaaaacaaagatcaaccaatcagaacactatttttgcatttatatctttggtcttaattaacatgagaatataaacagcgagttagcaacattcattaggattttcctgtttaaactccagatatcgaattgccataccgcaatttttttgaaaaccaacaaactcttcgattcagcaacagaacatattaattagcaatggatttgaatttgttttcgctaaagtgagttagcaacattcattagcaaagtgtcgtcttgtcgagttgtcgtggtattacccatccggtgggttcaattcatattgtgtgtgttgtatgtgaaattaaaactgttaataagacaaaaccaaatttgtaaataatttgacaagtataaggtctaatctcataagagataaacaaaatagaataaaataaactcaaacttgcagagataaacaaaataaaataaaataattaggaaacatatcatatttttttttttataggaaacagatcttagacatgtataaggtctatctcacactcattaaacagggaacagtatctcagacatatataaactcaaacttgcaagcttacacgaaacaaaacaaaaagaaaacaagtttggttcttttcgtctcggttcttcaggcaagtatatatgatcatgtggtggtgtttgagtttcttgtatgtaaatgttatacgtctgtagatacactcattgtatatatctaatattctaatacaacaacttttctggcgctattgattttgcagagacaagttatatcatggaggactattctaagaacttgttcctattacttttctcatgcacagcgttgattatcagctactacaacgttgattctttaagtactgcatcagtcgtcggattgaattacggactcctcggagacaacctcccatctccgtccaatgttatcaagttctacaaatctcaaaacgttgcgaaaatcaggatattcgagccaaacaaagacgtcctaaacgctttgcgtggaaaccgagatattggagtcaccgtaggcatcaagaacgaagacttggaggcacttgcagccaacaaagacgcagttaaatcctggttctccactaacattgatccttacatagccgacgtgaacataacattcattaccgtcggaaaccaagccatcccgggcgacaaacatggccctcacgtgcttcctgtcattcaatctctcaccgacctcgtcaagtcaagaaatctccagatatcaatcagcaccacggtcactacgacgagcctcgccaggttgaaaccgccttctgcaggagttttaacaccccaagcacgtcaacagcttgtccccgtgctgagattgttgtctcaaacaagtacaccgatcttcgtcaatatctatccttactacttccatgcctccgacccaaagaacgtccctctcgagtacgccaatttcaataacgaccagatcgtggtcaaagacggtgcactaaaatattccaacttgtttgatgcaattttcgacgcttttctgtgggcaatggagaaagagggagtgaaaggtttacctttggtggtgtcggagaccgggtggccctctgccgggaatggaggcatgacgacaccggctcttcaatatacgtacattggtaactttgtgaagcatgttgcaagtggtaaaggaacgcctaagaggccaaatagtagaattgatgcgtatatatttgagacgtacaatgagaaccagaagccagttggaatctatcagcattttgggttatacgatccttactgagacgacgcccatgtacacgctcttctgatcctcgatgttgtgttcaagtggtcagtttttactgtttctcttaagaatctgtgttgtcaaaataatgctctagtattgtttgtttaggggttgaaagacccatttaataaaacttatggtttataatctaagtgggtttcgagttagccttattagaaatttcactttagtatttggaactactaaattgaaggaaaacacaattgaggatcaaaagagcgtttggtacccagctcctatgtttttttacgagtaaaaaactctttgcaggatttttactttttaattttgaaatcaaagacgtcacccaaagcacaaccataataggtttagtgaacactgaacagtaaatctctgtttccacaaattgtaaaatacagtaccaaaaaaagggcaaaaacttgaacaatctttagttatcatatgcggtggtaaccaaatgaacctgatgtcttcacgattagacacatgcttgctggaaccatttgttgatttagtgaccatatttctgaaactcccactcactgttatctgttgaaacaactcagcaatattagcaaacaaacaaaaactgcatactagtcaagaagcttaaaaccaagaaacacatacccaatggacaaacttgacgagtctttagccatctgctgatgcagtgaaagtggaaggcgtgattgcaaacccctgcaagtacatattgagtatctttcgttagggaaggcactaaataatttatgtatatccacttgagttgtcacattatagaaaaaagattcgaaaaggtcatcacacaatcacatacatcttaaaggaatacttcctactttctctaatacttcctagctaacaagattcaccctccaagtggtcatctttcattgagcaatcaagaatacagaaatacttattgcagttattttggtcgtcctctgagtttttaattcatcatcaatcgtacaatcaactgcaagactatgaaagcatgtaaacacaataactacaatttggtctctctctctctcagaaaatctttaaaactccataaatctaatcaactgtactactcatcgaccaatctagattgctgcaaaacaaggaacagggtctgctctcaaataaagcaaagacatctatcagagtgatactaccacataagtaaaattcaatgtcaagttttaaaacacgcactcagagatactaaaattgtttcacacaacactttcgcatacagttttgtgtttctagattcacaattacgatagctacaattataaaccaaatcaagtttccaaacaaaaagcaacgattgagatcatgatcatagaagaagaaaaatgcttaccccaagctacagtgcactcttcacttgtggcactggcctgattagcctgacactcgatacctaacaacaaaccaaaacacaaaaacgaaataagcataaacattcaacatcatcgttacaaattccaaaatcaatcgattgttttaagacttacaaagatccatgatgtggtttctgcagatcgcacagttgtcaacaacgatatctgcaaccaaaacaaagatcaatcaatcaataaaactcttaacctaaccaaaaattaacatcgtaacacaaacatcgaaacatcgaaagaccaattgaagatagtgtataaggattttcgaggttaccccaagcccagagagcaacggcgctccacttcttaatttcgaatcgcttagctttcttgttggaagacgacgcggctacgctgctggaggcttctccggcaggaatcatggtaacgtcggagtctagagtcgccattaatctctgatcggaaagaaaatttaaaccctagaaaagccggagaaaaatatcaacgtttgagctgtcgctgattttgttgtagagagagattgtagaggaagaagaagagagatatataaagcagctttgggctttgcctgtatagtgggctttcgtcggaattagattcccgtaaatttccataattcggtttaaggtttcctttttttaatcttactcatcctacgatttacataaatattttaatttttcctttattatcccaacgatttttatttatttaattgataaattaaatatttttaagcaaaaagattacggaaaatatctattttatataataaaaaaaacatatatatatatttttttctaactattcccagaagatttacaataactatatgactaattaactaatcattacatacgcttagttcaaattaactggaaaatcattacatcataaaagcttagcgtattcaatgcatcaagatgttagaaaatagtgtcaagatatttttctacaagccataagagttgcatatagttagatgatgtatatgcttcatgccacctgcctctggtctctgagagctgaaactttcttccgcagttcaatatttgatattctctccacctccagagctcgttcaagctacacaatccgttggttttggtttagcctctcatagtaaacaaaagggtttgaattcgataaactcgatattggcttaagatttttcactatcatattgctgcatctctaaaacatacaatgaagagagagagagagaagagaagattgtacctttgcagctcgcatactccattctccaagaatagctcttaacctttcattttctgctacatactgtttcaggagtttcaaaaacaaaagatgatgagttcagggatcagaaaaaatgtgtagcccttgcaaattgtttgatgcaaaaacaattcatggtaaagctgtgttgatgataaacatgatgtgatgctgtgaaagtatgttttgttctcatatgttcttatgtttatagatagactcgaacctgattattggtattccggacgtgttgtatctctctatctctctcagagatcagagatcgagcgagattaagctctgaatggagttgatccacctgcaagacacacaattttcatttaaagatgctacatcaaggatactagccttgaaatgtcaatcaactatgatatgttttccaccaaatgggtaaaagagagatgagaaagaaaaattaaccatgggaatttgcaagtttatcatttgttaaccgagctttacctcagcagatagtgttcgtaattcctgatctcgagttgccacaagatgcgccagatcaacctgaaagtttaacatttatcaaatgcaaaaattaaaatcccagtggaaggaaaaagttatacattacttttaagaaaatttattaagaatgttgttagaatgtgtacacgctgataaaaagaagtcaaaaattcagaatggagcagttcaaacctgaggcgtgctactaccattcgtttcatatttacttaaggactcctgcaaacgcagaatctgaaacaaaacaagagaggtcagagactcactctaacgaaagcatgggaaaattcagaaaattagggtagacaatgaagagctagagagagcattgaacttagaattactagtaagaaacatcacaagcatcaagattcagaaatgaagtactcatgataaatattccatggattgtcacctcttcactgagataatggagattctcgcgttgatattgcagtagagccatttgttgatcagaaaggcgaccggcttcatggtatctgtgtttcaagcaaaaaaaacgaagtaagacttgagaattgtaaaaacatttgccatttgcaatataaggttgcgaggtaaagcaaagttttcatgaagactaggaataaggtttcagtgagattgtgaaagtacctcaatccttccaaagcagctggttgaagaggagaatataatgaatttaagacatcgggctgagaattcactgagttatactggcgaacataacctaccagtattaaaatacagataagaacagctgcataataacctagcaacagaatctcttactaaagacaaacaacagaaatattgtaaggaaaaaaagatgccaaaagaacacaatatgctctagccaatcgttttttgaagacacggtatggaaatttctgcatcaagaacaaagagttttcaaactgaaacccagaacacaaattcttaaatgatctcctgatactcaaccacaaactatagccaattgtaagaactgtatacatgataaatgtaaacacaaatgtatggccgcagatgtagacaattttgatagtgatttagcatgcatatgatcgcgatagatcccagatgcaaatatgcaatggaatggtttcagttagtacaccataagaaatgaaaactgattataaatctgacacttggcaatcatggcatgaaaaatttaagatgaagaaaaaccatcacgacgtaacagctgaacctggtgtatttcatatatctcgcaaatggaaagcgaatcgatttggcactatactgctctatttgagatactaaaatgaagctcaatgcatgcctgatagtatgaatatgattatatggaccttattcttaccaacaaatacaatcataaaagaagcagcagaaattgcttcaacagacatgatgaacctgcaaaataaatatactcgtaagctttttcgaccacgccaaaactaaacttacttcacccagttgttctaaaataaaaatacgcaagacattgtccagttcaaaatcctatttctagtcaatggcatcaatattaaacttcttatatgcattcaattttagctaagatattggtaaataagttaagtcaaatttctcaacctgagtaaatgaaaacagattctcattaacttagacgtttcactatgacactatgtgatgtgcaataattttcttagcgagacaagttaaaggcttgagtcagaatcttcctaccattctttattgtcaaagacaaaagaaagaaaacagaaaatgtgatcaactggaaaagaaaaactcataagagtgtaaaagcagttaatgtataaaaagaaggctgcagacctttgcacagtaaaaatgggtagaacactgacatatggtctccactccatgaaaagtagcatagatgcagtccctagaacaacacggagtcactttattgagcacaagaaaggtatatatgtaacaatttatgactaggaaagtagcattaaagattaccataggccatgattgcaaatggcagacgaactacatgtttcagtttctgactgaaactgtaataaccctgcaatggaaggttctttcagatgaaatgattacaactacactagagaatatcaacctatttctatacggtttacaaaagagataaaatgagcaggatccgtcttgttagagtaaatgttacctgcaagcgtattttctggacctgattgacaaaatattgctgaaacatacctgttgcagaaagtacttacgataatttatacatatccggcagaatattttatagctgaaattggacataataacaataaagcaagaaattgttgttctaactacaaatttactaggcagtagtttgccacatttagtctgacttgcttctaaacaaagattgtagtaataagctgaaggtgggtattgtggttacctgttaacatcaataaagcaacattacagctgcaaagcagcgatgggataagatagtctacagactgaagtatccacggtgcccctgctgctaaaatagcataacctgcctatattgaacaaatagtaaatagaaagttaggcatacatgtttcttattaatccttgcaaagggatgttacaaaagtttgtcttaaagtagagtttggaagcacatgccaatatgataagataaatgcagcttccaacaagacttctcgattcacgatgaccaaagagaggagcttcatgcaatatatcaagaaacctacaattacaaaaacagtggcgaaactagatgaggagccaataaagaatatagtgaaatctacaaatacaagaatgtaggagctgcattattcaaccttgaaacaagtgatttttgagattagggaccaaaaggaacaaactttgaaataagaacaaaactcgaaaaatccagagctcagaaacaaacgatcgaaatcacgaagctttgtaaatcaatgagcttacatagcattgtcttgctccgtcgacggattgacagaagaagcgcgtcgatcgttggccattttggtttgggtatcttctctcgtatgttggagtgacgactgtatgtaatctcagaggcttggtaaggggtttttgcttgaaattagggttgaatcagattcgttgctccaatctggagatttgagagatgtgaagagcaagcgtaagaattagaaatcttcactgtgaaatcaatcaatcaaaggattggaatgtttggttctgatttgtgaagtctctctgaacaaccagtcaataacgctgtcaccgttgctgattggtctaaatttttaaacaattaaaaccaaaaaaaaatgaatttttcttattggtctttggtgaaccttattaatcgaataatcgctatttggaactcttaaagacacatacttatcattcttcaatataaacgacattgctaagaatctacaaacttgtcggaacacatagttttccatcattatttcattatttggtttcttaatccttttttcgtgtaaattatatcatgctttctacatagatgagcaaaagtaatatatttccacacttgtgatatgagaacttttatcctaacttaaacataaaaatggatcgttgtaacttaatctatctttattcttttgacaaggataatcaatttgattcattcatcgttactataagcagatctaacactcccatactaaacatttgtacatagagtttagttttgatacatttcattcacttattgaccaaatttagtatagacatatatataaacagtactcgaaatttagaatttacctgatttggtagaaaacatttgtgaattcacgagaatttgtgttatttattaccttaataacatagaaaatgattgaacacatataatttgaccaaagtcgcatctcacggtgagatgagttcttcgtagctccaatggtggtggtggcttcacaatgtcgacttcttcttctttccctcgaaccatcgtctcctacactgtgacaacttcgctcttcatcgttatcttcctatgcagcgtcttcttcttcactagacgcactctcgaaccttctctctctccttaccacaccgccgacatccctctccccgccgtcgatctaccacctcctacgcctctcctccctcaaatcgagcctcacgatggtgacgtcaccgtggaaacgaatcctaaggaggtagaagattcgcgccgcggaggcgatgacgtcgcggtagagactgagctgaaactgaaagatgtggaagattcgcacacggagaaaaccgaggaggaggaagaaggtagaggagaatcgcccggtgaagtttccgtagaatctgtggaacatgcggtgattgagaagatgagaggctgtgatttgtacaagggatcgtgggttaagggcgatgatgagtatccattgtatcagcctggatcgtgtccttatgtggacgatgcttttgattgccagaggaatgggaggcgtgattctgactatcttaattggagatggaagcctgacggttgtgatcttccacggtatgatgtgcttttagtattatctctattctctgtttcaaaccgccattgttatacttgatttgcagctatggcgatggtacaatgttgagcattattgtcaatccatagaaatgttgatcagcattaaactagtgttagggacagagtgtgaactaatgttgaacatgagtcgaattttcctattagctgattgtgaactgtgaagcgaagggtatttgaacaattgttagtataggtaaaagaatcttctttctctttacaataaaacaaaagagttgtaatcaacggttagtctttgatcaatgtatttactgtcacactttatagatgatacagttcgcagaacacatcatgtgtaatttctgtttgtgcatagaatgcatgtatcccgttcttattgactttccaatcataggtttaatgctacagacttcttggtgaagctacgaggtaaaagtttgatgttggttggagattcaatgaatcgtaaccagtttgaatcaatgctttgcgttctacgagaaggtttatcggataagagtagaatgtatgaggttcatggccataatataacaaaagggagaggctactttgtattcaagtttgaagtaagtccactcttctgttcatgattgcctgtgttttcgattgaatttttactgtggtattctggtttgatactggaacaagcaacatattagttatggattctctaaactttattagaaatcccagcaacactttttaaaacctttaattttgttgtattaattgccacatttttgtttgagaaaagtatacatatttgtgcatccttttctcttgattaacgtaagggtttgataatgtctgacaggattataattgcacagtagagtttgtgaggtcacattttcttgtgagggaaggagttagagcaaatgctcaaggaaatactaatccgaccctttccattgatcgcattgacaagtcacatgctaaatggaagcgagctgacattcttgtctttaacactggacattggtgggttcatggaaagaccgccagagggtatggttctttccttttctgctttatcactcttcttcacaaatgttgacttagtcagaggatttccaaatcccaaattcatcaaagttgcaaaatcttctgaattttatcatcttaaagcttgatattagtggttgcatcccattgtacttgtgtaaatggcaaatgacttggtgaataaaattagtgcaggaaaaactactacaaagaaggtgactacatctacccgaaatttgatgctactgaagcatacagaaggtcgttgaagacttgggcaaaatggatcgatcagaatgtgaatcccaaaaagcagcttgtattttatcgcggatactcctctgcccattttcggtaaaccctgatcttttatttaccacccgaaagtgagttcatttcggtttcagcacttaggttcagattaaatttgttttttttatacgccacccccatagtatttacttttgctgcggttttcttacagaagagttaagttcttccgtgtattctgtgtcctgacttgaacaggggaggtgagtgggactcgggagggtcatgcaacggggaggtagaacctgtgaagaagggttcaatcatcgattcctatcctttgaaaatgaagatagtccaggaagccataaaggagatgcaagttcctgtgattcttctaaacgtgacaaagctgactaatttccgcaaagacggacatccatcaatctacggtaagaccaacacggatggtaagaaagtgtcgacaaggcgacaggattgcagccactggtgcctgccgggagttcccgatgtttggaaccatcttatctacgcatctttgctccttcaaccacattcttaaagttgagctcatacatcaacaaaattagatagaaagagaagagcagaaacaaatgaccagtccagtcttcactgttgtagtagtgatgtcaaattttgtgtaatttattgcccttggagctgataagtagttttttgttactttcatgtagaggtgtgaacaaacggaatcaggatgaaattttcagggttttttaatggcaaacaatttttctcataattgtcaaatcagtaaacaaaatctcaaatacgtattgaaaattgaaactacaacaaaatttaagggaaaatttagagaaaagctagcagcaaagcaacaaacgacttgacactccattttcatggcgacaatttcttcttcaaattcttgatagacttcactcctctacgagcagcgggtttcactttcttcttcgtcttcctacttgccaactccctcactggaccggccgggattccttgcttcagagcacttcctcttggtgtagcagacggaggacacctcaaatcttgtggaggtagagggcaatgaggcttccacaccaaattgttcttcattgcgaatcttactctctttgagctcttctcactgctcgggccagctaagcttgtctctgctgcatctctgttaacagtactaacttgctcttcccctttgttctctcttttcctcttcttggtctttttagatacggacacaggctctgccacgtcacagacacttgcaacctcactttttgacggactcatttcagaggcaatcttctcaaactcctgtcgaagatctgatatcatagtctcatcaaaggattcatctttgttaccaagatcgacaacactatccataacagcacctttcttgacactgtcttttttagtctttgaacatttcttcaaacccttcttctttgaagaagacccattagcaacaatcttcttagacttagaaacaacatttgtattagactcagacacaggaaccgattcaggaacttcatcgttgccaggacgagaagcttctacgatagatacttcgatactagaactcgacatatccttctccaactgcaaaaactccttgtgaagagcaaatatcaatttcctattaccctgatgacactccggagaagaacccaactcataaaacctctttgcaaactccatagacaaagcaatagatcccaaaaccacaacatcatcatcctcaggcact

SEQ ID NO: 1456 - DNA, 89490 bp, Arabidopsis thaliana
aagcttctacgatagatacttcgatactagaactcgacatatccttctccaactgcaaaaactccttgtgaagagcaaatatcaatttcctattaccctgatgacactccggagaagaacccaactcataaaacctctttgcaaactccatagacaaagcaatagatcccaaaaccacaacatcatcatcctcaggcactgcatcatccccagattgtttaattatcagtagcttcttccccatcttcagtaactcatcaaacaaattactcttaatcttccccaccaaaatcttatcattaacaacacccataatcttcacaaaaggagcaaaaagaagttccaaaacctccttccttaatggaagaaacggcctaagctcttcaacaaaagcagaagttatatgatagttaacaccattcccttgaaacttatcatcagcaagtaaagtcccgtcgaacaaaatacccatcaaacgacgagtgaattccaaatcccatgaattgctatcaataagtgagaagaaaccgtgcaagaacctacgaatcaataggtagaacttatctaacctgagccgatcaatacgagaccactcacgacgcatggtgaacaagaagacggtgaagtaatggatagacaaaggaagaggaagtgattgaagagcagaagagagacgatcaataagttctgattggtaaagagacttatcagcgtgccagacacaatagaagattccttgccatagcttcttcatatcttcatcggagatttcagtttgttctgggagccaagtacgaagaacagttcgcaaggatctgtcgcggattgattgcttacacgaagcaagcttttttatcaacgatttgcaatcttcttcgatgggtaatgcttgttctgccggcggaactcgattccgtttcaccattgttatcgaatttttgaggaagacgcaaaaaccgaaaaaaggtgacggcagattctgggtaggagaggttgggagataaagagaaagaaggacgtaacaaggattagggtttagcttttgtttctttcattttgtttgtcttttacattttaacccttatctttacaaaaaaaaaattttgtccaaatcatttttgggacaatttaaataaaaatcaaaataattaaagttctttggaaaatagctcttgttttaaaaccttttgaaatacgaacattttttctttgattaaaatacactttatccttttgaaatgcaaacgtaattttcaatatattctcttggcataaaaagaaattgacgttgcatcaaatttgtaattgtaatatttgatggtttctttactataccctaacttatttaatggagaaatatcctttgtatccaatctttgatctagaaaattttcaattatgtgattcaagttataattatgtcattggtataagattggatctgagagatacaatttattgtacattaaataaaagattaatgaacacgagggttatatataactaaaataaactttgtagacaaattgtatgaaatagagaaaagtataagaacttcacgaatatgataaaaacaaaaaaagttcaaatgaatttaaaacaaaaggaagagaaatgaaaaaagaataaaacaaagttttctttctttctcctgttcttcgtctctgacgcgctcctccaccatttttatcttattccaagcttccacagagacgacttttctttagtcgccctttcacgccggtgagttctacttcttcaattctccatcttctttgttttttctcggatttttcctgaactcagtgatgttgggttgcttcgtttggtcatcttctggccaaattagcaccgatcattttttggatatggatctatctcacatgacccgtagtgtaaaatttcttgttgtaatcgttaattttaatttgcttgcttaaattcatgtgagaagctggagaattacaaatgtttttggcgtgagattcgttgagagtttttagtcattggacctcatccagcttgtagcaaagctcacatctctatctctcaattgattatgtacaaggaagactccaattactttgtttgaaactgttgttgcgtggagctagattgcttctctgatactgacaaaattctttctgcagatttctggttccaggatgagtaaagttaacagtgaggaatcttctagtagccaaaaattgttgaaggaggttgagaaaataagcgaagctctgtatgtgaacaagaatcctaggggttcagttgctggttctaataagactccaacgaaaccattgagtcgtagcaacttggctgagcctaaggagaagaaatcgttttggaattggcctctcagagctattaatcatgtcagaaaccgccgattcaattgttgtttctctgctcaagtccattccatcgaaggattaccaccgatattccaggatctttctctcactgtgcactggaaacgtcgtgatgaatctttaagcactcgtcctgcaaaagtttctaatggaagagctgaatttaaggacaagctgacacatacatgctcggtctacggaagcagaagtggaccgcatcactcagctaagtatgaagctaagcatttcttgctgtatgtctctctggttggatctcctgagattgatttgggaaaacatcgaatggatctcactaaattgcttcctctcacacttgaggagttgcaggatgagaaaagctctggtaagtggtcaacgacatttcagttgtctggaaaggctaatggtgctactttaagcatgagttttgggtacactgttgttggtgatactcgtaatcctgcttcatctggtagcactcagaatttccgcagttcgtcaaatgtaaaacaaactagtaataacacagggttgacaagagctatcagtgcaaagtctagtctagggaatggaaagtccgcgtctcggcgttatgatcatagtattgtcaacagagaatcacatcctttgtcccagaatatggaggaaattaaagaccttcatgaaattttgcctgctgtacaatctgacctgggtagttctgtaaacactttgtatcaaaaatttgatgaggagaaggtggatcctgcaaatgagtctcagttcgaatttgacgttgtcactaaacacattgaacctgttgagtcgatatctcatgaaaaagaagatgcaaatgcacttcaaagcgagttggtaactgggaatgaaactgttgttccttttgaggaaataaaaaaagctggtgaagttcctactgctggaagtgacgaagttggtgcagaaaatttccctttagaagagcccttggtaaacggtaatgaaactgatgttccttttgaactattaaagaaagctggtgaagttcctactgctggaagggacgaagttggtacagaaattttgcctccagaagagcccttggtaaatgggaatgaaactgatgttccttttgaggaattaatgattactggcgaagctagtattgctagaagtgaggaagctgttgagattgttacagaagagttggctccagaagagggaaacaaaatttctccgaagaacgaggaaagtgttgttcctaaagatgctgaagaggtaatgaacggtgagaaagacttgaaagaaatgataatgaaagatcttgaatcagctttgaaaagtgtagaaatgttggaagctactgcgtcagaagacgaggaagatcgaaaaaagcatggagacaaagataaatattttataacaccaatgaaggaaacagtgccatcatgttcgagagatgtggctgaatctgtggcatgtgagttcttagacatgctaggtattgaacacagcccttttggtctaagttctgagagtgaacctgaatccccaagggagcgcctgttaagagagtttgaaatggaaactctagcggcaggttctttgtttgactttagtattgaaggtgatgatccccaattggaatgtgatgaaaactttccgaacgagtatgagtcggattttgaagaaggttttgatctggcatcccttgttcatgacatagaagaagagtaccagttggaagctcaagcaagagttagccatcccagggccaaaatgttagaaggcttggaaacagaatctctgatgcgtgagtggggtatgaatgaaaacacatttcaaaactctccgcctcacaatggtcgtgatgcgtttcatccagctgattttccagtgaaggagccatttgatttgcctcctcttggagatggcttgggtccagttgtgcagacaaagaatggagggttcttgcgatcaatgaatcccttactgttcaggaactctaaagctggaggcagcttgatcatgcaagtgtcaactccagtggtggtgcctgctgagatgggctctggtatcatggagatacttcaaaaactagccactgctggaattgagaagctctcgatgcaggcaaataaagtaatgcctttggacgatataacagggaaaaccatggaagaggtgttgtgggaaacttcacctacaattgacattggggacaggtttgcatcactcttatcattgctcgttttgatttgtggggagttttaagtgaaaattgtgcttaaaacagcttttcttacaagttggttgtatttggtttatcttctcaacacagggatcatgtatcagagcgtgaatctggtgatgcatctggttttgtgaggggaggtgaaagacgaacatcatttgcagctaagccaaaaaagtttggttcaagctctggtaacaataactttgactcggagtatgtatcacttgaagatcttgctcctttggctatggatcagattgaagcactttctttggaaggattgagaatacaatcaggaatgtcagatgaggatgcaccctcggacatcactgcacaatctattggagatatctcagcctttcaagggaaaagcgggtgcgttggtctagaaggtgctgccggtttacaacttctggacataaaagatgatggggacgatgatgatgatggtttaatgggactctccttgactcttgatgagtggatgaagttagattcaggggacattggcgatgaagacgaaataaatgagcgaacttcaaaaattctggctgcccatcatgcaaacccactaaactttatccgtaaaggatcaaaaggggagaaaagaaagggaaaaaaaggaaggaaatgcggtttactgggtaataccttcaccgtagcactaatggtgcaacttcgagatccactaaggaactacgaaccagtaggagctcctatgctttctcttatccaagttgagagattgttcgtccctccaaagcccaaaatctacagcacagtttcagagctgaagaaaaccgatgaagaggaggaagcggacgcgagtgatgcaaagaaagaagagaaacccatggaggaacaaggaatacctcagtacaaaatcacagaggtacatcttaccggtatgaagagcgagacagataagaagccatggggaatcacgactcagcagcagcaggtgcagtctggttcaaggtggttgatggctaacggaatgggaaaagggaacaacaagcttcctcttatgaaaccaaaattgggttcggcaaagcctggtgacaagttgtggagtgtctctggttctgggtctaaatggaaagagcttgggaaaatgggaaagtcgaacacacacattcgaaatccgaatgtaataatgccaaaatgaaactgaagcagtagcatgtgtctgctctgtatttttgatgctaagtaaagttaatgttatgtggtgtggtggattgtgtgtagattcacttcaaatgttgcatgtggtttatattgtgtttgcagttttaggttttgcggatcaaactaatcgctgtttgtggtacagttaagagatcaatggaacaaacaagatcctttgaacttggctactttaatgtctgaaatcaattactcaaactagactaaaaatcataatggctactctatgattattggacattagggtaataataatttctagaaagcggaatgttttaacatgcacttggattattattaaaagttgaaacagcaaccaaaggttcataagaaaataaaagaaaacagaaaatgaaacttcagaacatcgataaggataagtttttcccgcagaccgaagcagaaaccaaaccaggtgaagatctcacctcccaagtgcatgagactcgaacaaccacttttgatcacatcacaaaagctcagaagcttccaccacgaagacgaagaaccaagtgaagagtcgactccttctggatgttgtaatctgcaagagtccgaccatcctcaagctgcttcccagcgaagatgagtctctgttggtccggtgggatcccttccttgtcctgaatcttagccttgacattatcaattgtgtctgagctctcaacctcaagagtaatggtttttccggtaagggtcttcacaaatatctgcataccaccacggagacgaagcacaagatggagggtagactccttttggatgttgtaatcagcgagtgtgcgtccatcttcaagctgttttccagcaaatatgagtctctgctgatctggtggaatcccttccttgtcttgaatctttgccttgacattatcgattgtgtctgagctctcaacctccaaagtgatagtcttgccagttaaggtcttcacaaaaatctgcataccacctctcagacgaagcaccaaatgaagggttgactctttttggatgttgtaatcagcaagagtgcgaccatcctctagctgcttaccggcaaagataagcctctgctggtccggtgggattccctctttatcttggatcttagctttgacattgtcaatggtgtctgagctctcaacctcaagggtgattgttttacccgtcagagtcttcacaaagatttgcataccaccacggagacgaaggacaaggtgaagagtagactccttttggatattgtagtcagcaagagtccttccatcttcaagctgcttaccagcgaaaataagtctttgctggtccggagggattccttccttgtcctggatctttgccttgacgttgtcaatagtgtcagagctttcaacctccaaggtaatggttttgccagtcagagtcttgacaaagatctgcataccacctcttaacctgagaaccaagtggagtgttgattctttctggatgttgtaatcagccaaggtgcggccatcttctagctgcttaccagcgaagatcaatctttgctggtcaggaggaatgccttccttgtcctggatctttgccttaacattgtcgatggtgtcagagctctcaacctcgagagtgatggtcttaccagtgagtgttttcacgaaaatttgcatctgcgaaggaagagagcaagtagtaatcgatcagcaaaaataaccaaactagaaactgtgataagaaatcaaaacaaaccagagaactgatctagaaccctaatcttatatgagaattgcacaaacaaacaagaaattgacgatattacttcttatcaaaacaaagatcactacaaacataaaaacctgacgaactacgaattgagagatcttagtattcctaaaatcataaaatcgagataactcataaatcaaagaatcgagaaaagcatagatgaaacggaatcaataatttcccgattcaatcatccaaggacatcatacagacctaaacgagagatcagacgcgaaatcaaatagaaataacaataagagaaacaggtaccttgaaagagagaatcgttcgaagagatgtgaagagcgatctaggtttttttttacttttttctgtgagagagatgaagaatcagagcagaagataatacttcgctagaaaatagccttcttatataatggtgaccaaaaccgagttttaattaattggcccaaaaggcccaaaggcccaaaacattatttattttaaatttttttgaacatcggctaaatagttgcttattagtgcaaatgtcgagatatagttgacaagctacttagaaatctgcaatataatgcttattagttattacaatttgaagccaaagagactataaaatgaaacattgagaacaataacaactcataaagaaaaaccaaatcattagaagaaacaaactcaaaatgctaaaggaactcgaaataacaaaacgcacaaccacatttttaaaaaaatgaacaatgaaactaagagaagcttaattagttcccccaagcacacccttaagcttcttaacttctgcatcgctaaggaacgttgtggcttcaacaagttctgaaggcaaatcgtttgcaaacagagcaaatggtagaatttggagccctggggaggagcttccgaatgcgacaaaggccaaggcagggcctttcccagagtttagctgaaaatgaagaagtccttgaggaaacaccatagaatctcctctgttgagagtcttcaagtaaactttgttggcggaggagataaatccggcgcaaatggtgccttgaatgactacaaggacctcagaagcaccaggatgagtgtggagagggatgacaccaccaccggctaagtcaagacgagccagagatacgccaaggccattgatgcctgcgtaagcaggagcaaaggctggagtcactgcggctttaatgatgttggaagtgtttccagctgtgccgaggccggtaaatgcaaagtcattttcggtgacttggtcagggttcttgcaagagtaacctgatgggctttgaggaccctttgggtcagctacacaaaagtcttgaacagaggcaaaagagatggttgaaatgagggagatgatgaagaaaatttggattatcatcttcatttttctttagaatgttttatagataagagcttttgttgaagttatgaggcagaaagagaggcagtctggtttatatagagactgagaagatattgatatggttaacgtgaggatggtcttgaagcaatctagaggcatcttatttttttagcattgcatgcatgtgaactttgggtgtacgtacgtgggaaaaaccccacatggcttgatggggcttcatgtcagagatttttgtcagtttcggagaatggtgataaatggttcgttttcaataagatgtaaaaaatgcttaagaaagttttattctactggcacaagtgtaaaactaatcaccctgttgcattcaaacttttagagttttatccaaagttaggaagtcacctttatcaagagagaatgaaattcatgtcaaaatcgtttagcaaaggaaggttattgaacatcattaccaatgaagcgctgtacgacaatgactttgtaaactcttgtgaaagcaacgggattgacgttatatatagaatttttttgtgctttttaaattgcaacaattcgtagtacaaactaattaaagatgcgttgtgaataattttttgaggatatataattcgaaaaaattggtgtgcatggtactaaatttacataatagtttagcattaagagaaataaaatcattgttttaaactatcctcaaggtttcgatcctgataactataatgtacaacgtagtaagaattataatcttgaaaggtaaaagctgttagaagctcccaaagatcatactatccaaaaggaacctctttttgatgagatatttttgtaaagaagatatgaatggagaagaaaagagattggtgtggtccaattttgggtaaagagcaaacatgtctcttcccttctctaatttggactcctctgctcaacttacttatcctctcatctcagcaattttcaaaatcgtgtggctctttaacgttccctcgagcatagggcatttactatctccaaatccagtctacagtataggcaaaataagttattgtttcgggtcttggatttttaaatacaattcttggagaagataaacttggttgttgttttttttttacattttatagcatcttgtttttttttacatttaatttgttaaaaaatctgattctaccatatgacaatttcaacaatattgaagcttctccaagaacacaagagcaataacaagaggataaaagaataaagcttataatgtacactgctttatatacaaggtgattctttaataagctcaatctagctaactaattattaattaacaacttgataaaccatctaacaagcttataactaacactagtctaatatggtcaaaacttgattcaagcatgggcttcttgtgattttagtactgttatcaaagcctgtgtgtttgtttagcccaaaactttggtccatgcaatataggcttcttgaaattggtaacataagaactcgatctttgaagcccagattaaatgtctaaaaagataagcccaaaactaaaaagcccataaaggaaaacatgcatacgtaaaacaaaactaagcaaacaagtgaacaaaaaacacaaaacaataccaagttaccccaacagcaaaagaagttgcaaaataaaacgttttataaatccaattagagccaccattagcatattataaatgtagattacaattaatcaaccaaaacatgattaatctaaatattaagatatacatatcgatctgtcaacttttatttgtaccaagaaaataatagaaacatgaaagatataaataccagcgacaacaagcggagagtgtcagagaagagatgagtatagaattcacataatgcatcgagccatatgctacattgacaaattgcatttaataatttttctttgcagagaggtccacaccatccctctctgacacttttttgtaccctaaacttcctctaatttcgttttcaacccctctttttattaattttactcttgacatggacaacacctcagtctctctttaatgggacctctacaaatacattaacacacaaataaaaactatgaaagatgaaaaaaagaaaaagtagaaaagaccttcacttctgacttctgatccctcagttggatccgtaccgtacaaaaaccagaaacccttgatcaattattacacgactacgaatttatctctctatcttttttctttttcaccatgaaaatctatttttttaccctctgctgaattattctctctgacttcttttatcaaaaaaagaatatagtttagtaattaatacctacgaatatctctgagatctttttctaaaacccatcggatataagcagtgaatgttatgtcggatctctgttatagatgtttcgtcaattttgtatctagttgtgtcctacgaatctcgtcaaattttggctataaattatcttgttatcatttagttatgattcatttcagactactactataacccagtgaggaaatcgattttattgcttaacctatctaactttaaatgcaagtaattacaggttgatccataattaattaccaaattgtagtcatttcttgcctttatccattttaccttagctattgaagaaaatggagtttcgtaaagaaacaaaattacgaaaagtttgaaaattgagctgtatgctgacactaggaacatgtctcgttttatttacctgtatatgattttttttttgaatttttaactgcgaaatggattgtaaattcttgacataataacaactattctatatttctatatatttatatttctatccatatttcaccacatttcacatctgctaaaatttctttcaccgggtagctattgttcgaactaaagccgtaattactagtcaatgtgcaaagtgtggttttacacatgatccgctgcaaattaacaaataaaaaaattggtgtgttttaaacaattaaaatgagaaatttacacgtgattatggtccatatataactcgtatactaagataggccactaattttttttccctattattgagccggtcgaacatcagagttgtgtgattgctttgtatcttttttcttcgttttttacacatagtttgtgtacatactttacattagtatcccacggctaaaacccaaaaaaaaaaaacatatcccatgacagactcgcttgatagttgatagtaatcatcattcatcacttacaaaaagacaaaaatattcacaattttattacaaaatcaagaaagtgttgcttcctttaagagattaagaaaaaatttgaacaaaaaatagaggaaacagctataatgattataataataataaagtttaattagaaagctaaacaacaaggattagaacatagatttttacaattgcaaaaacaacaagaacaaagtcgtaccttgggacaactaaaacaagatgaccatctgatcttgcagttgcagctgcagcatgagctcttctttttattcagacacgacggtcgagtgcaactgcaactgcggaaacagctgggaatgcagcaagacatgtccggacaagaacaccagcaacctcggaagcatgaacagctcgggcagcttagtctcgggcaacaacaaatgtttgagcagcatgacccgtcacagcatttggaccctatacagctgcaagatgtacagttgcagcacttgggtttcctcagatggcacgaacatttggattggcagcaacagcagaaactcaccaggctcaaacatgggccactgcattgagttaattaattagtatcactttattcagatagctacacatatcagtaattctagcaaaatctaagattaaaagcattggctaaaaacatttcttactagttgaggtcttatgcaaattttatataaaattgcgaaaataaaatattttcaaaatataatgttccaatttaaatgcttaccagagccacttccagaaccggaaggatcttcgactttttcgttgtctatttatatgagaagacaaaaacagcacaacggaattgtaagagcgggcaaagtacgagaaaagtgtgaagtcattgagtgaactagaaatacgcttacgcagggatcaatgggtcagaatttgcaacaacaaaatcagagactctgccacaacaaaatatttcttttatcaataaaccaaactgataaaaactgatagaatgtttttaaaacactcactctttgatgcatctagatgccggttgtacgccttcgatgaatttaatttcgccctgatcataacgacattcgaaatattggttaagaaacatcatttcattaatcaaccaaattgtatttgcttggttaaaaaaagagaagatctaaattaagtagacactaatgggacaaaacaagaattgcatattaaactaaacatatacagtgtaaaaaataatttaattacaaccaattatatgcactatagaaaaagtaatcatagagggggaaatgagaaagcaacatgaggaaaaaggtgaccaagaattggtcctttcaaacgcagatagcaataaagacaaaagctttcacaaaaattgattgatatggcaaagcaaaacaaaacaaaatcagcaatggaagctaaccaaattcaatatattttttagatctttccctactttgcttctaatgcttttcttctttatctttatgtatttttccctttaatactctctttgactaagcactcactttcatagtacacatgcacgaacacattaggcctcagtgatgcaaacaactgagtaaatgggcgtctcatcggtcacttcacactacaacatgatcacattttttttttttacctttaacattttttttacttttttttttttatgtatccttaattttaaaacagaatgtaactactaacaatattctataacccaaaaaaaatcctgattaacgaaaagcataggaacccaattaatttagtttttaaagaatagatccgttgaaactccctcaactaacaaaaaaattactaagagaaatgattcaaattaattttcaattaagaaaacatgcattagtttaagtggttaaagcccttgttggcatatcatagtactagtttgaatttaattagatatagaaatagagaaatgtgtctgatgacagaaattaataattctttttgggagcatcaaagagaacaaatataaattaaatgtcttgggtttctataattgctgtcaaaacataacacaacggtccagagtccaaaccaacctggatatagtagggaccaagttttaacactcttttctcacaacaaccaaaaatcaaatagtactacaactggattatttagttatacaagagaggttaattagcattaattaatttactaatcagaaactaatactagtaccaattttttttgaaaaagagagagtaataataataaaaacaaaggagtgatgaaattcaaaatattgggacacttcctcagagtaatcaaaaatggcacagattttatgaataaaataagaatgaaaaggactgtttttaaaatagtagtagtagtagtaataaaataaaagtattgagagagagagacttgcctcgagaaaaccaatctctctctcgagcatctgaactctcgccgcctctctgcgtttcccgtacaaatctggatactctggtggagacttaggacgaggcggtggtagagacgacggagcaagagacgatgaactcactccaccagcagctgattcttttcctcctccttcgccaccgccagaaggagcagacattttcggagagaaatggtttggagtgtctcaagagagaaacatgcagtggtgttattacttaggagagaagtgaaccagaagaagagaagaggaagcggcgagtgagtgagaaaaacaatgcaaagaagaaagaaaaagagaaagagagagagatgagtgtgtagtagtagagaggaagagagagaggtgggtggcagaggaagtaattatagcatctgacaaggattattacttaccttcctctgccccttttaaggctccgtgtctctgttttttttaaaaccttaattatatttttaatctttaggctttttatttaaacaacaaaaaataattcttatttaatgcaactttttaaagacaataatgtttttttttttactaattcattaaatttacacagtatcttgattatgattttggatggtaaaacaatgagcacttaaaagtatctcaatagatgcaaaatggagttctcattattggttctcttaaaaaagagttgaaaaataaatcaaaatggattaaaagagagagagagctgtctcttttgagagagtttttgagagagatgagagacgatgatgtggtgccttatcattggttaattgtttttaacaaaaaaagcaaaaaaagcgtgaaagcttctcctgattctatcttgatcattgtttctaatcatgtcgatgttttgacttacattgcttggaaactctctaattttcaggtgaatcgagttcttggatctggtatactaatcttctcggttccgattcttaatcgcagatcatctcgatgttaatgctctagatgtaaaggtcagcttctatctaaattagggatttgtgtaataaagctgtgctttttttggttatagactgcgattaaggagtgattagcttgcttttatatggtttagtcattagtgtgataaaaatctatgcttctgttgtttaatactgcagctacagaagtgtcgaagagtttcacatagactttcatctcaactacttatggttttttgccttattcgttttcaggttatctttgtgtgaagaagttgcaggtttggtttgaaaaattgcagcttttaattttttgagttatagattgcaggttttggtgaactaatttgcatgttttggtttgagaaattgcaggtttctgcaaggtttggtttaagaatacgaagcagcactaccttctttccaataactgaaagatagtgaagatggaggttgagttgtaggtttcatgagttgcaagtgtttaatgagttacagttttttcttatcaatgatttgagactttgagtagttgcaggttttcaatttgagactttgaattcatgtatcaatattccagtttgttttctgcaatgtttcagccatatcttaacaaagtttaaaatcttgagatagttctttgtgaggcagaggaaattatttcaactcagatattatcagatgcaaagatgacaactaatctctccctagagaccgaccatatcatgattttattacactaattggttgtttaacaacaaaatcaactgaaattttcacactattacaacaatttcaacatcaaacatttcaacatttcaatttcaaaatcaatagaatttttttccctgagaactccacaaagagagattaccattggactttacaaaattaaaaaaaataacataagttctcatctcttcaaattcaaaattttattcttaaaaaaatggtgagaacccaatagagggctctcactattggagatgctctaatgatactataattctgattcgaaattgcataactcaagatatgttggaaaagctagtcacttttactatgtgcaagaatgagatagttaagtttcaaataatgttttagcttcaagttacatctacctagacatgttatacaggtaaaataaaataaacatgttatgtaggtaaataaaacaaaacaacagtttactatatgtttttataagaaaaaataactatatgatctcatatggaatctgaatctatttctcgattatttttgagtttttttttttaattttaaatcaaggcatatgcgcaaaaaaaaaaattgtatttgttatattatgataagaccggacaaaaaaattagaatgagagcaactccaatattttggatttgcacataaatgagaaagagagattgaagatgatagataacatttttgtctgtactattcatcaaattgtttatgctgtctatttaccaattaaatagtcatgatatgaactcaaattatggtaattttcacaaattcattcacacaaaaaattgccaagaaatttaaagaagcaacacctttgttgcattgataagagatattcaaatgttcgtatctcattttagctttagaaatgcccactcacaccaataattaatcaagttgccgtttattaaatcttaagcttttgaagacttttgtcacagaaatagatacttagcatctttgtcactaagcttttaaagtctttatcaaaaaaagattgacacttagcatcttcatctacataagtgttggatatatataaggattaagaggtcaggcacgagtgtgtatagacgtcatgggtgcgagaagcagccagactgtggatccagtgttgagccggagatactcatcggaatcagagacagtactagtggtgcgacgacgaccgcctatggtgaacggaggaggattcgtagtgagcaatagcaaacaagtagtagtatttagagttgatgggtgtggagttcttggaactaaaggcaaacttctcttgagaaatggtgatggtaatgatttgcttctcatccgcaaaatggtaaccaactttatgtttttgcttagtttagatcatttctgtttaattacaatgaaacgagtgcataatgttactcttatttggttaaagggaggaatagtgcaggcactgaacatggtacacaacaaatgggaaggttttggctatgacaatgaaggaacagagaggttagttttcaccttgaaagatccaaaagattcatgtcttgttcaaaacagttcaatcaaaatcttagttcacggtaaacccccgaagatatcatcaactcgcaacaactacgtagagatcaaaggctcttttgcagagagagcttgtaacatcatggattcagatggcaaagccatagctaaggtaataataaatcttacaatttctgacaaattgtgttgaaaaaaatggtcttaaagtcgtagaggatattgctaaataactgaaaacaggtgagaatagagaaagagatggaggaaatggtggggaataagaaggatctgtatcatgtaattgtcaaaccaaatgtggaccaatctttcatcgtcggtctcattgctatactcgactatattcatggcgaatctaccatctgctagatctacttatctctatctatgtcactgaatgtgataacattaaaccataccatgtaacaatggacattgcaagtgttgaaatttttgcttgtagctgaagaattctggctaaatcataagaattcagatttgcatatactcaagaaacacatttagattggattattttgttacaaagcaactaatcatacagaaacaaacaacaatacaaacatcaattatcaaacacaccttttttgagatttttccgattttgattttattatcaatcattatcaagcacatggacatggatcatccgtggcggtatcagcaccgccgtcatcagatctaaaaacagcgtatccggcggttaatccgacgacaatcgcgatgaaaacacctccgttgaaagacatagctgcaagcatcagcaagtaaccgatcgctgcgttgacgccgaaaagaagaaccgaagcagctttagcggcggatctggtaccggatttagggataagaggcgcggagacgccggaggaagagcgaggcggtggaggagcacgacgggaggaagaaagggatttgaattggatgcggcgattctcgaggtattgatagaaagcggagaagacgaagcaagcgattaaagtgaggatgtaactaagccatgagtcagttttccagaaatcgaagagaattgtggctttgattccccagtagaaggtcatgtgcatcatctttgcgagcttgatttgagctgctttgattggaagataaaacgatgaagctgttgggattgggaagaggtttggtttgttgaattattgattagaagatacgtttcttcgtgggctcacattatagtccagtgggcttacaataacacaaggcttcatatattttagtgcagctactgccgctaaaaagtcaaagtggtatttacgtaaataagtgcaatctaaggggcatttgtaatcaactcttcctttgttgtcaaaaaaaaaaaaaaaaatctcgtcttcgtcgtcatcatcatcaagctgattttttctatttgtcccattcaaattcaatagtgttaacctgattctggtaaaaacccttgctttatagcttttgacgactccaaccttggaacagatgttgtctctgtagacagtgagacctgtttctgtttccattaccagagttctgagtcgatccaaaatccggagacgatgaggaagcgtcatccaaaggcatcagatttaacagagccatcttcttcgagtaaagaaactgatgcttcttctgataaagatgctctcgataaggaagtgcaggctgatgttaaaagatcagggaaagtatggttgtcagtgttgattttgatcacttactcatcttggtttgtttacaattatcagcttgggaatttacctaaacccttaaccgcaaaacaagctggtaaaaggggtttctctgaaattgaagcaatcaaacatgttaaagctttgactcagtttggtcctcatcctgtttcttctgatgctcttgtccatgcccttgaggttttgtttctttttagttattttttccatttttttcttgatttgggtgtgtactcagaatttgttatttgttcgtctctgtagtatgtattggcagaagttgagaaagttaaagaaacagctcattgggaagttgatgtgaatgttgatttctttgaatccaaatttggtgtaaatcgtttggttggtggtctttttaaggggaagtcacttgtgtattctgatataagtcacattgtactaagaatcttgcctaaatatgaatcagacgctggagacaatgctattcttgtctcttctcacattgatactgtcttcacaacgtatgttgcttcatctcctatccgttgattttggattattgttcaccattttgctactatcaagtgtgtgtgttaaatttgtttgtgaatgtatgaagaggtggggctggagattgtagttcatgtgtagctgtaatgctggaactagctcgatctgcttcccaatcagctcatggattcaagaattcgattatattcttgttcaatactggagaggaagaaggtcttaatggcgctcatagctttataactcaggtatatatgatacactgaccttaatggctttgagtttgatgtgattccctctctctcttaactttgacttggtcggattgatcggattagatatcttaattcctcaacttatggtttctgattcacattgtgaattactgatgcagcatccatggagttccactgttcgtttagctattgatttagaggccatgggtacgggtggaaagtccagtatttttcaggtataatcttatgcactacctctcgttcatcacagtttttaatataaactataagagatacttagtaagaagtacaatgtcttttcatcatgtgagtttcccccttccttgtaaaacatcaaaaggaattggtatgaaaacaaattgcatgtgaagggtttttgtaatttttactcaattttggctatggtctttattcttttttttttgggagttaagttcttatactgaacgtaattactattgtttggtgccttgtacgtgaaagaggaacccggttttcaaattgtttctctttactccaagtgtgaattccgaccttctgattgttgttatcttcccggtataggctggcccgagtccgtgggctattgagaattttgctttagccgcaaaatatccatctggtcaaatcatcggacaggtatgtactttcaactgatgtttctttcccctcttactggtatatacagtatctatatgtcaatgctaatgctttactatgacaggatctgttcacttctggaatcataaaatctgcgactgatttccaagtatacaaggaggttgctggtctatcagggttggactttgcttttgcagataatactgctgtctatcacactaaggtttttcccttttttgttttacatgatgttcttcacttcttcttgttttgatcccagtttagatgtctaatatgtcattgcttgcgtcgcagaacgataagatagaactaataaaaccaggatcgctccagcatcttggggaaaatatgcttgctttcctccttcgggttgcttcatcttctgatctgccaaaggataaaacgctccagggagaggaaagatccaacccggactcagctgtctattttgacgttttggtgattacagaactaactctgttgttataatctattaagatatgtacttacatagctttttctttgtcatgtcctaatggcgctcctttatttctatgtcaatttttaggggaagtatatgattgtataccggcaaagtttggcgacgatgctatatgtttcagtgatcatgcaatcgattcttatatgggttttgtctgtgttcatgggtggttatccggctgttgtgtcgctgattttgtcgtgtttgagtattatcctctcatggatattctcagtagctttctcggtagctgttgcattcatattgccatggatttcctcgtcacctgtgccgtttgcttctaacccatggatggtagttggattgtttgtgtcgcctgcgattttggggtcaataagtggtcagcatgtggcctttattttccttcgaaagaaatcttcgaacagaaattcaaacaaaatgcaagtctcaccaagactacgagataatttggccaggctggaggctgaaagatggctatttaaatctggttttatacagtggcttgttcttctggccttgggaacctattataaacttggatcgacttacctcgctctggtttggctagttcctcctgcatttgcatgtaaggctatcttttctttgtttgatataatgagggatattacttttactgatcaggctaaccacattcattgaagacgttgaaagagtatataccctttagagctatcctaagtttaacttaatcaaacctaatggttgtccagatggattgctcgaggcaactttatctccaatccgactgccaaagcccctcaaacttgcaactctgcttatcagcctggctgtaccaattttggtttcatctggcagttttatccagttgacaggcacaatgatcggcatgctcattcgatttgacaggtaaactgataggcactatattgtgagatgcttgatacatatggataaacaataaataataatataaataggtaggagtctttttgatcattgggacttgggagccttaggaatttgggagatattaggaactctaaaacaaacaataactgatcaattcacctaaattggttctccatgttcttcctttgaaaaataaagacagttctgctttctgttcctatcataaacaggctaaattcttgcctaaacttagaaagtgaaataaaatgtgcatactatgttggagcagggttgaaataaatccatggagcggtaattagtttttagctcgcagctgtccaagtaaacatggcgactaaagaaaaaaagtcagaatgcggttgctgctatgggaattaatagttctgtgaatctctttcttatttagcattcaacaaaccttatattgtagctgttgtttttggtatttttgtgtgtagtaacccaggagtaactccagaatggctaggcagtgcattgatcgctgttgctattgctactttcataagtctgtccatggtatacctgctggcctatattcatctctccggtaatgctctactccaaaactttgttatggaacctatcacaataattacaaactttaggttgattaagcataataattcctgccaaacttgtggtctccaggtgcaaaaaagtcgattgtcacagcattatgcattatcactgccctctctcttgctcttgtatcttctggtgttcttcctgcatttactgaggatactgcaagagcagtaaatgtatgcccctttgattctcgttccagtggatttattttattttatttctgttgtgttgctacttttaagttattcaaacattatgggactcagcgtttcgatatatggttgtacacatgtaggtagtacatgttgtggatacaagcgggcaagatcaagtggcgtttatatcactattctcaaacactcctggaaacctaaacatggaagcagagcaaatcaaagaagggttcagatgtggtagagagaataagattgattttgtcagttttgaagctaaatacaattgtgtgaccaagaaggacgcagaggttggatgggacaaacacgatattccagttctgcgtgtcataaacgacaaagaaagagaagggggaagagtcatagcggtttcaatggacacaggaggctcatcgcgctggacacttcgcattgacatggatgaaatagaagactttacaatgcaagtaggtgaggaggaagaagaagagttgatgatagaacgaggcgagaaaagcagcaatgaagaaggatggcatcaaattcaattcgcaggtgggaaaaaggcaccaactagctttgttctcaaactttacaaggaggaagaagtatctgatgataagaagaagcaaagacctctcttgaaactcagaactgacttgaaccgtcgcactccacaagtccaaagggttctcgaaagacttcctccattttgcacaatgtttggcaaatccacttctccttttactctcgcctttcttgcttctcttccttacaccaaataaaacttctccactcacttggctttttgctaacgcattttgtaataaagtctttttatgttgttgacatcaaaagcacgagttaaagtccctgagagtaaatgaaacataagcagatgaataaagagaacgtaaacgaccaaatattctcatttctcaaactcatagatgatttccgataattatacctgaaaattcaaattagcatttgtgttactaactttatttttttatttttttattttttttggtaaaattgtgttactaacttactatactaaaagttcgtcaaatcctatagtttgatcgttacatactctaagtaagagatgctattttatggaacatggtaggtacagatcttggtgggtatactcaaagatattcgtgaaaggagctcgagatatttttaacaaaagcaacaaaaattgaccataaaattaaggaaaaagaaacaagaaaaaaacatggaattgtctttatttttataagaaaattaagagacaaatagagaacaaaatgacaggttagagagtgtataggacaagtgggcaacaaagtgaagaggaaggaccccattacgccacacaaatagggaagtgatgtgaaaacataacaaatgaacatttgtgtctccttatcataccaaagctggacatatccgcatgtgccatgcattcatatatacgctcatatgtgtttacaaaattggatctaagagactactaggtgttaggctaatcttagggctaacaaatactgcaaatctatatggtagtgatacgaaaaatggtttctggtctactgatatttttcaattgtctagtgaccggtcatgtggcatatattccgttaaaaaaaaaaaatcattagcaagcatttttctgagtacacacattgagaacagaagtacaattcactagacaacatctcatgtaatcatctcttttgatgatatataatatatgattaagggataattgtgacatatatatagttcaaaattgatgaattcaagttgcatgaaaaaacaaggtattaacaagttgtttcagcttaaaactcatcttaaaagaataaattatatggttttagagctctaccactaggtccactagataactagaatatccacttttaactataatggaatttaattcaaatcttttatcagaatcataagttctagaaataattatgcactattactggagttcatgaatatgcatgggtaaaccttaaagtttgaaacccttttatgtccatttgtttggggtttttttggttttttttttgaactttgtgtgtatacagtatatgcaatttatgtataggttatcttaagtacccaataatataagtggcatgcatgattaatgatgcatgcaaataacaaaaactgtagtggttttctctctcagaattaatatccattacataagtcgcttcagtttccagtgtttatcattaacccacactgcttcaattttcagcgccctccttttctttcgggaaactaaccatatattgggtttaatttggctttgatggagttttagccaatttttagttatagtttgttgtgttggatcaaaacaatatttggttatgatcagaaataaacttcgaccggacagacaatttgatttgcggtttaaccatgtacatcggctgaatttggccgagttgcatcaattatttgtaaccaagtcatatcaactttattaaccttaaaaccaaaaaacaaatcagatcaactagtcaaactcaatcggatcaaatgggacatattatatgacctagcttcgacagttgagatatgaaatcagaagaatcttttttactatgatgattaagcaaaagaaagtttcttgatatttaaaagtcggtaagatttcgagtttatatatctaaatataagcattgcgtcactaattttatcaatctaaactaatttttctttaattgtcaacaacatgcacatcctaccgaatttgaacgagatcaatgttttacagatttgtttgttttatcttctcttcattagctacttgagtttttatatttcttaaccctaatatacaattaattacagtagattatctttgtaaaagcatttcaaattaataaaaaataatagagattaagcaacccaaattaaagaataaagaacacagaacatgagctttactcattttattttattttgaactgatgagctttgctcatttttacaccatttgattaactcaaatatgaagaaaggctaacgtcataggaaacttaatcctcggattccaactctttcttcaccttctaaaatgatgcaaataatcttaaaccaaaaaagtaaaaaacaaatttacaaaaactaacaagattattgatcaagcagagagagacgggaaacaactcccagatcggagaagcgaccgtcgtgactctacgccgtcgatccccggcaaagctccactcgagcttgtcctcgtattggttctccgtggagagccatcaagactccgccgtagaatcctaccaatgacggatatcggatcttcctcttcatcgggactccaagaacggaaacggtggcaaaacgtcgtgtgacggcggagagcctcctcgacggagatacgagtggaagatcgaaccacctcgtcttttaccgcttccgcacaaagcccacaaagccagtgtcccttatgccgttctttgacacggttgatgtaagctggcgtacactcttcagcgaaaccgcacgtgtcgcacgtgacagactccaccgccggcaacgaagacgatggctttgtgttagtatcggtggctgacgatgatgatgatgatgacatgatttgttttgtggaaaatgagattgagagactaataaaattttctgttacgagtctctggctttaaggttatatcatatacagatacaggtggtttttattggatgtatatatagatcatacatggagacatatgtctctgttttttttttttttttttgagaaaattattattatttgtatgttaaataatgtgaggttggaggaggatttggcttcatgtgagtgagataatgtggcgagaaaccttttgtttgtttcttgaaattatgcatgtgggtgtggatggataattattgaattttgttttgagtaagtcataaattcataaaataattatgcaatcttgctgttaaatatattcattttttcactcgactctattaatctaaacttgtatatactgtattcagttaatattttgtcatatctttgtaatttgttgagtctatattcttataagattctctttgtactcgtatagtaataactgaaagagagagatagtaataagcatattaaaatggaatcaataagaatgagcaaatagtgcaacttgttgtggcaacaagtgaaactttttgaactcattgtgaggcgaagaggtagttaaagagtagcatttgttacttgctaatggccaatgactcgacttagttgatcagtgataagtataatggcagttatatggttgcttgaaagttgaagcaatatgtatattgagaatgataaaatgtggacctgaaattgaggttatccgtcgtaggatcgatgtgaatgtaaaacggatgaaaaaaaaagatttgtggttacataaaaagaagtgaggtggtccatgttttctcaatggcaatagttgagaaggtacctagtccttgaagcaatactcgattggtgaagtatgaatttggttaacatccaattgggtgtattaaccagatttccaagtctgtaaatgaaaaatcgatatactaatgggatacagtaataatttcatagaggctaaaagatcttgattgtttgttgcgctaatcgttgcgtctatatatgtttaaatcttgtgtatatttgttcttaattaatttgaaggaattttttttttcaattataaacatatactagattttgacccgcggtatgctaggtttttaataaaatttgttatataaaatgtatatgtagatatttgttttattaatattgtttactttgtttagtgtttaagataatgtatatatagattttaattgttatatttaggatttcacccgtagtatatcgtttcgtattactatcgatctaaacccgtcataccatctaatacagcacaatgaaattaaacatatctaatggatttcacttgtgttataccacaattaatactgcatagtgaaattaaacgatatatgtccttggccaatttaattagaaatctcacgatttcgtctcccattcgttctcttttcttatctttctcaaaactcttttgctcttttcactttagtaaatgctttcttttcttttactattttattagtaattactagctaatccatgaagtccttagtagcaaattcaaccaattaataccaaaatgtttctatgaagtcgatgcttctttggcctcattatacctcatgatatatttgttatcatattctcttcagctttgctttatctataaaaaaaactcatgatatatttttctttcctgattagatatatctctggtcttaaaatatataatgaaaaaaaaaaaaaaaactggatagatatgaacataaaaatgtaatattgtatatgtatgccacgttgtaagaatctattagattatgacaatataagtattatgtaacctatatagccccaacatgcaacaataatcaaaagaacaaaccattatttcttatcaacgttgatcaagtcaagcaaagaggtttgctacgtttggctgactctagacgagagtctaaccaaatcagaagctttgacttgtaggatttagttgaagacaagcacctaacaagctcgtgcactgtaatggcaatattgtagttttcgttacgagtatgatgtgttggttatataagtcgatttaactctaaatactttgggagtgagatcagatataagttttcggtgagattcgatcgataacatgtatacagtatgtaaaattttcaaatatgtttgaatgtgaacaaatatgacgactttatgaaacaaaagatagatgttaagaaacaaagatacaaacaaatgatatatattcgaggattaaagtaacataatgttgaagcaatgaacttcatgaagaaagctggaactggaagctgaaccgggataaacatgtgattgctggactaattaaaatgtttttgttaagaagtttttttcacctaatagaagactgatacatttgatggatattagggtttataattaatttcgaattaaggatttcgttttgttatggagtccatgcatatgataaaaaaaacataaaaaatgttaagagtttaattttgttagaaagatacataattcgataaattagacgtctacattaaaaataacatcttacggattctcaaaatatttactttgtcccataatgttgtttaaataattagccatccattaatcgtcatttgtttgatatatcatccacttttttgcgatttaccaagaaaaggcagttgatttgatgttcaatcacagatttatactacagtactaattacgttttagaatcgttttcataattaaacaaggacgatgataaccagtcataaatagttacgttttcgaatcgttttcttaaagaagcaacatgttctttgtctctatcgctctcacatatgtttctctatatatgttggtacaacaaatacaaaataattgagtagtacgatttgcaatttttagttatagaattactatgatccttcaatacaattacaaatgtaatatatcaattatgtgtaatgtggtaccaaaatcgactaacaacagctggcgtgattttgtcttcaacatgaatgatagctaaactctttgagtatcttcttgtttattataagaacactcacttattagttttatgatttctttctaatctcgaccgttaacacacacattttatttttcttacctactttcggcaaatattgtggtctttttggcatatatacacatacatgtattgatgtataacaaaaagaaagaaagaaagaaaaatattggcaccatgtgatatccagatcattcaagtgttcacaaaattctggggtgagcatatttttcagaattttatattctaataaatcagtagataaaaaattatatcgaatgattcgacgtaattatttgcacactacagagatctgaaatataaaaagatctaccaatccggattttacgtaattagatttgcagtacaaaatatttgtactaacaaacttcacaaacttgaatattctatacaaaaaaaattaaaggaaaaaaatcattcaaaaatcattttttttttggttattaaatcatttttacttgacaaaaacaaatgaaatatttatactatatcagtgggagaaaaatcttaaccagcccccatcaataaaaaaaacctgacttttgaattgtaatatatctgatcttatattccaaatagtgtagaaaagaagatttaagtgaatatgtgttttttggtgtttttaggagcatttgtttaatttttgatgagttctgttttctagaaatttatgggttcgagagtcggagagtgttaattgggccctgttgggccattttgagaggtccatgcatgcatatatggtaagcaacttacatgccttgtgacttttttttttttttaaatgcattgtgactttgtgagtgggtaatgttggaatgttacactaattaggattaagttagtaaaaactaaaactttattcctctatcccatttatttgcgttctcattccttttcacaatctaatcaaacctctatttaatcaggttttgaatatattgtttcccccgatttttaatttggtttatgttctatagtaagagatcaaatttggcagagtatgcaaatgtcatagaaaaaattgatgtcaaaggaaaaatattaaaattgtttaaatcatattggtgttagtttttttttgggtctaacattttaaattgaagttattttagtttccatctacaacgattatttctaaaaaataaacgacccaagttcaaagcaaattacacaaatcattaaaataagattccagggccaacaagtgattaggggtcatcatatcattcaaagccttgtttttttgttctctcccaaatttatttgaatttgacatttgatttgatttctcgaacgtagtgatttcctccgtacggcgtctccggtgaatcgaatttcatcatcgccgacatccctaaaagagtgtctatctattgattcactttcttcccaaattcttgttccctcgaattgattgacgaggaagagatttgtatttgatctgatatctcagattccaggtatgttcataatcatttcgatacaccgtttcgatctgatctatttagttgtcggcttttatcgtggcagaaatatgaaaaatgggtaatgttatgagactttccttaattagtacgattgaggaaatggttttagttgcgttgagatttgaattagggttcgtattgggaatcaaaaacctttccgattctgcaatattgcctcagtgtctaaaactgtgatttgattgtagtgaatttatcaattcaagtaatgcgatgcgtgtgggtttctttttgtttttaccagttttagttctaatgatggaacagtgttttggtaggtggagatgttaatttagctaattgtgtatatgatttgcccatcaatttcactcttaaaaaatgaaaacttttttgtgtcttaatccatgttcctcttgtgataggatcagtgtttaggatttttttttggtcattaaaggtaagattgaaaggtcaccaataatcttatgtgattaggcaaggaatctactcctaaatgtgttgatcaactaattgttgtgaaaggatcacactgaacctcgagctagctggacatatgccttgatctagtatgaacgaaactttctctgcaacgccaagaagcatgaccatccatagatataggtagaaatctcctagttgattgattgtagatttttttttgctgacatgtgtatgcagtctaagctaataagacaggtattttgttggatgatgtgatcgtatctgtttaggagaatcgaaggctgccctctctagttttcatcatctttttttttttttgtaatctattattcagtttgacagaaagatgtcttacagctgttttattggaatttgtataggatgaaaagaggagcccttagacgaagggctagggatatctctgttatgcttgttgtacttgtttgtgcaactgtagtcatatggacatgggatagaactccaacctcggcctttcttccacctgaaagtcactatctaaagctgcaatcaggtttaactatgacattaagctctctttctggcaacattttgttaggccgtttgaatactggaacaatactatagagactttgtttaatttttaaattcattctgtacttgacagcgaaatgtgtcacttctagtttctgctgtttatatttctcaggtcttgaattgttttttgtccaaaagtttcaatattttttctttcacttgttgtttctcctgtttatgtttcacaaattactgtagatgtttatgaaaccaattgtacaattatattctggggtacatctgacctagttctttctcatttgcagaagaaaaggttgagaaattacctactgcgctgaatactgaaactaaagacagctactcatcagctattccatttgtaaacaaaggtattgttcaatgcatttacagaagctctttcacgcatcttgtaagctgctcaaaagtattttatgcaccctgtctgttgtattctgaattccgggaactacgcttggcataaaaatcctccttttcctggcttttctatgacagaggaaagcaaagaggattcatccgataataaagatacagaagaagaagaggagaaacaagtggaagaagttactgtaagtaatacgaatcgagggaagataccaacgattgaagaaaaaaagggggaacatgaagttattgcaagtgagccaaaatatcggaagacgccaactagagaagattttaaattagaaaaggtgaaacatgaggttgctgttggtgagggcgaagctacggagacaacacatattaaagagactaattcagatccaaagagtaatattcttgcaacagacgaagagaggactgatggtacttcaacagctcgcatcacgaatcaaggtagagaatctttgtttcacagatcccagttttatgatgcgtgaaagtatcttaggagtgttcattattctgaaactggacatactttgtatctcggtgaaactattagttgaaaatctctaccccgtattgctgttattttagtatgattccctcctatttgaaataacatgttgttttatatttttttcccctagcttgcaattatgcgaaagggaaatgggttgtggacaatcaccgtcctttgtattcaggatctcaatgcaaacagtggcttgcttcaatgtgggcatgcaggttgatgcaacgtacagactttgcctttgaaagtttaagatggcaacctaaagattgctctatggaagaatttgagggttccaagttcttgagaaggtaaacagaaaaattcctatatttcattccaacttatgcatgtgttaatccatagacgttgtcaaatattcccatcaagtccttagtaacagtgcgtggctctattttacaaattccctcaggatgaagaacaaaaccctagcctttgttggagactcgttgggaagacaacagtttcagtctatgatgtgtatgatctcgggaggcaaagagagactcgatgtccttgatgtgggaccagaatttgggttcataactcccgaaggtggagctcgtcctggtggttgggcttacagattcccagaaactaacacaacggtcctataccactggtcatctacactgtgcgacatagaaccgctcaacatcactgaccccgcaactgaacacgctatgcatcttgatcgcccaccagcgtttttacgccaataccttcaaaagatcgacgtattggtaatgaacacaggtcaccattggaaccgcgggaagctcaacgggaacaaatgggtgatgcatgttaatggcgttcccaacactaacaggaagttagctgctcttgggaacgccaagaatttcacaatccacagcacagttagttgggttaactcacaactccctctccatcccggtctcaaggcattctacagaagcctttcaccgagacatttcgtgggtggggaatggaacaccggagggagctgcaataacacaaccccaatgtctatcgggaaagaagttttgcaagaggagtcaagcgactacagcgcgggtcgtgcagtgaaaggtacaggggttaagcttttagacataacagccttatctcatattagagacgaaggtcacatatcacggttcagtatctcggcttcacggggagttcaggattgcctccattggtgcttgcccggtgttcctgatacgtggaatgaaatcctttttgcaatgatctaagttttcaagttacagctgttgcatcaatcaacagaaaagttcagagaaagggcttgagccaaatcaaagccagcctttgatagctttctacaacacacattgaagttttagcggcaggaggtgtaagttagtatttattttggtacaaaaccaaagctctgggtatcatagacgtattgtcgttatcgtaaccataccggggtttggtttcgaccatattttacagaacagattctaactcttggaatttgtctttgatcgattaaaagaaaattttagagttacttctaaatagttcatgtgttatcgtttggattctgcctaagcactaagcatttttccttaaaagcatgaatttgatgctgcctaaatgtgcgcaaataacccgagacatatgaatcgactggaaacctattcgatttgtccgaattttaagatactaattatttcagtttctataacagtgatgagacatttacctgttgaaaaagaaatagatagagatgcaaatgtataagattaaacttcaagatccttatcaaaaaattctcaaagctctcagaaacaagcaaataggattacaaaaattataacaaaaacactatttttggcttaaaaaaaagtctaaactttgacaactaattcaatcaaagaaaaaatgccaccctttccttctcaaccttcacaaacagacaatgtccaaagtttggaacaacaaacacaatctaaacaaaaccacacctttcaacaaactatagagcatcatcatcattatcaaaaacattgtccttgttttaagacgtaacatcccaacaagaacaagaaaaagaaaaagagcatctcctctcttcaatccatggctgctgctgttctgaatcccggtttctttctcctcatcctcctcttatctttctcaatctccccttctttgcagtatgtgagcgagtccgaaccgcttgtgcggttcaaaaactcggtgaagataaccaaaggggacctaaattcatggagagaagggacagatccttgcagtgggaaatggtttgggatctattgccaaaagggtctaacagtctcaggcattcacgtcacacgtctaggtctctcaggaaccatcaccgtggatgatttaaaggatctcccaaatctaaagacgatcaggcttgacaacaacctcctctccggtcctctcccgcatttctttaaactccgtggcctaaaatctctcatgctctctaacaacagcttctccggagagatccgtgacgattttttcaaggacatgtcaaagctcaagcgactatttcttgatcataacaagttcgagggaagtatcccttcctccattacgcagctccctcaactcgaggagcttcacatgcaaagtaataacctcaccggagagatacctccagagtttggcagcatgaagaaccttaaagtcctcgacctctcaaccaacagcctcgatggaatcgtcccgcaaagcattgcggataagaaaaatctcgctgttaatttgacagagaacgaatacttgtgcgggccggtggtggacgttggatgtgagaatattgagctaaacgatccgcaagaaggacaacccccgtcgaaaccatcctcctcggtaccagaaacctcgaacaaggccgcaataaacgcaatcatggtgtcgatatcgcttcttctcctgttctttattattgttggcgttataaagaggcgaaataagaagaagaaccctgactttagaatgctcgccaacaaccgtgaaaacgatgttgtggaagtcaggatatccgagtcttcatccacgaccgccaaaaggtctacagattcaagcaggaagcgcggtgggcactcggatgacggttccaccaagaaaggtgtgtcgaatattggtaaaggtggtaacggaggaggaggaggagctctaggcggtggtatgggtgacattattatggtgaataccgacaaaggttccttcggtttacccgatctgatgaaggctgcagccgaggtgcttggcaacggtagccttagatcagcttacaaggcggtgatgaccactggattatccgttgtggtgaaaaggattagggatatgaatcaacttgcacgtgaacctttcgatgtcgagatgagacgattcgggaaactccgccaccctaacattttgacccctttagcctatcactaccgccgcgaagagaagcttgtagtctccgaatacatgcctaaaagcagcttgctttacgttttacatggtaaccgaaatgcttctttaatttgttcctttttataagacctctcaaaagcaaatttcttgccagttaaaacattttaggaaacctttaataatctttggtattttttttttctcaaggagatcgtgggatataccattccgagctaacttgggcaacaagattgaagatcatccaaggagtggctcacggaatgaagttcttgcacgaggagtttgcgtcttatgatctaccacacggtaacctcaaatccagcaatgttctcctcagcgagacctacgagcctttgatcagtgattacgcattcttaccgcttctccaaccaagcaacgcatcgcaagcattgtttgctttcaagactcccgagttcgcgcagacacaacaggtctcgcataaatcagacgtctactgcctcggaattataattctagagatcttgacggggaaattcccttctcaatacttaaacaacggtaaaggcgggacggatatagtacaatgggtacaatcttcggttgcggagcaaaaagaagaagaacttatcgatccggagatagtaaacaatactgaatcaatgcgacagatggtggaattgttgcgggttggggctgcttgtatcgcaagtaatccagatgagagattagacatgagggaagctgttagaaggatagaacaagtaaaaacttgaagtggtgtttagaaagcatgcaatcacggttggaacaatcaaactctaaagagaagaaagaaacctttggattaatccgtagatgtaatactactaacgacaaagctaagtgtgaaacaaggacgaaaaaattgggcacgtatataggaaaatggtttgtatttcttgggagggcttctataattcttttgtggttggagtgatctatctttgcaatgaaatttaaaaaaaaaaaaaaaaaaaaaaaaaaaaacttttccgttccataagaaatgcacaactgttcacaagaaagatacaaatattttcacttttttttacttttcttaattcttctcgttttctcagtcaaaagaataaggttaaatgtaaacacttattttcttcaaggaaaatcgaaaactgttattttaacactaaccattatattttgggaaatatcgaatttaaaaatgcatgcaaaagattcgaaagtaccaaccagtggtaaagtcttttcactgttattcttttcatttgaatttttgactttgaaacgcattcttctaattgagtatttagtttagtggtattttttaaaaaaggatagttcacatgtagctacgttgtcttctatatgatataataaacttcttcagatttcatatatatccctgaatctaagtcttaaccatcaaaagcttacaatttaaacacaagcaacccattgtgtaaggagatttataaagagcgacatattaatggaccccaaaagcttgagtattgggtaggagactcgattcgaatacgaacaaagacatattaaaattttgcatgcaagtcaattttaatgaaaggaccacaaagaaattaggttttgtcttcttcttcctatatacttaagtttaattataattaattaataattgagacttttatggtaggccccaaccactcagcaatgatgtccctcttttgggcttattctcagtgctggcttcttccgtataggtcaatattattttattacgattatttttatatttttcgtatctttcacaaactgattgatgaataaaccacacacaaaccaacacggcaataaccattttaatgctttatatacaaatacaatacttctacatcataattatgctcaaatcgcacgtataatattcgaattcttaaaacaattttcaccgctccattgttgttgctaatattcgcttcaattatttgatctgatgcttgttggagcagttttatattcacctttgaaaacatccattaaaagaacggacacaataaaaaggaaaagccatattttaaactgacaaaattattttaatatgttaattatcataaagtacagaaaaaaaaacaagaaccaaaaaaaaaaaaagagagcattattctatttttcgccatgcttaacgatcaagaattttagctctctctactttcattttccccctcatcaaaatttctcgatgttgtttcgtttccaccataatatggacatacatgtcttagtatatatatatatgctaatttatttctctgccccgattatttatgcctaattattttatttacccccaatcccccatatatatatatataaactcatcagtagaagaactccggctaagtcactagaactccggtggagaaaatttggccggcggtgtaaggagaggttgagaattttgatctacatctctctttcctttcatcatttgctatatgactcgatcgacactctgtgctgcaaaatgctttttctcctctgcatataaaaagcaataagcaatcgaaagatacgaccatagtataaaaatacttatatatatgctcccaagttatacctgtaaataaatatgtcttgaccatgaagtttcttcctgcacaagtaacatgaattgaggaaacccaaaccctgaaactctggcgaattctctggagattccgtaacgacatcgaccacgaaaagtctttcccgacgatcatcgttgatcttacttgagaaacactcaaacccatctttgtcataaacccttgtattacaagatccacttggtccatggtggcatgtcaccaacgtgtaatcctcctcgtccattatgaacatctcctcgtcttctccgtccgtgcttccaccatggctcatgaactgaaccggatcagaccggccgggttggttcggttccgatctacaaacgctcgtgattcgacgagtgtttgagttctcgagcgcggctacaatccctagaccaacagagccaccaagattgtcatcgtagaatctctttgagctgtttctttgagatatctgagggagaatcttgaaatccagtgggcttttagggctcgtcatcaagacgtcgaagaaaggagccgccgtggatcggttgacaccgacgaggagctccgatatctttccgatcatgggatgggttcttttagtaagcatgatcttgagagagcagagttttgatgatcagattaaatcgaaaaaacaaaaacaaaaagaagaaacataaaagaagaagaagagagaagattggtggtgtttgtaaacctccacagagaagagaagagatgggagagagatgtgttatttatggtggagttggtgggagagttgagttgagaaccctttacactactttttatttattgcggtatttacaaaaaatcacgtgaactattcttatttcacgaataaaacccttactgtttatcttcaaaactaaactaaaccatagaatatctaaatgacgtaacatgccacgaagcgtgtgaagctaattcaaatcgaaatcttttggattttttttattatgaacgtctagagagagagagtaggagtagaatagctgatcccaggttattatccaaggaaaaacagaagagagaaatatataaatttggtctaatcagtagtgtcttgatctattaattgaatgtagtacgtatgtaagtatattataagtacatgagtaagtcgtcaattatagttatgaagattgtcaaaatactaaagctaattgacgcaaatatgatttggtacttctttatacaaataatagtgtgggtgacacggtgttaaactgttagactgttagtactgtacattatattaatctaggttaattatttctttagtcataactcatggggcaaataatagctctctattcataaaaataaaattatgtacatgaggcaaataatagctctttagtcataaatctatgttactaataagaaaacataaattgttataaaaatatggagatgaattcatatgtgaaaaacaaatcatactaatagggctataccacaaacgctacgagaggatagcttttggtttcgaaattaacttttacagcgttataaagttagtttcaaatgcatgcaaatgatgcgaatatgcaatcacaatcatccatccacaaacgctatacccaaaaaaaaaaaaagaaaaaaaaatcatgcaaccacaaagatatattaacgttttgtgagcagtaatgtctaaaccaaacgcaaccatctgtatttgcccaaacttgtacataacagcaacacatgcatgttttcttagttattcaataaattaaacaaatatttagttgagtgttatatgtataagctgaattgacataaaccctaaacaatgcttataatgatttagatttgaaagatttgtttttgtaagaaaatcaaataaaagattttaaaatactgacataaaaacaataataagagagatattaaaacgaatatgaaggtgaggtgccaataaaagagtggtccacaaagagacaactaatttactttaaaaaatacaaaccaaaacaccaaaaaagtcgagatcgacaatgtggccaatggatcccacaggctaaattaaagaggattcgttgagcactttcatgagatgtggatacgtggcattcatcaacagctacattgtaccctccactattatttttctgactcggatttctgttttacattactattatttccttttttatatggtcccattcccctactaagatccccctatatgtattttcgcagaattatataggaaactaaaaagaaaatttaaattgttctacaaccaaaacaatccgtcaaaatcataaaatgaattccatcaaatgaaatacaaagtttgtttaatgaaaaatttatatttgagctctaggtaaaaatgactcacaattttaatcagttgagtgtttaggaaattataatagtcttcacacattttaaaacaacttaccctattttgattttcaaaaagggaaatagtgaaactcttagaactaaaagttgggagacaaagatggtttggtctaatctaaaaccaagcactaggatttgattgaaagtttaaattcccaaaatttggatccttaaccgattctcctcccggtttatcgatatcgagttatttttctatatccggattacagatctctttttccacaattttctatatccttttctttgcatagcaaaaaataaaaaaaaaaaaaaaaaaaaaatcatttttatcatatagaatccttataatgagtgtggcatgctcatgctttgaataattaacgaccatgttgttataagtgaatgatgagttcacttactttctcttacgtacgacattttatcattaaaaatagtttaactttcttgcaaactttatttgttctctgccattttgttaataaattttccaaaaagtattattaccagcctatcgtttttgtgtcaaattttttaccaacggtataattttttcttacctgtttttaaacaaacaaaataatctaactaatgtgatcgattagcacataattttccaaaccatttttttgtcgaacattatccattataattttgtcgaacaaaaaaactcttctttctcatccctaattaattgttcgacgaacataatccaaaagtgttttgcctagtcaatcctttatccaaaaaaataattaaaaaataacctagtcaattactggaaaagaagaagatatcctaatcaaatcctataaactctgaaaatctataattagataaattatttaatttcattttttcctacaacctattcaaatcctaaaacgctaaatacttaagatagtagataactcctaagttaaatctatatatataatgagaaactaaaatcattttccaccgttccatacaagtgaaaaatatacatataaatatagttcattaaaaacacacaaactctatccgacagttttctgcataaatattcaatgcaaaatttaaatgttatcttctattcttcttagtttataaaaccaaataatgtacatttttttattgaaaagaagtaccagtagttttatccaaaaaaaaagtaccgataatgatgtccgaatttgaattattattgattattgaaatgatagatttaaatcctaaatactgtataaacgtttttctaatacattttcttaaagcaactccattggtttataatcaattggttcttaattttcattcttaaccttgttttatattaaaatgttgtttttacaaagttaataaaagttataaaaaaaacttaacttatttctactccaatggttaagaactattgggttcttaaaaaacaacttggatgattactcaatacacaacacatgtcctcttcttagttttaagaaaacatcttaattaagatataaatcttagagatttgttgtttgcattatatttaatcaatttaataggtaaaaattagctaagaattatctaagaaccaaagttggaattgttcttatctcaattatctagtcaatcctaaaattagatttaattaagatattgaacagacagatctaaaaaatcgtaggttattgttccatcaaaactactataaaaatagttcatcttaaacccttcaaaagcacttgttttctaccgtagaaactcaacactaagctatgaaaatgaaacacttcactcgtctcttatcattgttcttcatcctcattacttcattatctttggctaaatcaaccattgtctctcatgatgaacgagccatcacaattaatggaaaacgccggatcctactttcaggctccattcattacccacgaagcactgctgatgtaaccattaatgacttaacacatcactttcatatgtttttttcatccattttcatgttttagtggcttttggttgcagatgtggcctgatctgatcaacaaagccaaagatggtggcttagatgcaatcgagacgtacgttttttggaacgcacatgaaccaaaacgtagggaatacgatttctcggggaatctcgatgttgttcgttttatcaaaaccattcaagacgcaggtctctactccgttcttcgcatcggaccttatgtttgcgcagaatggaattatggaggctttcccgtgtggctgcacaatatgcccaacatgaaattcagaacagttaaccctagtttcatggtataaccaaaactttgatttgacaaatcttgctactgtcagattcttgaatttcttcaaatgtttgcttgaaatatctttatggcagaatgaaatgcaaaatttcactacaaagatagtgaagatgatgaaggaagagaagctctttgcttcacaaggcggtccaattatcctagctcaggtatgtattttatcattatggaggatgttatgggcatcctttatcccccggactggcccattgggctcagaatcagcctttgacgactatatatgtcatatacatcaaaaacgttttattgatcatattttttcctctatattggtataaaccggttttttttttttttttttttttaacttgttcctccatattttagatcgagaatgaatacgggaatgtgatctcgtcgtatggagcagagggtaaggcctacattgattggtgtgccaacatggccaactctctagacattggtgttccatggcttatgtgccaacaaccaaacgctcctcagcctatgctcgagacgtgcaatggattctactgtgaccagtacgaaccaaccaacccgagcaccccaaagatgtggacagagaattggaccggctggttcaagaattggggaggcaaacatccttacagaaccgctgaggatcttgctttttcagttgctagattcttccaaaccggaggaactttccaaaactattacatggttagattcagctcatttttattcgttagtattagtaaccaatcttatctaaaccttttttatttaatgtgaaattttacagtaccatggtggtactaactttggaagagtcgctggaggtccatacatcaccacttcatatgattaccatgctcctcttgatgaattcggtataaacaacttaacaaacaaaaatgaaatatacataacgcttaaaatgtaggattatagggtcttgacatatttttttcaggtaacttgaaccagcctaaatggggtcacttgaaacagctccacacagtcttaaaatccatggagaaatcgctgacttacggaaacatatcaagaatcgatcttggcaactcaatcaaggttagatccggctctgtttcttttggttatatgttgacgttatcatcaattaacattcaacatgtttgctgtatctgtaataaggcgacgatttacacaacaaaggagggatcaagctgcttcatcggtaatgtgaacgcaactgcggatgctttagtcaacttcaaaggaaaagactaccacgtaccggcttggtctgtaagtgttcttccggactgcgataaagaggcttacaacactgcaaaagtgaacactcaaacatcaatcatgaccgaggactctagtaagccagagaggctggaatggacctggagaccggagtccgctcagaagatgattcttaaaggcagtggagatctcattgccaagggtcttgtagaccaaaaagatgttacaaacgatgctagtgactatctttggtacatgactaggtatatctatgatccaacatatatattaattacctagacctacaatatcttgaaataatttgtattgtcttaacttatttttgtattcattaggcttcatctcgacaagaaagatccactttggagccgaaacatgacgttacgggttcacagcaatgcccatgttctacacgcttacgtcaatggaaaatacgtcggtaaccaattcgtaaaggacgggaaatttgattacagatttgagaggaaggtcaatcatctcgttcatgggactaatcacatttcacttctcagcgtttccgttggactacaggtaagatgtgaaactatagtttttatataaatttctttctccaaaatttgttgtgacaactaaagttgtggtcatatgttatagaattatggacctttctttgagagcggaccaactggaatcaatggtcctgtgtccttagtcggatacaaaggagaggaaacaatcgagaaggatctctcgcagcatcaatgggactacaagattggtttgaatggatacaacgacaaacttttcagcataaaatctgttggtcaccaaaaatgggcaaacgaaaagctacctactggtcggatgttgacatggtacaaggtcagtattaattaaaaccttctacaaaaaaattatttgtttttgcaaatgaacggtttcttacaatgaaatgttatatcttcaggcaaagttcaaggctcctcttggtaaggagccagtgattgtggacttaaatggtctcgggaaaggtgaggcttggatcaacggtcagagcattggtcgttactggccgagctttaactctagcgatgatggttgcaaagacgaatgtgactaccgtggggcgtatggtagcgacaaatgcgcttttatgtgcggcaaaccaactcaaagatggtaactaaactactaatggttccttcattacatcacataactttgacttataattattaacgtttcattattctgaatctctgatggccgaactcttgtaggtaccatgttccacgatcgttcttgaatgcgagcggacataacactatcacactattcgaagaaatgggcggtaacccgtcaatggtgaacttcaagacagtagtggttggaacagtttgtgccagggctcatgaacacaacaaagtggagttgtcctgccataaccggccgatttcagccgttaaatttgcaagctttggaaatccgttggggcattgtgggtcattcgcggttggtacgtgccaaggagacaaggatgctgcgaagaccgtggctaaagagtgtgttggcaaactcaactgcactgtcaatgtgtcttccgacacgtttggttctactttggactgtggagattcacctaaaaaattggccgtggaattggagtgctagattagatcttagctctagctagctagtgattgcaataatttccatcaaataatgtcgtacttgtttttgatctatcaggttttttagatgatttggatttaggattgtggaataaatattatgatcgaataaaagtttctcttgtttaaatattttatcttgagatggtttttgttctgacctttatattattaagcaacgacactacaatttgttttctctgttgtgttaagaaataagtttcacagttttctctttaacaatagccacaattttgtttatgtcaacattaaccacattttatagtatctgtcgtgctcttagctaaggcgaagcatacttcaaaagattaaattactttctcattacacataatatttatgattttaaaagtattatcagcattctcctcatatagtactaaaattcttttttaatttggatagtgtaatatttttgtgattaccaaataatagatgttttagcatgattcataacaagaaaaacatctcagaatgatttactaatctataaatttcagaaagtgtggcaagagggttaggtaacgacccgacccgaccgcccggatcggacccgtttaagacaaaaaagacccacccggttagagcgttctagaacacttgggcaataaaaagagaggagtcatgtgttttagtctatctaactctctctctactgcaatttttagggttttatcctccgaaagtctcaacctttttcttatcctcaacaaggtatcatcactcactctcttctctttagctacccactccctctctcttcactgtctattcgtattatagaaatcctttacaacgagaattgaatacaaaggtttgaactttgggcggataaagtaatctagttcgctcaatagtggttgggttttactcttattttggtgaatctgggagaaatcttcatttttgcccatttgtttatctgtctctctcagtttcatactaattgagagtttgtgtgttttgacggataggagaaatggcggcgactcaacttacagcgtcaccagtgactatgtcagcaaggagcttagcctcgctggatggtctcagagcttcgagtgtcaagttttcatctttgaaaccagggacccttagacagagccagttccgtcgtttggttgtcaaagctgcttctgttgttgcccctaaggtacttttctcaattctttgttgtttggttacttgttctggatgataacttatctgaatcttggattgttgttttgttgttttggccattcgtttgtgttatacaatccaatccgctaaatgatgtctaaagaaactaagctttagatgcttctagcttctcttttgcaagcttggtttgtatcttaatggcgccttgtgagacattttgagaagtcccttctcttctagttaataattttctctgtttattgtgtatggttatttacagtatacttcaattaagccattgggagatcgagttttggtgaagatcaaggaggcagaggagaagactttaggtggtatcttacttccatccactgctcaatcaaaacctcaaggaggtgaagtcgttgccgtgggtgaaggaagaactattgggaagaacaaaattgatatcactgtccctgtaacaacctcactacccttcaagccctctttctttgtttgctttgttgtttgctaataaatgtatatctgatatgcctccatctttttcctgatgcagactggagcacaaattatctactccaaatacgcaggaactgaggtggagttcaatgatgtgaagcatcttatcctcaaggaagatgatattgttggcattcttgagacagaggacatcaaagatctcaaacctttgaatgaccgagtctttattaaggttcgtcccttctgttttaccttagtcatcttattattgactctgcatgcaaatgttaacttctgttttgaaatgtcttgagtttaggttgctgaggcggaggagaaaacagctggagggttgttgttaaccgagactaccaaagagaagccttctattggcacggtaagtgctcacttgatatcatgtccattcggggaatctgatactttcttagtagcttgatgtgatagtcagttcatacacaagttccaattatacatattctcctcttcattttatggcaggtgatagcagttggaccgggttccctagacgaggaaggtaaaattacgcctctaccagtatcaaccggaagcacagtactttactccaagtatgctggtaacgacttcaagggcaaagatggttccaactacattgccctcagagcttcagatgtgatggctatactttcttagttatgttatatctttgtaatctgcaacttgtatcccaattgtggaaattttttccgtaaacggcctgagcataatctggaataaagacttgagtttgaaaatgtgattttattgctgatttcatgtttttccttctctttttggttacaagcggtttcagttgatcagttaaacttggtagaaacagtgactcacagcaaataaaatctccgtgtaaacttagtggaagatattttacaggtaaatgctctacagtgcccagtggaaacttgagacatgttatcaacgagaagttatattacaaaacgaagaaaaaagaatctttgtctgtgagagaactcttctgccatcaccggttaaacgaagtggctgagttatcatcataatgacctctccaagcattgccactgtcaccgccactacaagcttgattagtaactggtacaccggcaaagttcccgtctaagctcatctgctgaacctcagctgatgaaaggatcttaatgctctgaacacagtttacgaattctctgcaaaaatcacgattttaaaggttagcaaaaaaataatggaacttctaacagtctgatgtgtgaatgtaattgctctctacttactcccatggatcatcgccgacgaggaggatgtcattttcatgatcgacataaacaagtttccagtcagatgtttgaggatcttcgagctgtccttcgatcccaaacatgcgcgctagatcatgcctcagctcatcgtaacctctgtaacggttgacgtctattgatctccccactgagcctcgtttttgcacctgtaggaaaatttaacatttgtcaaaccgaaaacataacccaaatatcaacaagcatagatcagagcacaatcgaacctttgtataagttcgcattcgctgagtctgagctggccacaatccaccaccaagaactccagcatcgttgacagctagatcgttcgaaatggcgggcacattggggacaccaaaagattgagttcttacagctgaagtagacatctctgtaccaatgtcatttgtcactcctccatagtttgaaagcatgttctgaagatctttctgggagtcatatcccctcgagagtagcgtgtcaggcacaaagccattatcaacattagctccaccgagcaagctgttcctggaatcaccgtcaaggccaaaagttggagccaagaaattttgttgtctgttgttttcgcctccatctaaaccgtaagaagttccagaggcagatgcttctagttgatgatctgttaaactagctttggacttttgctgacccacgagttcttgttttagccgcatatcggatttgctgtaaagatcctgaacaagattaccagacatatcaatcgctgcatcaggtatcaagatcgctggcccgctttggcttctgttgagaaagcctgaagaagagatctgacagttgttggtggaaggcgacgttgaagaggaaggtgcatctcctccatctgtgatgcctgaataagctttgacccctcccccaaccggtgggttttgtttttcctgaggtcggctcaccagcatttgaggtggttgcaacgtcgataagccattgttagtgcaagatgacggaaactgatgaccttgagagagagtaggcagctgttgcaactgctggctttgcaattgatggtgtggtaactgagactgcggcgaaagaaattgctgctgctgttgctgttgtaatctctgtaacagctgaaactgtatatgcggctgttccaagagactctgctggaatatctgttgggcctgtgcctggtgagctttctgctgcaaaagtgtttgctgattctgcccgttgagaccaggaggctgctgctgttctacttgtcgtgaaaactgtgtctcttgcggcggtgcggacatcagattggatgaagacttgctggtttcaattacactactctggctagtgctagcacctaaatggtgatgtgcttgttgaagttgcttagactgttgttgttgctgttgaaagctttgattaagggagctggacggaggcgtgatgacactgcttgccattgatcccgaaactaattgtggttgcaaatgatgtgtagatgcttgttgcgactgatgctgctgcgctgcttgttgaccattgtaaagctgattctgtggaacctgaagttgctgcaacttatgttgttgtaactgttgtggctgtggatgcgagtgagattgcaatggctgtgttcttagctgctgctgctgagtctgttgctgtaacggttgttgatgttgttgctgcagttgttgttgttgttgctgctggagcaattgttgttgttgctgagactgcgattgattgttgttgctgtgttgttgagactgcaattgttgttgctgctgcagcaactgttgttgttgttgctgttgttgagactgcgattgctgttgttgatggttcaaagaggagtgcaacaattgctgcagctgctgttgttgggacaacgtagttggtggctgaggcaactgagacattggggcttgctgattctgtttgttaaattggagatttgaggaggaaatccccccgtgcggcgtctgaaagctcagtaacttggagggatcatcagtgccgccaagattgttgtgcagcgccgcggttggcgaaagcattgatgggaagaaacctggctgtgcagcagcagagggtagctggccgttctgctgctgcatattcatccactgaactaaactcagaccaggaaagatagtactcgaagggtctttcatctctaagctattatcaagccatggcattgctctcttcagtgcagactccatgtcagtctcatcatctgcaagagcaccggaaattccgtccttgaggagattcaaagaagttgtgtcgaaatgaaatggtacaaaaatttacctggcattccaggttgtccagaaaagcgaggtcggaaaaatggaggaggacatatgtagaaaggagttaaaaccggttcaatgtcccaaactgaaactcgactgggcctatcaccagcagctgactcatcccatccaatctttagcagaaacagaaacaaagcataactaaaatgaatggtgcaatgtatcaagaaagacaaatctgacattcatcatgagttttacttcaaactacctgaagattccgccactgagagtttttccatctcactggatcaagatcactgataccggtaactgtacccatataccgacgaactccacattcttcagtctcaaatatcattctaaaccgcataccgagggaaacttgagcgtacatcgctttggtatacttggctaaaggaaccacaaactcagcaggagcagccctgaaaaaactcggttgtaaatctctcagcaattgccatgaaacaagcatatatagtaaggttaacgtagacaaaaggaaacatagatcgccacctcgggttgtagaaaatggtgaaaggactgttattagcattagcatgagctgcagctgcaagaactccgatgtgcatgctatcacttgatattacagatgaagaaagtgcaggctgttgtctatttgcacgtcttatccccaacagaagttgcgcctttccatctcttaattgaaagaaaaaaagaattagcatcttgacaaaaaaaaataccgaaagagagcattggcacattgagattgatataccttataaaaagaacagagtctccagcaaagagccttttcgtgctgacaaacacactccagcctgtagttagcaagtgcctttttggttgacctgataaatgtcaacatatccaaaacgtaagaacaattctacgaaagccaaattgattaaagaaggtaatctaccaaaaacaaggtaaaacctcgataaatatgtctgaaagtccatgtgttgtcatgaatatccttagcaacaagctcctgacaaggtggttgcatcgagaaatcctagtaaaatattgccaacaatgtaagaaactaaggcaatacagagatactaactatcagatgtataagaaagtattgtatatacaccagagcaggaaagattttctcagcagctcgtcggggtacagaaaatccaccgtgagtacttgtgtcactcgccgtgagggttttgcagaaaaattcattaggttgtctgtttagcttaagacccatgtcagaagcaagcaatgcatctctgtcatactgttcaacaaaatgctcagagcaattagtccctccctactccttaaatacacctataaatcgagttattcagtgaaaggtaagctactttgtttactggctgaagagtcatctgcgcatagacctcatccgtctcaggatcagcctggttcacagtcgacaattagcaaaacattagcaactcaaaagcaaaaaatgttaaaacaactagcctaagaggccattatagatatttaaaagataccatacattcagtgtaacattgtggagcatgcatatgagcttggaaggaagattcgggtaacttggtatgaaatcagtctgcttctgcattgaagccgcgacctaagaaacagaaaaataaatagcaaccacatgaaatttccaatcagcgactcattcttgatcagccgcgaatgataccaaactttattgaacaacatacttgctcactgtgaccttgagggaagtaaacaacaagacttcctgctggaggcaacgaaatcaatggcccagcacaagcgtgccatagctctgagtttatatttctcctttctcctgcattcacacaacatcaaagctgtgattacttaaaatctctaggatcttcattcagttactattatcaaaccaacaagataggagagaactgctctaaaccaactaaaagccacagtctttataaaccaatacaatagtaacttagcttactctctaagcagaaaatgaccgaaaccaattcaattcaggttctcaaatccagcaattctgaagaaatgtgtgacctcttctacttaaaacttgaatctattcaaatccagcaatgaatttcttctactaaaggattgacatttatcagatacgagaaacacacaaaccttcaacaggattaggagaaactccatttgatgaaggagctttcatgatcactcaactttactttctctgaagaataaacccaataaataatctgaatctgagcttatacaaagctaagctctttgcgtgagagcttcatcaaaagccctaaactttcactcaagttgttaatagcttcctagctcaagtaacagcagagagaatcgttaatcagaaatggggaactccaagatctcagctttttatctccgacagagccgccaatttctcggaaattttaagtatctcaaagagatcaaaaaccacgacttttcacacgcggaatctccggagagacaaacaaagcatacgaccttaaaaaagattccgtttttaacgaagctctttatctcgagtcagataattcaaaaacacccacaaagttacttgattcagctgctcttctttgttttgctttcctttcttggggggaatcaaatcaaagagacgggtttctataaaaagaaatctggaaaatgaatcgaaagagaaaaacaaaacttaaggatgaccaaggacaatcgaagattaagactcaaacgtgagagaaagagcaacagagttgtcggaaagggatgatcagcgaccaggacaactaccaaaaggtctgctaaagcacaggaacagctttttcttcttcctctcctttttttttccttctcttttctttttccgatatttttatttttttatacctatttagttatgctcatgaagccgacatattcactagcaaactggccacgatttaatttcttaatgttattattgtcctctaaaattttaactttgacacacaaaaaaacaactttattagtgttttctttttccttatctctgataatttgataagtttttttcattaaggttattattactgtatcatttattgtaatacttgattagggataacatagatttataggggatgtattgaaaaaaacaaactaagctgactagctagttatttgatcaaagtgcgtacatatatgtttggcaatttcttttgtagttaactatatttaattcagatagattttaggattcataattcatcaaaaaattttatgattttcattattttgaacaaaagcattttactagaaattttgtggagttttacatggttggttctgagtttcataaactagcgttcatgttttaaacgagaatggaacttaaatgtttagtaatgagttctataataacaaacaaatctaaattcgcttagatcatcattataaacaattgatcttattttgttgtaaatgttgattaattgatcaaatctaagtacatacagcatatgcgatcacaaagaacaatattttaacggacgatttcatatcaaaaatgatagaagttctctctttgttcatgattctttattggtttcttatattaattaacctaaacttttgtcttttggaagaagtgttataatgtcacacaaaataaaattacatatgatgatcacaacttacactcttttcccagtacagccatcattcaaaattttcctctataatcgttaaaatgtctacccaaaaaaaaacggtgatatatattcctaaacatattggaaaaccgaatataaccataaatatgtcattgtacaaactacaatctatttggtttaaggccacataacaagttttatctaccaaagactgaacctccatattcatcacagaccattgtaaaatgcatgtaaaccctttgaatgaccccacatcaaaaaagaaagttacaaaacagtaacctctttgttagtttaggttcgatccaaaacttatttggcaggaatgcttaaaattctatatacttacaactttaagtgaaggtaatatatatgtatggaatgaatggatgtcaattcaaataagtggcagtgagtagcgacatgatgtccctgagcaataaatgcgtgaagacagaagtttggagattggatgaatgtaagaaggccttttgaagttatggatttcgacgcctagcttttttttttcttttttttttgtgaaactttgaggcctagctaacgtttaaaaaaagaaaaagaaaaatgttaatagttttcttattacaaagtgaccgaaatttagtatgaactccgaactacgacttcatgcatgtattaaagttggaatgaaaggaagaagagcgtgacgcatttcagaaccggttgtgtgtccgtatggtgtccgcagtggaaagtggaaaatgaacaagatgaataactcatatactgtcctaaagatatttccagaatcacatcaacgtattttagccgatttaatgaattcgacagttggtgttgacaatatatgtaaatgtaaccacaaaatacaccacttgagttggatgaattatcagagagagacgaggaagtttcgttacgattccatgattttctcgactttactatgtcattctgatatgcattatttgttaatttgtatgtaagagagagttgtggaaaataatctacgtactgattaattttttgcgttttaagtgattttagatttccgctaaacataaacttttctagcataatttttgtaaaacgctaaacataattttttaacataaattttgtaaaacgctaaatatagagaaacgttactttgctttaggagattttctcgttacttttatgtttagtggtttacaaatgttatactatggttaacaaatctcgaatattatttttaataatagttacaaaaattttgctattcttatgtgttatcaatattcatatttcttgtagaggatcctttaatttatcgaatatttgtatttgatgataagtttaattacattattattgaaaataataattgaagaaaaaggaacaaacaataaagaagggcctctcacggcaaatcccacctgacgtggtcacactcccaccccatttcacattggctctaattgttgtttggtgacatgagctggtttgcgacatctctttcgccgtggacctggattagtcaaatctattcaaagaaaatgtacattttacaacttccttgaaatttcaagaaaatattgctttcaaacgatctaactattttcagaaatatacaaaaaatctgtttactttctagaaaaattcacaaacaaaaaaattatagtttagttttgtattcaaactgaccattgtggttgtataataacaaaattaagagcgtcgttaactatttaaagaagaacaaaaacaaaaagtcttaaatgattctacatgtgaccatttatttgagaattaattttaagatatgttcataagacgaattatattatattttgtaggggttttcttttttaacaaaataatgtttctatttggtttttattttatttttattttgtatactcgaaagtgtaaataatactgtaaaatagaaaatgataatttctattaactttagatagaaaacaaaattctaaagcccaaaattgtcgtgtgtatgtatttgaaaaaattagttggtaaatttttcttttcatatatatgataccaacatgggtggattaggaaatgaagcgaaaattctagatacttttaagaaatttgagtttaattatataaaatgtggaaactaattaagatcttcgtcgtatataatgaacaagcatcaactggaatgatttaagggaccggagatttaaagtacatatatacattcttttattgatatcaatataagttagtacaaaatgctgagtataattggatatgaaaatgaatatgtctaataatcagctcttgacttcttagaaaacaatgcccacccttttctcatgcctctttagccattgtataggacattcgttttcgaccggctccaaaatcccatcttctagcgcaatcgagtctcatgccgcaagtttcctcgcggcactatggatttcgatcgaagccattttatttgtgatcccggatttatcagtagtcttaacgacatgatgccatgtcgatgttgggctttcttgatgggcctgatttctcatgagctttggtcaaacatttatagtttatgagttatacgcatacgttatcagtctcaagaaatcgagtttcagtttcatatcaagacaaaatcacatgacgtacgtacgagagtaacaagtctttcaatcgaatctcaacggatccataacaccgtatactgacatagaggataaaataacatgttatttattagaccataatcagaactacgaaaaacgacattatccataatcaaaaactcatttctatatatcgtagcgatagataatctcacacttaaaacacatgaacgaaaaaccaacacacacaataaagaccgtccattaaaacgatctagtgcattaacatcaaagatgtacgtcgtggggtttgccacgtgtctcatctagctggttgaccatgtaaagcgcgttgctcgtaaccctggccactttcgtcatccactgcttcacctccgttttgatttcaccgtcgtccatcccttgaaacccatcgagacacgtgtcgtcatccgtaagtgccgcgctagcccacgtctgtgcattgctcatctgccaccggaactctttagctgaaccgccagagacacggaggtgcttcaaaacgccgagcgtacggcttagctcgtccacagagtctccaatcatctccacacagtccacaagcgccgctttctcttgcttcttcttccccaccgagtctcgcaccaccgcgagtttcttcgcggcgctttgagcgtgggagaggctgatttttatggcggcttgagctagatcgcggcggttggtgatggttggaccggagtatgacgaaagagtacggacgcatagtgatggatagctcgcgtgttcgcaggaggaatgcacgatatcttctgcaccattatgacgaccatgtacggtggaggcggtgaaaatgacggcgaaggcaatagcgacaaggaagagattttgtgtaggagccattatctctcgggttagagtaagagaccaaattagggttatgtgtgcaaatgaaaaggagagtggtggtgggtaagaatttaaagtcgtaggtccgtagaacattacttaattaccctcagatatttcctatgtttacgtgttttacgtgtaaaaggataggggtaggaaggtgaatgtagcatctcttgattatgggggaaaatctgtaaaattaaatgcaccgcatattacagaacagagaatagcgaatccagcgaaagaaataagactgtgcaatgcatagattaataacaaaaatgtaaataatttgtatatgtaagtaacgatacgaaaaggaacaaaacttgtagaattattggcggactggtcaccagtgcccaattattttcaaagaggtttcagaagtttgggtccacgttgggttatgaattgacaaaagaggtttcagagacaaaatctttatctgccattaaatggctgccatttcttttgctccactcttgtaacttttaagggtaaactgaattctacattacatttttacatgctattaaaaacgagtaaaaattaaatcaaaattcatattctgatattgaatttgaaaacaaacagcaaatttgattaaccaagtataatttactaaataaaataacaccacactattttatcccaaagaaataaaaaataacaccaaactatcctaaagttttggtctgtaataactttaatgatgctttcctagaaggacccacttaaaagaaaatgtcacatcttcgtatgtttatttgttttggagattcaggagtcaggtcaattgtgtgaaaaataactttgatcatcgtctttgaggccgctttagtctgcgaaagatcgacaagttcacaataacggagaccgatttcttcaccataaccatgtgatgatcgatatatcccaataacttcaagggataagttgctatctagtcacttatttgaacttaattattgatttggacaacatactattcacaattagcaatttagtaacctggtcgtaaccccacacattgaaacatcctgtgtacccttttaaaatttctgtattttcaaaactgccactgggtaaatcctttctgattttgcccatgtcgttttgttttccccttttgtctcgtctgaagtcaaaacaaaattatacagagaatgacgaaaaaaagagaaatcaaatccagtaaaaaaaattaattttcgttgattccgtcggagtgaatcaacgtcaatctcctcgtaatcgtagtaaaagtaagatgtattctactaaaggtaaattttcaacttaaccctaatttcgttttatgttttcgattctgtgaatttgtgaatgcttagtaccggaatcccaaattgaaatgcagatccggcggtgtcttccaccggagcttcatcggacgttgataattgggacttaatccctactttgcctaaaggcctcttcgctgttgacggtttgccagagggtgctcggcttaacatctactccacaccggagtatttgggttctctcgtcaagctactgcacggttctgaagcctgggctatattaatgtcttctcaatttaggaaattgttcttactccctgttgaaagatgctctcactcagcgaaattgatccatggaatgctgtcgcgtcaagtgattacccggaaaattaacgaactgtgggtggtttatggtgggtttccttttcgtttttctctgcgcgagttccacatttccactggtcttttgtgtcatcaaattcccactcaagctgaggttgaagaacaccaagaccctgcatatctgtgtgtttggaatcgtctttttggggagaagaaaattgtgtttgtcaccgaagtgcttcagatgctccaagatgatttggaagcgccggctaacaagaagctaacgacttggaaaaaattatgtctagctctaatagtcattgttgatggtgtggttgtatgtagcaaccggttagccgggagagtaacctctcggtttgttgaaatgttacatgaacctgagtttttcatggcttacccatggggccgtgaggctttctcttcaacaatggagcgttttggccctgaccttggggattcgaaccctatagttgaactgaagaaacgtttatgtcagaaaaccagcctttgttatggcttccctcttgcccttcagcttcaagtcctcaactctattccggccctgtgtagcaagataaaagatcctactgatatgaggaatttcatagaccgatctcctgttgtgctgggcaagactattctcctccgtgaatctcctgttcttgaggttgagtgtgatgctaatgtaagtaatattactttttccatcattttcttctttttttcctgatcttctatttatatgataagccacttgtttccatttctcccagttatctgttgcctacactttgactccctctgtagtacttaatgagaatgaatttgcttggtctaaagaaaacgatgatccgaaggttgaacatatgcttggtttgattagtaaaggtcatcgattccaacctaaccaatggcctattgatgccactactgtgcaacctactaatgatgaacaacaccctagtggtaaccggcgtccctctcctggcctggctgaaacctcacaagctcatcctatccctgagatgtcagctaaagaaccaaagcagtcatccttcccccccccctccccccgcaaaccctttactcgttcagctagcaagtcgtgtggagtaggtccgtctaatcctatttgtaaccctccttccaggaaaagcaaaaatagtggttttgctgcgcctgctgatggctctcatccgcgcggtgagaaaggttctgctgcttttgttacccattctgatttgctggggttgaaggattggttctctcaacagttacatttgctgcgctctaatttatttgctgatatggagaagcttgtagagtcgaagtctgcctctttcaagtcaggtgttcgtccttcccgcaaagtcaaaacttctctcagcaagaaaccttcgccttttgtcagcaaaaaacctcctccatctgattcccgtaagcgtcaacgcgtagaagtccaatcattatctcctgacacttctaaggatattgttcaggatggtggtttccatgcgccatcctttgactctccttttaaccccaacttaccagcaactgaaggtcatgatgatgccaaatctactagtcaggtaactatacttctcttctcattgttttcttatctgtttcaacaataccttagcattaatctgttttgtcatgtgttcttggcagaacttttgtggagacactcaagagccacctctcccaatgaaagatttagatgtggtaaatatatgtgttcccttttctttcaatatttcattttctaggggccctccaaaccatataaatgtatttctccattcttttgaaatactatttaggatcaagtaggggaacacccaataatcctgccctggccttcatctcctttgtcttcacccaaaactccttcggcgccttcagatcaggtattcctctagccattttgctggttaagattcagtcataacatatggaattgaggaaataaatctggtgtcttgttttataggtatttggggatggagatgaagttgactgcaattcgtcagccattgtccctgtagctcctgcatattttcttcacgagacgattaacattcgacagccagttcttcaaaagcgtgttccaatacggtctcggtaccttgaccctgctcaatatagtgtggacgctaggataagtgctttgtttaaaagccgaaccaagaagcctgcctacagcccccttgggtctttggatgagcttgaatttgagaattttaaatctcttcttcaagaagatacagaccagtaagttattaaacacactcttccttgctttacaaattactaatccaccatctgcactggccacaagctttctaatgcacactttttggatattgcaaccaaggacaagtgggtgacaactgaggtaatacatacttgaatctttccatacaatgttactaatgccttatgccaaaatttaagcatattgttacttctcaaacagcatatgcaacttatcatgggaatgttgttgagacgccgctgcaaatcatatgccctcaaacggattaccataattgacacttggtttactgctcttctgatgacacatcatgaagatttcatgcaatgtcaagacaagggaaactacgattggggtttatcaatgaaggcttatgtaactggcaaatcaatcggaaatcttatgaagtctgaatttctaaggaatgttgatgttgtctatgttcctatgaactgggggtcctgtcattgggttggcttggtaatcaatcttcagctccgtaatgtgctgattcttgacccttttagtgccccctttccggacgaacaagtttcggtgatgatcaaacctgttacagagttgcttccttcgctgcttaaaagatttgcaattccagctctcactgaaaatctcactactgaacccttcgattggtcccgagcatcttccatatatgacaacaatggcgatggcgactgtggcccagttagctgcaagtttctggagatgcatgctcatggtttaggtgttgctgacatggctcggcttactgatgatgttgtatcgaggtttaggaaagtctatgcgatggacacatatgccacctttgttgattcccctaatcaagccgcctagtgctttggatgttaatattgttttttggattataaacttctacttttcttcactcaccctctcttcaaacgattatgcgtaacttttgtatttatttctgaactttttattagtttctctgccttgtaactccttgtaactttcttccaaactctctgttctaaatatctaactttcattaccttctctgccttgtcactctttgtttttaaactctctgatatattattccaacaaagtttcaaactgtacattcgattctgtacagatatgtctgtacaatggattctgttcagagtatttctgtacaatcgattctgtacagttataaatgtgttcaattagcactgtcggcaaatctttttttgttcccaaatttgtacagatattctgtaaaattattcaaatgtacagtttgtaattagtgtacatcttgttatcgtacataaataaatattgccttccatcctcttaggttcatgatacgagcttggggaatctattgtcttctcttccaaaacctctggccagatgtcttccccacaacttaatccaccattcatgtaaactgtactgtatataagaatagcactgtctggcaaatctttttttgttacccaatttgtacagatattctatacaaatagtcaaatgtacactttgtaattagtgtacatcttgttatcgtacagaaataaatattgccttccatcctcttaggttcatgatacgagcttggggaatctattgtcttctcttccaaaacctctggctagatgtcttccccataacttaatcccccattcatgtaaactgtactgtatataatttgtacagtttatggagctgtacacattttgtatcgtacaattacttactaatatagtaattcccatatttttgtataagttcacttccatccttttaggttctcttttacttgcttggtgaattttatatggtctattccaaacccttggggcatatgtatttcctacaagttagtttcccatatatataagctgtacgagtatatatatactgtacagtttatgatttgtacagtttctgtatcgtacaattacttaataatatagtaattctcatttctttcttacttatctctcgtttgccatcaattctctccctataaatatcttatttcttccaaacctatatccacttaccttttcgatcactctatatctattatattttccttttcagcaaacgaaaatgtcactatctgatttacccgatgatattttccaaatcattgtcaagaagcttggagatgaagacttcaatcatctaggccctatcattcgttccaacaagcgtgggagggacatcggtttgtctcgagagatacttaagtctgccaacctaatgggtatgtgtctacacccacctaacattttccccggccagctatttagaaatttttttgttcgatgtttggaattcgagaatgcgacggccatgtactatgaagctatccgcctcattgttagggaggaaaatgtgatggggtctctatttttgcttaaccaacttgtccccacctacgactatgccactatagcatatgccttcttccaaatgtgtgccgggagaggtgatctcgcaggtaccacttttgacaccatctttgaacaaaactcagtctccaggtggggctctatttattctttcgagttagaggtcaagtgtgaagctcttattgacacgattatggattttcaaccacattttggcatgactttcgctcctgactggaaatttgcctcctccgactgcttgagcatttccgaatgtccagattggcatggtgttgagtacttttgcgaaggatgttacatttactatgttgctttgcgtattctagaagttctctagtataatttacgtttttctttatgcgatgctttatgtaatttgttccttttttcggtctcatgtaatctccattgtattgcttatattttggtatctcctatgttttctccgtcgaaggactgtaattacttgtgtaatatttttggggttttctttctgtaatatattatcagtcccgataacatttgcttatataagaattaaatatagaactgacaaactttttaacaaaaaatatgtacttctctcttctttctccaatctcataatgactgttttgaaaagccatttatctccaaaccaactattgtcagttgatgtgtcttacacgctttttaggtttggaagtttacattggtatcccctatatcctatcccctatatccgtttggataagtccttctttcccacacaaactatattattgcccttagtaaaaattaactaatattttaaagaggtaaatattgacactaaccactaattactaaccccttctcgcagggttgtctaatctcacacccacttggaatctttgcatgccttgataagtgcatctaatataatttacaatttatttctatcaacagttctacttttatcacctcacataaatttacttttactcggtgccctaaatactattaaaaaatgctcaaaacttccatcatcttatcacctcacatctaaactttgttgttcgaacgcaactacatttaatttgttgttcgaacgcaactacattacaattcatcattaacaggatcattacaaacagattcatattccttcttactttggactataaaaccaaattaactattacaaccaattcatacattaccctaattaaacagaattaaaacattacctcctcagcgtctaaatattacctaaattatacagaaagagaatattcataacatgacacaaaaaacataatcttaatttaatacataaaaggattcaaaattattttacattcttacctcaaaccattacagcatctgtgaaacttttcttgataaccaccacaaatagcattcattgcacaagatctcgtaaggaccagacacagttgcacaatccatagcacaatctggtgatggaagctccttgcagataggatagacgaacgtctttctcaaaggaaaactggtgtgccttctatacggttgtaagtcatgtactagctcctccccataacgtctgacttcctctgttcccaacttacaatgtttaccgccaaagacttcgagataatgaacagccatttcttcatctccagcacatatacttagtactccacatgcgaatgtggccagcccgtcatcgggcacgttttgatgtagcaatgctattcctcttttgacgtctctttcttctgccacaaccattaacccttcatagtaaatagctgtattgttcccagaattaaggcatctttcaaagaaatcacggtacctccctttcatttggacgccagttgtttgacaacgaaatgagtagaggtcgcttggatcagtacaaaggctgtagatgtttgcatctttcaaaacatcgctgcggtacacaatatttcttcccctagttccagctttcaaaataggtcctagtaaccaccatcgatcatccgccaccagctttacaatttttgctaaaatatcatctggcaaatcaggcatcatctccatggacatcgtcttcgctctcttttactcaagtttcttttggttttctatgtttcttatgttttcccccaaattacttgtgtaatgtttaaatattgttatgaagtagcctccacagttgtctgtgtggttgacagttggaggtctttaatgattaactaaaagtttcgttatgcttttcccactcatttacacatcaggtgtatttactatgtgtacaacatactagatggatgaatagtcatactccatccattattctgtacaaatcatgtttgaggtacatgttttcaccttttgtacaacaaaggcgctggatattatatatactatccagcgcctgactgtacaattgtataactgtacagtgcttttaatctattgcaaaatatcattatatttcaaaataacattagaaatacgctgattacatatccttgcaaagtctaatatcacttcatacaacgtaggcagtagacatttatctgaaacatttgtgaccatatttcatatatatgtctacccctaaccaaaacatccaaagtgtcctataaccttctattcaaaaaacattccccatacctatggttattgtactccatagtccaaaagcctattttcataggaattaactacgcaaaaccaaaccgaattcaccaaacttttaaaccaaatgtaatttgccaaaaaaacttttcgcccctcatctttctccatcccatcatcaaccaagtgggttggtgcatgtcaccctattgtgtcctagccctccacatcttccacacttgttaggctgtttcgatttgtttttcccctacaacattatcacgccattatattactttatcttattgattacaatatgcaattctgaagcacagtcctcaccactaacctcatattctcctactgaatgtatccggagttttggtggtcttcctggtggtctctttgtttgtggaggcattaagcacatcactcttatatcctctggcacttccacttcggctggatcctgaactggtaggatagctccttcgaccgttggttgccacattttaattttatgcatatccccaactaacaatttgtattcaaatcccctttcgtgagctgcagccattgcgtgtgtacatggaagtgacctccctcttctggaactctaagcaactgcaagtacgtttctgcagcgagacatggaagtgacctccctcttttggctttacctcaaaatcccatcttccaacagccaataaaatcatccccaagcctcccttaaatcgttttagcaattccctttctactgctattgggatatcacctacggttcttgctatcctttttctgcgtgttttaaaccatctccctagcatttttcttatgaattctatcagtgctaatacagggctgcctctagctggtagcaatgctttgtttaatgactctgcaatgttgcttgacattagattatacctctctccttcaaaatatgccctgctccaattttcaactcctatcccttccaagaattcccaacaacgaacattcctctgctttattctatcatactcatcatcgaaatctttcttcctgtacatacttcctgctctccacacaagtgatggaagtccacttttttcaggtactttgccttaacattccttcgtatgtgcaccaaacaaaagccatgatgtgctttagggtacacctcaggtatagacttcaatatggaagagttcctatctgaaacaaatgttaagtcttgcccatcgttaacaatttcactcagctgctgcataaaccatctccacgactcatctgtctcactgtccactattgcaaaggcaatgggaaatatttgaaaattggcgtcttggcaacttgctgtaagtaagcatcccaaatatttcccaaataggtctgttccatcaactactacaactcgcctaacatacgaaagtcctcgcacactagcccccaaagcaacaaacacatatttgaatcagtcatcaccattatcatctctaaccgtttctaacttctacactgttccagggtttgcaagttttaagacatgtaggtacaccggtaatagtgcgtaagaactctcgtctgtcccttgtgctgtcactacagccaattctttcactttccacgccttccagtacgaaaccctaacattgtgctcagtgagaatacattctggcaggtctcttgctcttggcccacaataagcgtttgcatattttgacctcaaaagagcagcaacaacctttgatgtagcgtgtttcgaaaacctgctacacgtttccacattacagagatgatcaagcttagctttcctcacctcatattcttctgaatcacctactttatgtgcaaagactctccaatcacatattcttttgtcatcacattctgctactagatagtctttgcggtaccttgtaaatttgaatttgaatacgcggtttattgcataaattgacaatgccgttttgaaagcttctcttgtagcaaatgttctcccaacatacatattatcatcctcctttgttaagtccacatgagctgctttcttgttcatctcctcgtcggcaaacataggctcaaggtccgcataaccataaacttcatctatcgttatcccaatcttagctgcatcctcaagagctcttttcgcatttcctttaaacaggttacctgcaccccagacgacaacttctttacctttgttcctatttgatggtggatgctctatgaagtcatcatcgccattgtcttctcctttctctgctgttttactatcacctttattgcccatatcttcaatcttatctccatcaaagtcatcatcttcttccccacttttttgactataaacagaagatccatcagagctgtcctcatcgtctttacagttttcagtccctttatcctgtccatcaaacaaattctccacagcttccaattctctgcctcctaaaagttgcagctccacagcttgtacgtgctccagcaggatatcatcattaatctcactttgtttcccatcttctcctaacaaagcagcttccacctcttctacatgtgttactaaatcttcgtcatttatttcccaaatttctgaaaccgtccttttgctacctctgccttcctcctcatctattgtcttcgctctctcgacaactgcagacattaggcttccaaagtacccaacatccccaaaccctctcgacgaagatcctctttctaacctactatcatcacaactctgcaaactccctaacttctcttcctcccgtccgacaatagtcccatctgtctctctgaagcagacaaataggttcacagatttgtctcctaagcttagagatttgaaaaacctgaattgccaatcgtctttaatcatggttggaccttcctctacccctctcaatactgccaatttgtcctcaaacatgtagctaagctccacgaaaaccgtacgtttctccattttgaatatttgtttcaccttcaattccagatccaccaaacattttaaatctgacatcctcaaacatcgaccttgccggaaagtatccatcttgaactcccattctccggagctgtacagaatccacctacccgcttgggcgacgacagtatcatccgctgcaattggaattcaaaaatagtcggttatgtctgttattacacctactaattcgcattcaattcctgaacaaaattaatccaaaaaaacaagttctctcaccttccattggtgataaacttctctgcgttttattgttgaacatttattacacacagccatattcttatccttctcaaatcaaatatatcttctactgtcaaatcgtttctcgttccgccccatacattttcctccaataacgattccattattaatataatttccacagatttttcatatcctatcgctaatcatctacaaatagctacactattaagagcttaaacccttcttattttccccccttacatttaagtccaactgaaaatttttgtgcccaaatgtgtaaggaatcaaagcccatttttaggcccacacataaacaaaattcgttacaaacactctatctccccagtgtctcccatttatctctctttcctgtcaaaaggattattcggtcatttcaaacaccatctcttaccccaccaaaacttctatttcacgctcctctattacacgcgcattccaagttacctcttttgccaatttcaaatagtgacttgccgtattacccaattatgttctcaaaagtgactacttagccaaccaaccctaacttcaatgacatcaaagtttttacttaatgactgtgttcagttactattcacatttagagataaatattaaaattgtcttccacaaacatgaaattattattttttatatacaaatcaggatggtgataataatattacatgccttatgcaaatttcccgttttccgttttaaaatgtgatttatactatttttttattagtatgatttaaaatatgttcggttttcatttttgcattgccttaactcgcatttgtaaaaaagtatattacttttaaaaatgatctattgtttcaaagaaatatcagaaaataatatttctcagagttggctcatttaagctacacgaataaagctgtcgaccaaaaaatatccgaaaaaactatgtagctatgttagagccaaactgagctaaaaaaaatccgggtacgtcgatcagaccagagtctagactaagtaagaagaattcgtggattttgcgggtttgaggctgggagtaacacgaacaaatacatgcctacaggctacagtcaagtttaaaatgggcctaaaagtaaatgtgtgtagtcaattttagatgggccttaacaagaaaacgcacttgtttgttgtgttcaaatagttgaccccttgtcacgaattcatcatcgcaatggacgtgttacctaagttcgactagaaaaagctgggaatcaacaccaattgatattgatttaagcgttccttcttggtctcttgtgtgaaaattatttacaaattacaacttaatcaaccaacaaaaaaaaaacacttcaaaccaagaaagcttctcaagatttaaaaactttccgaaatatgaaacttctctaatttagacacatgccgccgttactagtgttttgttgtcatcccataaccttaccacatttccattaatcaccgttaaatccacgtaacggtaccaactgtcatcaccatttctcatcctcaccactccatcccatttctcccaccaatccccgccacaattacccaaacctcctccgtagctaactgccgttaaatctccgttaacacacctcccaccgtcaacgtcaacgtctacctcgtagcacatcgtcagcttcccctttgtcactccgtcatcgcatattaacggctccgttttcgtaaccgtttccttcactcgtgcaaccgtttctttgaccggaccggttattgatttcggttcgagacgaccggattcgttttcagatttagaaccggttaattcttctatcaagacacatgcatggccgtctccgactcctatggttgtgactctgatcctccagaagctgacagcggcagtcacgacggcgatccatgtccagacgttgttgacgacggcgaaaacacctaagctagcgtattcaaacgccaacgcctctaatggagattccaaagtcgacatcgatctctttattgaagtgtgtataattttgcaaagaggtgaacgattcagtcggttatataaaggagagagagaagggatatatagatgaaatctggaccgtcggatgaagagcaagttgagtgaggaaaggtaagccgttggatgaagagcaagtggaagtatgaatatttggtagatgctgagaatcgagagcgaaagatgcttctgtcttgaagaaagatgcgcatatagcccaaagagttattctccttatggattttaataatagaaaacatataacaaacttaatagactttcaatacgactctttgttcgtgtgcttacgttacggttgtgtgcatgaccgatacaacatttactaggtggaggatgttccgtgttcgtacatcactaaatttagataactttattatcgatttaaattttgaatattaattttttagaagttgagttatataagtggtggaaaatcgcttattagtagtgtaaacgtcggttagacaaaaatattttcttttattagagatagattataaactagaattaatggttggtcggccaaatttttattaaaggatgggaaagaagtgatgattaaatcggtagcttcagcattactaacttatgttatgtcttgtttcagactaccaaaaaccattacttctaagcttacaagtgcggtcgctaaattttggtggagttcaaatgtcgattctaaaagcatgcattggatgacttggaataaattatgtgatagtaaggtagatagtggattaggtttttgaaatgtagatgatttaattctgcgcttctagcaaaacaattatggcggttgattacggttccagattcactatttgcaaaggttttcaaaggaaggtattttcggaaatctaatcctatagaaaatattaaatcgtactctccatcttatggatggaaaagtatttgctcagctagatctctggttaaaaaaggattaattaaaagagtcggatctggggcatccatctccgtttgggaggatccttggatttcagctcaattcccgagaccagcaaaaagtaatgggtctgttattgatccatctttaaaagtaagtaaccttattgacagaaggtcaaacttttggaaaatggatattttacatgagatttttgatccaaatgatatcccgttgataagtgccctgcatgtgggtgcgcccaacaaagaggatactctaggttggcattttacaaaatccggaaaatatactttcaaatctggatatcatacttctcggatagaatatatagatacaaatttgtcttttattggtccggagatcacattgcttaaagcatattcttggaaagtgcaatgtccgccaaagctacgccactttttgtggcaaattttagcgagttgcgtgccggtcagagaaaatttacggaaaagaggcataaattgtgatataggttgcgcaagatgcggtgccacggagaaaacaattaatcatacactttttcaatgtcatccagctcgacagatttgggcgctttcacagattcccacggttataggaatttttccctcggattctatttatgagaatttagatcacttattttggagagtacaatcagcagttgattcattttcatatccatggattatctggtatatttggaaagcacggaatgcaaagctttttgataatgtggataaagatccacttgatattttaagtttagcggaaaaagaagcacaatcgtggaaatcagctcaagttgagctacattctgaaaatccggtttcttttttggaatcacgaactcgtgtgagaaatatctcagaggataatgtttatgcaggacttcgttgttttgtagacggatcttggaaagagagtgatcagttttcaggattaggatggttttgtacatcatcaaatgaagaaacctcaagcatgggcactactaatctccgtagaagtctctccccattacatacagaagttgaagctcttctttgggggatgaagtgtatgatcggtgcagataactaagatgtagcgttctttacagactgttcagacctgggaagatggtgtcttccccaaccgaatggccagcattttcaggatatttctaggaatttcagagcgacaaggatgagttttcaaacttctctttatctttaatctcacgacgcgcaaatgtaaaagcggataatttggcacggaatgtccgttctgaatcgcatcacatcacttatgtaaacaacattccacaggaatgactcttttgagttataattaaaagcagatgacaaaaaaaaaaagtgtaaacgtcgttttttttttgttttgtatttaagttagtatacaatgaccaaattacactctcttcacttaaatagttaacacatttacgaagaaccattccgtatttccttgtcttgttttttttaataaataaaaacttctaaaatagaaataaaaagttttaataaataaaaactcctataaatagaaataaaaagaagaaagatatgttttattactaaattaaaagagtcatatttttattaaaaaatatatataagactcttagaaaaacaaaaaaatcataaataacttatagaccaaccatttaagcccatcagactactccttatagaaaaggttatactacggcccatttagacagatagaactgtctaattcaagaatttaattatgagaagaaactttatcaaaaacaatgcacatgagagaagattttgtaaaatccatccatgatcctcagcaaaaagaacactatccacaattatataatcttttctttagaataagcccacatcttataataagcttctgacataaattatcttattactaaattgatatatcataaattaacaggatcaactaagttaagtaaattattataaaataataataataagttaaagtacataatacattatagatcacataattaaaaactttaacaaggaaggcacggatgaggtgttaaatgaataataaagtagtaaaggggtaaaattgtaaaataaagtaaatatcggagtaaaggggtcaaattgaaaataaagtaaccatcggtatcgagaagaacgtgagaaaataaaacggaagaacctgaaaaggcgaaagtgacgggaaagccatcaaaacaaatctgtgcgagagagaatcaaaaacgaagaaaactcaaaaactataaaatccaaataaagcctaatccctaatttctctcatctcccaaaattcgcttctctattcgtttttttttcacccccaccaaatatttagattctatcgatttttttttcttaattttttttttgtagtttcagtacttagaaattgcttcttcctctcatatcatcatcatcgttgagctctgccagtctccgagaacagaattatccttaaaaaaaagatcgaagcgaatcataacaaacaaattttcgggggctatttttttttgcatggtgttattcatcgtgtccatagctaaagcaagcttcaattcgttttcctcttcaggtaatttatactctttgataatgtaatttacacgattgcgtattagtctgtttcagctacgtgttttggtttcatctgaactatttacagtttttgagaagaactttgatttagcggattgggatcaaatctggattcattttcgctgattttgctaaataaagttagcgaaattatattttaaaaaaaacttagggtttgatgttctttagattgatttggtttaccatagataagaattggaccctaataatatttaggaatctgagaaaacattcccttgataaagacgtctttgggatctgcttctctgtgtatttgggtgggtcctctgttttttttgatgatattcttttctttatttgggacctaacctatttatatagtaatgcttcaaattgatttagaggtcaataaacttggttaattgatttttaattctttctcgttacacagatttatagtaatgtgtattttcatttattttgatgcaactgagtcagaaagaaactaatcaaacagttttgtgacattgtaaatgcagctacaaagggaagaagaagatcatatgtgacatttgatctttcgttatactagccagatggatgaaaacaacgcggccaagttaaccggtatcaggcagattgtcaggcttaaggagattttgcagaaatggcaaaccgtcaccataggccccaagtcagaagttcctccattggcagctggaaagcaagcagtggcgatgatttcgcccgccatcaacaagaggctattagatgtcaagaacggtgactcggatgaggaaacctgtcaaagtcctgagccgcctcatgatgttcctaaagggaatcttgctgtttatgttggaccggagctaaggaggtttatcataccgacaagctatcttagccactctctgttcaaggttttgctcgagaaagcagaggaagagtttgggtttgatcagagcggtgcgctcaccatcccttgcgaggtcgagactttcaagtacttgcttaagtgcatggagaacaatcttaaagatcttcatcctgatgacaactctggtaagccccccaaagaccaactcttacctagagatcataccatgaactcaaatcctggtggccagccaaggcttaatccagggactgggttaaagtctaaaccctgaagaatcaggtctaaaaacatgctgcgtttaaaatgggccgggccaagcccgttaacattcacaagtttgtttgatgagagaacaagcaagacgattagttattagacactgttatgctgattcttgagaaacactaatggctttgtcttgtcttttgcagatggggaggcagtagcagcaaaggaagagtaaatacaagtcaagtgataaaaaatcttaaaacatttattttgttttgattctcttgttatcctttaatcatatactgatggaaattgttaattagggatgattactttggggtgtaattgtaaaatcagattatctttgtgttttcctggtttctttattgattctccattcttttttcaagggggatttaagttttaggacatgtatgttagatgtgaaaaaatttggtggtcaaagtgtgatacgaaacaaaaatataacttcttgtacgaaaacatgttcacatttcttgtcttcttcttcgatgttgttatcgaaaattgttatgtgtgacaatcaagtagactaatgaataatatgcaacaatgtggggaagatggattgtggtcgaattgtcaagaactggtcggatttggtatataattcgtatacactacttacgattgtttgggccggagctaacagttaaagaattctcccaaacagcatgcactcgaattcaggaaagacacaacttcaccctttgctatgggaccaaagtcaccaagcactacttatttggttttccatgtgtttccaatctccaaaaagcggtgtaccccattccaagtcttgcattcgtctgttagcgatccagtcagaaaaaaatttcgtttctaatttttcacataaagcctaaatatgtttaatcgttttttttttcattctgcattttaccaaataaaatcagtttcttacatgacttttgccaaaacaaaaattaaaaaacatcacatgtagatttaatttattatatttttttttctcagtcatcatatttcttttgcgactttaaaagatgcaaatccgtctagactttatcaaaattatttatctatataatacgttcattgtttaattgtttagtttgtatgtttatgtgcaattgtgcatgacatgcgtgtatacgtatgtttttatggaaaaaaaaagatacacggataaattttataaatatatttaaatacgtaggggccaatcaatctaaagtagataagatgaattgattagggtttgaaattttgtagcccgtgattgatctagttcacgaagtcagtcaaatacaacattgacattgcaattagttttagctctttgtataaccattaaaaaatcatcatttttaaactacattgcaacttgcaagacaatatttacacatttaaacatttattttatcgttgttgtatcatttaacagaaaatagattatttcacgaaatactatgtaaagtgtaaagtatacaaagtgtagaatatacaaacatgtaacatttaatcataaatatattttgaacctaaattaatcataaagagttaacaagcgtagaactcgacaagttcgtagaccgactcggggcgtgactcatcggcgtcggcgttctccaacatccaaagcaaatgctcaaacaagacaacttcgcacgacacagagatggaaccgtcctcgctgccgcatccaccatccaccgccgctagctgctggaagagcgggtggctcacgacatcggagctcacgtggtatgtcctccgtgttcggcctacgtagacagtttgaaggtcttcagaggggaacgcactcacggcggaggatcggctgtgattggtttgagctggtggctggttaggcttggtgttgaatgaattgagtttcttcaaaactgatttcagcttcatcagtttgtttcctcctttcgccattaccgattcggtttggagaagtttgacgtcggaaatgtaagtccgagtgagttttccggtgagagagagagagagagagaagcgaggaagaggaatgtcgatgtcgaagagagaaaggagaatgatgttcttatataacttgctaagggtagattcgtaattatagtattattattttcagtataatttcatggttttaataagtttgagaacgtttaggttatcaaccgatttttgaatagccattatccaatgatctaaaagtttccaagagccggaagcaattattcgaaaagattatgattatgaattggaaagataaagctaaaagtatatattaaaacatgcaaacccacatcactccaaaagtttttgttatcccagtcaaccatatacatcatcatttccccataaccattttcttaaaactaaatttggctaacgttttaactacgttgtggtaagaaccttcgagacttcgagtgtgtaaagtgtaaacttatattttggatgaatttttgttaagtttggatcttcatcacatttgtttttgtgtcatttcaatccaaatgatgaagtaacgagtaccacaaacttactagattatatgttctattcaatatgtacttttcttcaaaggattttcatagtatttattagaaactttaaatatattctcttttctttcaacgaatttcagttagatatttaactacgacaatttttcttctaaaaatttatggagttcccatttttctcgtttatataaaatataaatttctttgaatgaagatcataacaatataaatgaagctgtgaactttatgtaatcacttgattataataaactaatccaacaactaaaggaggttcatgaacttctaaagcggcttattagttctaattagttaggtaagtaattggctatctctgcttttgattaaaaaaattatcttctctttttttacacataacatgttacaataacaaatactataaaattgcaaaattttgtcattttgttgtggttagattagactccgacattattcatttgtgaagtttatttattatttacgtagtattggcttctactgttacagcatgtgagttccggaagatttgtcttcttctttttttacgtaaaattgtttatatcataatcagccgacacaagggcatcaaatgtctttctaatcatgtaaccaaaatattaatatgaaattggacctcctcctagtttgtctacttataattaattgaaaagtttatcaatcttcgtaataaactagacatcatattaattaaaagtgtgagatttataaaagattggcggaagagtccaagtaaagataatatagaagaaattaagatgagagcaacgaccaatcacagatttatagtatcaaataaatttgttagtgaaaatgtcaagttctctatttttgggcggactcgatcacctgccaaagcgtcaagctgtactagaggaaccgtttagacgactgaagtttctttcccaaaaggccaaaaaacgttgaaaaactatcttataatgcatatgcattcatagtttacgttcaccattgcagacatataatctaaacctttgaaaaacctaaagctagcatggaacttactcataaagttgatacaaagctttagttcttaatatcagaattgccttaaacaaaggggaatgcacacacatgtgtgttccccactatttaagtggtgcatagcccgtggacaataaaaccaaacatttgttttgaggaaacatttataaacaataccaaaagtttaataaatacttaaaccgcttctattccctcttagtgtatgttggtaagcgaggacccatttggatcctttgatgtctttattcaaaatattgtatcattaaaatatatattgtcggaaacccaaaaattctccctatattattatccctatttcttccaaattattattacctaattagaatcaattttatatcatactttcataaatccatgtcttaatcacaaggtggagaatcggagatacatgtaaatgatatggactaatcataaggattataactctgacacaagggttataaaaatgagaaatgcttcgaatctataatcatcagaagaaataatatcatccaatttctaccaacttaggttatttgatcaagttgttccacacatatattatacaacatcgacatgaaaatccgtcttgttacaaagattgttgcactatacatgtgagaaaatcgaccatcgtcaaacataccaaaacagaaaagacatgtgcaacaagttggtgtgtattgacttatgcgtccctctccacttgcatactattaatgacactcttaaatcttaatacaatatgtgaattatttgattgtagcacaagatcaagtaacatttgtagatgaactgaagttgaatgtacctctacgggaggcagtagatgtgagttatcatgttatgtgtttaggacattcgaccaatcaaggagtgaaaatggtcaaaatgctaaggctgagtcaaaatattcaacaagatggttaaagcttgctttattctatctccactaaaccatcaagtttatgttgccatttactaagttctttttaggtggtagagactcaaaattccaagttatgttttgtttaagagtctttagttcaacatcaatagcatctttccataaggaatatgtcatagcttgcttaaaagttaggttctctacagggctgactgatatatggagggttaaaatttaatctattttttttatcaagaaaaggagatgttaattaagaactaaaaaagaagagatgaagcacaatgataatgacgttatctagccttgtcttgttacaacaacccaagtaagtccaattaataagcccattgaagatccactgttagtccaccatagaaataagcccaactttaacaaacaaatattgatattgttttgtgatctgataatggtcacacttctttgctaataaggtgcatttggttactggaagatgtaaatattgagaaatattttgcaaaagacactttactgcaattagaaggggaatctcccaacagccagaattcaaagcaatgccacagaggcaaaggaaaacaaagacaaatgattgaaataacaaagaagcagaggaacacaaaatgcgcttcccaatccgaatgataataagaatcaaaaggagatcttgttttattcttcaaacaccggaaccactctcttcaaactctttactggttccgagtcttttctcttctcttcaatcatcttgtgcaagaggaacagcctgagcctacaagacgcaaagaaacagtagaaaaacgacattagaaacagacaaaagtttcagtctttcaatgcaaaaagagtttaagaatgcataccaatgggcgatacttcaatgcatagaacatttcaaggtaacggcgagcctcaagacggtcaaggttcgagacatgcttccagaatccatacacaccagtcaatgtcaagagcctctgtgaatagatttgccaagtgtatctacaaaacatacacaagataagtcagcacctaatatactagtaaaagaaccaagccatgatgagtttattttttttcttacttctcctcaatcctctgaagccctccttttgagatctcatcccagtgagatggatcctccttacacttggtgaagaaatcagcaagagtatcagcagcctgatcaccatggtaagggtcaatgtggaaacccgatttaccgtgcacaatgatctcagctggaccacctttgcaagtggcgaaagtcggtaaaccacaagtcatagcctccacaacagttaacccaaaggcttcatataatgcaggttggacaaaagcacccttggtgtcacagatgtaccggtacagctcaccgttccttacccggtccatctgagaggagatccacctgaactgaccgtttagcttgtattcctcaatgagatcatacattttcttcatctctgctttctcttcattgtcctttgactctttcctcctgtctcctccaacaacaaccaagttagctagctcacgcaagcgggtgttcttcccgtaccactcaacaagacctgacaagttcttgacacgatcaagcctagccattgtgaagagaatcggcttcttcttgtccttgagcacacatctgtttcaaaacatcagatacattagaacgacactcaaaatgttaaagatgaacatgaagagtgaacaaaagcttacaagtgctctttgttctcaacatcgctgtagaggagctcctcgatctcagagtggaacttagtcaatctacgcttctcctctgtgtaagggaagtagatgctcatatcagcaccaggagagacaatgttgaacttgggatcaaacacatcaatcccgtgaacaactcgatacaatccgggaagagtaaaggctgtgtggctttcatactgcccaacagtttctttgctgcaaaatgagtaaagcagaccattgttatactgacacaacttcaaagaaactacttatgtttacttcataatcaatctatttaccttccagcaatttcttggaaagtactagtgatgatgaaatcagtgtggttcattgcgaaaatatccgcagtgaactggcatgagaaatggtacttgtcgtcaagcttcttccagtagatatcagaatccgggtactttgttttctcaagagcatgagcaatggtacactgtaagagataattcgcaatgcattagcttgacgtttgacatatctcattggagagatgctaaagattaaagtttcaagaagccaaacctgagtgacaccaagtttgtgagccaataaagaagcaacaagatttccatcactgtagttaccaatgataaggtcaggcttgccattcaattctttcgatagctcaaccgcagcatcctgaaacaacaagaaaggttcagtttgtctaaaatggcgaacagaacatggttttagaggaagaggatgagtgtacttcacctcggtgtaagtctctagatatggccagacttcgaaccttgagatccatttgcgaacaatacccttctctgttctgaagggcacacgaagaatatcacagtactcagaatcataaactctctcgagacgttcaccgcatgtagttcctaccgcatcaggtagaagtcgagttagctgcaacagaaccaaaacacacagtgagaatcagacatccacaagaatccatggttaaagcaaaattactaaaaacttacaatgagaatccttggtttaatgttgagtccttgttgcttaatacgttgaagcatctctatctccagagcacgaacttgatcaagaatgtaaacaacctgcaaagctcacaaaatattgagctcatcgataaagacagaacaagaagtttatctctactagaaaaagaagaagataatggtcctgacctgtccaccagtgtcagggtaaccaagaacattgtcctgagcaaagtaaccatgtggagagaggatcacaacgttgaacaccattggtactcttccaagaaaagtctcaagagtgcaaggatcaggcgcctcaagaaggtccaaaagaagacgtatcatgtcaaggacacgctctgcattgtctccccatcccctctcaagaccaatctcctcaaacttggcctcaaactcttcatacagtgtttcggacttaagctctgctagatactcttctgctttcctcaaggtgtgttgcagagtgttgaggttctgaatcttctcgctcaacatcaggttctacacagcaaaaacacaaatcattcaaacaaaattctgcgtttaatagaggagagatttaaagagatttgatcaaataccttgccctggtggctgtgaagacgaaggaacttaagcaatggaagcaaactctccttgtcatggaagagcttagccgataaatgacggttaaggaagtcaacaccatttccaatgtatttgtggagtgttggacgagggatagacgcattgaatggctcgaaatcaagctcaagagtgaaattaccattcttactgcaaatcaaaatgtcattgatgagaacagagtgattatacaacatagttaaagttgagagaaatggttacatacactccatcaacgagttcttccttgaaatgaagaaactcagcaggttggagttcttcaacgacaagagcatggagattgactcgtaagtattcccaaacaccaggccttggcctcacagctagagcaacccatggtggcaacacaattgcttcctgtttttaaccaaaccaaaaaagatcaaaactttagtctgagaaaaaaagatcaaaactttcactacccatttggaaattagtgtaaatagtgtacctgagtggatttgagaaggtcaaagaaaggaccaccttcaagtttcttccgggtttgttcaggcaaagcttcgaattcagcaatgatctggttttgttgtaaaatacctttacctttggcttcaaccctaaaagaatcatgtgaagtgatcagactatttgttctttaaccatttaacacaaaaagccatcaaaaaggtaaatacctggaaagcaaggcaaggacttcgtttctctcagaaacaagcgtttcgttcaaacgctcacgttggctgtggacgcgcgttatcatacgttcagcgtttgccattgatccaaaaaagagacgcagataacagtgagaaagtttttgaaaactgcagagagaaaataagaataagattgatgaatataagatgaagtcttgtgttttccatattcacattatatataaagaaaaactatgggttagatattataacaaaggtcaagatattataactaaaagtcaagaaatttattgaaaacatgacttttcttttacgcttttagccttcaagcttccaaggttttacgaaacaagcctagagcagtagagctaagagctagaggttgttattatattcacgtacttgacctctacatgtacacatggcgaaaccaaaattcgtttttgactaatatattttctagccgacataggacattgttttacaaaatgaaattgatgtttaaagaacaatcttatccatcaaattcattagttttttggttaaacgtttcctatccaccatccattttaaaggaatggtgtttaggaatccatacaagttacaaaacatcttcgtcaaatttaattccaagtgtgtgacatataaaaaagttggatgcagacatgtaaaataaagacaagaataagaatcctggtacacgtcatacagtacattaaaagaaattatgattgtaaagggaaaactaaacatatattttgagtttcttgaacagtcaaaagtctctatagtggattccttatttggagttttattatcgggagaaaatggttcataatgcaaaagaatttttccgaaaatgtttactaaattaaagaaaatgttggacgtgacattcttttgttttctgcaacacagctggaaaattctctatgagaaaattcctctaaaaaaattaaaaagcgataaaatagaatacaaatcacgactgattctttagaatataaaaacgttttggtgtttttttactaaccagagatttttcaggcaagaattttctaagaaaaagaacaagatgttgtttgattcatcttatttttctgcttttttgtcagaaaaataaacacaaaaacttgtttcgttaactatcataagaacgaaaaatgattaaactaaatgtatcagaaaaactttaaaccaaactttaaagattaaagaagaagaaatgaacctggagtatagagaagtggttttgagtgagatgtggaggttaatgttcaatatgtttcagatttatagagagacgaatttttaaagcttgatacaaattttggtaagctgatatgaatcatttacttccctctgtttccttctacgttttatttcttgggctccaaacccagaagactaaatataatggatttaaaagtccaaggaaaagggtgttttaggaaaataggaaagttctgaatagtgtacattttccttaaatgttataataaaacaatcactaaatgtttttttcctttaaatagaatagatatatcggatatgtcactgatctttggataattggattaacaagacatttacatttgatgatatgaaataatatctctctatcttaataatacttgacaaacaagaaaaattaattacacacaaatatcatatttaaaaccaaagtaaaaaaaaatacagcttttaaacatataaattataagtttgactctatggaaattttgtttgatacaattaaaatgaatcattgtaataaaagtttgttgaataattttgactaaatatgaaaatgatctaaagtattagtttaaggttatatttaatttccaataaatgcaaaaaaaaagttttattaattctcaaatattttgcaattcaaaatatttaaatattaatgttaaattaacttttcaacccaaaagtttatttatttatattataaattgtaaaagttatgtgttgttttttttgttttgtttttgctaatttttaataaaaaacttgtaactgtttgatgaataagctgcaactatatatcccacgttttcctttttgaccttttcaagaaaataattaattccagttttaacaaatctttttttcttttcctttctttagttcaattaactagtcctaacttcttgattaaccttgacttctttttttactcatattttagaaattaactaacatttggcccctgctatgcagagacaacattgttttaaattatatttgctacaactcttaactaagatttttaaaataaaacagacagcataaatatacaacaaatttattatcattaactgaagaatatacaaagattaagaaaaagatataaaaaaggtataacttttctacccaatgaatcaattgcgatagacagtaactaacaaatcaagagtttagaaatataagagagtataagtacgaaaattatgctgggtatatacatgtccgcttatttcatcattagctacaaccaattgtaatgtgttcttcttctcatcatcagtaattcagtttacaaacattcgttgacacccaaagctt

SEQ ID NO: 1457 - DNA, 96102 bp, Arabidopsis thaliana
ttttctacccaatgaatcaattgcgatagacagtaactaacaaatcaagagtttagaaatataagagagtataagtacgaaaattatgctgggtatatacatgtccgcttatttcatcattagctacaaccaattgtaatgtgttcttcttctcatcatcagtaattcagtttacaaacattcgttgacacccaaagcttggaagtctaaaaacaatgtaaaatgtgcaaaagtaagtaactacatgacgcagacgctgcctttgaaacaatatcaaagatattgtagatataaagaagtaaaataagagatgactttaaaattgaagtatttgtattaatacaaaaatcttgcgtgaaaatacaattgcggtttaatacaaaaaagaaattgcagatataaagaagtaaaataaaagatgaaagaagaatagtaaaaagtatgagaattaatttaccattaaaaaaacacttgagctttgattaagatattaaactcacccttgttttaaggcaattgttcagatgagaagccaaaatttgtcgttgttccttgagtgtttgtgagacgggagaatcataggcgttgattgtattaaagaataattttatggaaaaaaggagatgtatgagagaaaccgaattcagtcaaataaagcagaaacaaagcaaaaaaaaaaaaaaaaaccccataaaaatctagaagaaggatatatgattttcggatctatggagaattctatatatataaaacaaaattacaaacagaaatagaagatggtaaattggttcattgagatgaacaaagtacctgatttctgagtaatcgattaatgatgttgagaaacccatctttgagattttacacagtagtcatggagtttttggaagagagaaagtggagatgtggagatcgtggggatgaaagagaaaatcgtttgagaaagaaacaaagttaaataaaaacgacacataaaaatccttcgtgaaaatgaaagaataaaaaaatagtattaagctgatgtgtcaatcactgaatgcatcagttattggaaaagtgactgctgatttagtatatttagatatctctatctacataacctttgataaatgaaaaatgtatttttttaaatgatgggaaactgatcacccgaaaatactacgattgaatgttttacaaatagtcataaaatattgggaaatttgcaaatctaacacacaaaaaaattataattaataaagtagtatcaaaacaaaaaagagatgatattctttatattttgtgtattaatcacaattttgcccccttcctctttctttctctttctttctctttccctctctctctctttctctctctccctcccttcctctctctttctctctttctctcttcctccctccccctctctctctttctctctctccctttctctctctctaaatctctctctcttaatgtctcttacttctattttctatatgtactttctattctattctaacaaaaaaaaatattacacataataaaattcataatacaattatcatatatattattacaccattacctctactaccaagtcaccattatccttatcagtggctcactgctataaccgtattgtcgtcactacaatcgtattgccgtcactacaacagttaacttgcttgtttgggtttccaatattgtatctcttatggtatagttttttaatggggatcatatcgctttaactcggtaatttaaatcgtctatgttttatcttttacgattatcgtagctaatattgcaacctaaactactatcccaccaccactaccaccactattactttatttaatttaaacttttttgttttatactaaaattaaaactgaattacgaatgatttatgaaaatagtatagtacaacattctatttctatacatcataaataatacaatataatttacttacaaacattttttactattttataaatacaaatccgattttaaaaattcaaactatgttgtatgtagaaaaaaacagaaatttttatctaataaatttcataattagaatctattttttataaaagatatataacaaaaacatacaaaaaataggtgaaaactaaatgaagtgttactaaatcatctctcatcaactattccacaccaagattgtcttttctcaactcttatatgctattttcttaatttatatgtatataatgctatattcttaattaagttatcaaatataactagttttacaattgaccctaaaatatttttcttaaaaaaacaaaaaaaaaaaactctataggtaaatgacttttaacatcgttcgtcgtcactttgcttattagttcacaattctaacgtaatataataatcccttaagtaatttttcattacaccatcatagtgtggcatgaaatagtgcaataaaaataagatcaaacggtttctaaaagaaaagaaaaacgttaatggtttgtcatccggttttattggacgttcccgaagggactaatggttttgtcatccatttgctaaaaggttattatccattggttacatataaatgatttgttgtgatggaagcatttttctaaaaagaaattgtaaatggtcgtcatatagataaaatttaattgcccatatatcgaccaccacgtgttgggctacaagaagagtttcatgtggaatgacgatatttgtgaatctaggagctacaccaacaaaaccggaggacttagataaaggcaaaatagcaattgtgacgtggctttccaccgactttgaaatagtatcaaatttgtgtaataatttgtattaggataaggattatccaattacagttgattaatttaattcaaatgtcgtacataaaaagtaatatttggtctccactaacacagtccactgttatttcctgtggggtggttttcacttttgaggtaagtgaaagcggtattagttgtgttactgtgaatagatggttgctggaaaaaccaaaaaaaataaattaaattgtttcgcagagaatttagaagaatgaggaatggggtagatagataattcatttatatacataaaaaaataaacaaaatttgaagctgagtagaacaatccttgtaaacaattatgcttgctattaaattatgattacatccccggctatttagccttgataccaattagcaatagagtttccactttccactcaacctgataataaggcacgatcatcatgttttgaggaattaatgtaaaagaaacttacatccctggctattttgccttgatacataaacattagtaatttttcaagtgaatatttacgattcaactaatctttactttgttgaacaacaacattcttaactaacaaaaaaaaactttaggttgtttgcactgttgaaaattgtaaggtgtctaagcagctgattttgcaacactggttttttggtaatgagctctcatgataacctctccattctcgatcttaccgaggagaagagttggttcaattgcaagatatagttgcgtataagttgccaataaccaactagttttccagttattcatcaggttcagtctcaacttttttttgtttaataacttttttttgtttggcttttcatgcattttaatagaatatacatttaaaaaagaagtaaatattatactaaataacctaaagaagttccaaaaggaagaaaagtaaaacatgcaataaatttttatgcgcagacgataaagttttataatttttttgtgatttaattagttcattcatgtctctacaagctaattagtgtttttatgttacactgtttttttgttaaatattacaaatctttgtttgaaactaaaaagtagaaactcttggcatgtcaccatttcttatatcaccaatcaaatccattatattcataaatttcctaattcaaatttataatgatggtatgaaagtaattagaaaaaaatagcataaaatgtgacttacaaaaaaaatgcatttttcaaaagtatgaaattccttttttgtttttttaggtagttgtcaaacattacatgatttccattaggtttgcctaatttctggaattgaagttacatcttcttctataattgatacaggttcaagaaacaaagaaatagtaaaaagtttttttgctatattcaatcatccatcattttctttaacaaaccacaatatcggtcacgttgcttttctttaaaaaaaaatggagggtttgtatttttctgttcttcaaatgaaagacgcaaatatatgccattgtatgataaccatctaggaaattttataatttcgtcagagacaaatcctagtgtctgattttttgcgtgtttatttttttcccctcattctacgtgtgtaattttttatgatatgtttttttctagcattttaaagaagaattgggaaacttcagactacatatagcttttatatatgacttaacatggtaggtcggaaatttttctcctcggattaagacttgaaacaaaataataatactctcatttcatctatattaagaaaagatttaatataatttgaaattaatatggataaaattaggaatttgtctttctaggaacaatgaaaacaaataataatgtcattcacatcaaacagttctatatgctattcaaaagagaatcatttggtcgagttaggcaatgcaaggatggtgtggatccctgaaagatgtcgaacgatttgtaacttggctcaaaaccaaaaggacaagccctgaaagatcctctttaactatttgaagattagttcttaaaccaatgaaatcgcaggccagtcaaaaccaacagaaaattagcatttagaactctccccagaccgcgaaacgcaaaaatgcagttgtgttttgaagcgactacaggttagacgaatggattttttttttacgaatagtaaagaccttacgagatggattaacaaatgatacagatatttacaacagacttcaaaccccccaaaaaaagaccctaacaaaagtctcagattatcacaagtttaatttcttctctccataaagatgaaattttcgttttctctgcaagactgcaaactcaaacttctcagcttatttagtatttgctcctcttaatagttctatctcttttgaccgttcggtcgtcaccgtgaagcctcatatacatggtactgaggatctttccaccagtcgcttctccatgtttgcaccgttatacccaaatgttcagaagacttttaagtttggtgaaagcaaagtatgttctttgttggaaatggaaagttgagagatcttcaatggcagagtgcttccccgtatgctacccattgtttgaagctatctgggaaatcatcgcgaatctttgtgtgtacagacagttcggtttccactggttcttttccctgccaaaggaaataaatccggttgagtttcaagtgaagaaaccaaatgacagtatacgcctttcaaaataatcgaacaatccgagtgctgtgagatatatgaaatgatacaataccgtatgaaatcacactgctgagagtacttcactagattaactaatacagattggccagactccagccatttcatattaatttaacgttctaagacaaggactacatgcttagtaatagaacagggtcaacagaaccgtctatttgtgacaggtttagcttttagatatactctgctcgttaaatcctagtatagcatctgcttacaatctgagctcgttcaacacttagttcccgtgtttccagttttagacaatggtggaaaatggttcatccaggtttcagagaagatataatatggataaaaatgcaagctagatgtcagaaagtatatcgcacatgcttatttaagtaacaccaactctcactgtacaaaactagctagggagatatgcaaagtcgaatttggaagtctgaccttcctgctgcttgatccactctctctcatagctggcgtcaattgttttacttcagtgatgatattctctgatgaagacgtctctgcggttgaatatattgtaagcgctgacggcctgccaaaataatgcaatgagacttgcacagtaaaattgaccaaaccgtgattaaaaaaattgttgatcattcatgatgaatattattgttatattagacatacgcagatggatatttgaaaattttggttttaacattttcagatggaacataatcagatggatttttagattgatggacgatataatgctatagatgtgaaattttaagcttctatgtgacgacatctggttgctctattgactgcttaaaatcgtgaattgatctctttagtgcacagtaattttacctggacaagtgatcgttctcacatagattttctgacgacgaaagccactcaatatcaacgaaatttgagacactagacatatcttcttgctcggacaagtaaatggagctactaccattatgttgaactttttggacatctccaaaaaaatgtgtgctaggcattgacggagtacacctacaaagattttatagctgaatattaagaccaacaacaaagacgagtattattatgtactagtacacacaaaatcttaagctacatgaagcataaagagtaaagacaaccacctcatgaataatatatgagctataatcatggatagaattgacaagcacaatagagcttgacccaggaaaattataatgcatacacagcatggacactcaagctaaatgtaccagcagtacatattttatctagctataatgaagaaaaatgtaagaaagatttaaacaaacctcgataatgttacatcaccggcagctggcatatctggtgatgattctgaaattatatgagtacgagtcacttggtgtgacgacacaaaacctctatgtgatatgctttcattctttctactcattgcagacatcggagtgtgactttcatggagaatattcccatctgataagcacctctttacaagaaacctggaaacacagtaataagagctatgatatagatgcgaaacaaaatcaatatatttttgttcacttttagaggaaggctaatagagttggaaacttcatatactaaaaaacagagcattcttaagctagcagagagtacagattttggtacagttcgatgcagttaacaaaccaatcctagtttcccatgaccccatatgtctataacaaaagcccatacctccttgtatctaaatcctatgttaatttcgtatgattagggtcacaacagttttgtaggatctaaactggaagttatggtggagaataaaattccagtgaatggataatgtcgagatatgtagagcctatatttttcaaattcgtaaacttaatgcatagcaaataggtataagatattagaactcatgtgactcataaatcatcaaaatatgtctaaagaagaaaatggaaacctcaaaacctttctacctacatgacagcaactaattatataggcatattattgttgaatttatgaaatccaagttagcagtcacagaacctacttttcatcttcccccatgcttatctctccacttcgtccattagagtgggaatctgaacgcaactcccaaaccgcctggctcccttgttcaggccggaaagtaccaagaaatctgcatatagaaattcacaaaggcccaaagaatttctgtaagactctaagagatcatcgcgtaacatggatatatacgagagagtgacatagagcagcttacatattaatggcatcttgtttatccgcatccatatatgcgttattataataacgttgcagagtcctcaagaactcttgtgactgggttgctgctctccactggcctcgcctttcactaaaaacctattacacaccaaaaattctaggaatcaacaaagtgtatcccaacaatagtgaacataatgggaacttgagtcggctgcagaagatcaatacatcataattcagtgcagaacaatgagacagattacaaaatgaatgttaactaagtctgatatcctttttttttttttttttttttgtttgttgtcaccaagtctgatatccttccaagacagtaaaataacgagggcacagttgtgattaagatataatatagatcacataacccttgtaattcttggacttcaaagaccaagatcagaaaatagaccagattttcttacagcaatatcatcacaaatgatgaattccaaaaattcaaaaagaaaaacattttaaaatttgccaatcatgtatatgctgcttctaacataagaatcagatcataataataatgtcagctgaaaagtgtcagctacagagaggttcaaatataagagatgattgatcagcatgcatgacggattcctgttgttagaccgagcaacaaggatgtacaaagaacactagatttttcatgagcttagatttactttaaggtaaggcttgttattttaattgtaaacaataaaaaatgttgacgagaaaagggatacaaatcatctcatggagccagtcatgaatcattcccaaccgagactaaatggaatctattttgtgcataattaacagtccagcgtttagtatcaactaactgtctctagcagaagacttaatatgagacagttccatatgaacatgaacaaaattagtctgctgccatgtcaagacttataaaaacaaagtaagcataataataccttattgtgggctgcagatccaccatattgataagctagtgtgtctcccattctctcgtataaccccattaaagtactagacaaaggatcatcaagttctattgttggagcatctctaattcctaaagcatgaagctgttgccctagagcagcccaaccatatgcatattgggcaacatttgtacgatcaaggcaatctatgcagttggtccgcagcactccactctggagcctgctaggcttgacatcataatcaccatttgcaacattcttacttgggcggcaattcttctctaatgagtcataatccctactatcatcatcagaactattatgtggagacgtgtcggcactgcaaatttaaagacattagtactgtaagtgtttactatatagctgcaggaaaatataacttttctaatagaaatatttcgataaaaccattttccaccaagcaatagttgcatgctattacccattttcaaagagtacaacaaataatcaaatggttggcgacgattaacaagttatccaatttgcaggaagatagccaggaaaggacttttattctagatgaataattgcgtgaactactttgcatataactcggagaagaatttatatgatgaacgagtaagttacaggaagtcgaaaaaaaggcttactcagacgaagacaagctcatataaccctcaagcttcattgctggtgtaagttgataataaaagaaacctgttagcatcaaagcacaggcagctacttttccaagaagtgccaatacattttctgttttgctgaaataaagacaaagaagagagaaaactggttattatctaaaaatgtattgatagatattcattatttgaagcagctggaacgcaaattaaaaggatacctgtgaaaatgtttgtgcaagtcccagtggaggaatctaagccgattttcttccggcagatctttgtttataaagtcaattgcattagcaaactctgcccggagaatcgactccctgggtttcctctcgttggtctattgattgtcaaaagtaacaagaaatatcagtgaaagcgtcgaggtgtgagagcatcaaaaatatagtacacactcgtttcattgatagtttaactagaataaggtattaaggtgtaagaagatgcgtcacttgccaatacacaaggtacccagggaagtgaggactaggcgtgaaagatgataagaacgtgaaacaagctagattaggcaactcaccttgatcaagttcagaataatgatggggactccataacgctccacaagattttcaaagtgaactctagttgcctcatagttcaggtccctttttgacactgggattgagattgaggtgtttaaacacaaagaaaagagagagagagggaggaagaaagatgaccaggcagtattttatttagtataataacacttacatactatatcaggcttaactttcatccgtgaggtctcctgtgaccagaatagagggattgagccacgattctgcacaacagaacttatttgcatgggacggtctactggaacatcctcagacactatctgttctgtttccacatcattagcaacattgccactttcgtttattcctcgtttcaagtacctaaaatcataaggagtttaagagaaaataagcataataactacccttatgcctcaagtgaagatatataatttaaatctcataatgttaaaaagaccctcgagatggaaaaacttcttatttgattaacagtgtggactttatttgcaatgatttcatgctactgctaaaaagtagaatacagagcgacttataatagtcacgtttaccacagaaatggaaactagggagtgatgaaatctgatacctggttccagcattatggcgggaacgcctagcaataagagtgagtttgaaattccgtccagcttcggaaagtattgtctacatgcacagcaaaacaaggttcagcatccatgaatctaaacagtactgtgcgattatgaaggtatatgaaaataaagatgccagagtattatagctgtatctgaagtagcacgaccaagtatatcaaaattgatagtcaactattaaaaatttgcatatgagacaaaaagcttctttccagaccttttaggcaagacaggactgatgaaaaaaaaaaaaaaaaaaaaggcaagacaggacttgatttagggaagcaaaatagtgatcctaaagaaaatggtacacaaataaaaagactacaaaagaaaaacaattgaagtcgggcaaactttctttcctctgggtagtaagtgaggtgcagaaaaacatacaattctcacctgcttaaaaaacccatacaccaatgctacagtccacagggtattccgaaggtgatgtcgagttccccgagtcaagaattcgttccacacaaacattttcttatagagagtacctccactctcatggtcgcatatattcttctggaaacttcgcattatattgtaagaatagctgaaaaagaagtctttcgtaaggtccaccatacacaggagtctcttgtacctatttatcaacaagtgggaaacatcagatagagaaacgcaagagtttaatgacttcagtacatataatggatggaatggtacaatgttgctaaagccgtgcactctcgcttttcaccaaacagaaacgaccaaacagaaacgaaaaacagaacatttcttcagcaatgggattgcaataaatatatataaattaaaaaagcataatgtagccaaagatatatcaaaatacctgttctcgtctcttaaatttgcagtgttgcaaagcacgctagaatgttgcaatgcaatcatatcactctttgacacttcgtaaacaatgtgaccacaaatttcacctatctctcttctttcagttataagcagcatgtaatatggtcccaaaaacttaatgaaccctgagagcaaatgccaaaaaaaataacaaattgtgagaacaaatctgtaaagtaaaaccatctactactcttctgtaaacataaacttgagagaaaaacacataccaatgattccataacaaacagtgacaagtttcagtccaccagtcgccttgtttccttcgtgtatccgtttaagcaactcgtagcattcttttttggtatacgcagtcgaatcctctctgagattaagctcagatgcttcgagccggtctatcttaagtattctatatactccactaccgttccaaccaatcatatagaaattctgaaatatatatcatcatgttagttacaaatatctatagtgaaacaatagtacaacacgaaaacagatctcatagctgattcatgagacaagaaaaagcaatcaaatggcagtgaaaatactcaaaagtggaagttttaaaataccgcttgagtctcgaagagcttgaattgttgcatacagcctaaaagagcagatgatccagaggagcctgagccgccattctccactgatggcgatgaggtcatagctgatttctcaattattggttccttttgatttacagatctaagcccaagccgatgggctgagagaataatctcgccggagcattcaccaatattcaaaatcgaaataaaatgtcgaattcaattcagacgcaattcaatcaaagatactctaaaactttgaccacgtatcgttgggtttgaagcaaaacacgaatctcttgctcccgagatttaaaccatggacttgcaaaaacaatcaagcagccccagaaaaatcttccagaaccgacgaaaacaaacagtagtgattgtttcttctgctgcaatcgaatcgagaacaaatgcgagagactaatagaaagagaaaagaggtaagcaagtagagagacccgatcacgagtccagaagctccaaagaaacgaagaaggaagctcagattcgcagatgaaacagaagatgagattacgaattggtaaaatttgaaaaaagaagacaagtatatatgaggaagaagaagaagaggatagagagaaaaagaagggtttatgatatagagagagatgatgatgatgataatagttttctcagctgtttcctttgtttgtgtcgagagacaaaggagaagattggatcggggaagagagagagagagagacgacgacgacgacgcaacaaaaccacaatttctctcttctttaaaacaaaaaagatttttttaagggatctttaaattaaaaagaaaaaaaaagagcccgtgacgaagcaatatatactaacagctgtctggccgctaatggaatagctgcactttcgaggacttatgttatgtactctctctctttctctctttatccagttttccagttacacctataattctgagtaactttagttaataagaataaatagtatatagaactaaatgtgtttggtaaaaaaaaagaataaagtaaatgaaaatcatttgtagacttgatacaaaaatactaatgatttttttttatatatgtagaggatgagtcattctaacaaaagttttgttaatactaaaaaggtacaaacaaatcatgttttgaatattggagatggtgatgtcaacaacagaaaaaatgaaaattatctgagaaagtatgacaaaaacatgataaactattttagtgttcttatgacaatttttattataataattagacttctatcgaatcacaatttgtgagtttatagaatcacaatatgtgaatcacaattactaattaaaccattggagatggtgatgcttttatgttttaaaattgtaataatatggatttttcgttgttaaataaaaagaaatgtgattaaatgcctattagtatataaaaaacatgataaaccataagacattctaattgtaagtaatggttagttaatatttgattgttcactaagtaatatatctatatatacatttttgcagccactttgtgaaataaatcctagagttggaatttatttacagtggctgccactggcatttaataattgtttttgataattagaaagaaaatctttgaattaaatatttgacaatcttcccaaaatctcttcacattaactacacgattagttattaaaataaaacttccgaaatatttaatatcatttaattactacaaaattatcattttgatattgtttttctacatgactataataattcgattataatcatcaaaccgcagagatattagatagcatttaattactacaaaattaaaaaatatttagacaatgattcataaacatatcataaataaaatcagtgagttttttttacgggacggattggcgggacgttacttaataacaatcgtaaactataaaataaaaatatttttacgataaatataatttgcaaacttttatatatagtaactttaaaaaataaattgtctccgcggtataccgtgggttaaaatttagtagtgttgtataaaccacgaggctgtgtgcgtttgtgaaacacaaaaggttcattacccgaaaaactttacttacaaagctcttttgctccatcatcacttacttgtacgcttacactatgatcaacagttaaaaacaaaaacaaaagaaaacggttttttgacatcaatacaagtgaaggggttgctaaaaaaaagcacataaggcagagagaagcaaggcattgttgtggccaaaaacatcaatccttgcaatctgttacaccttctgtagatatttgaaatcgagcttccgcttctggcaaacatggcgagcttatcactttacagattctctcctctgctcttcctttcctcaacgccaacctgtatcaattatcataacaaacacactttcctaacgaaccctaacaaaaaacactaagaaacatggatttgtcgaatttgcaaacattacagaccttgttgtggtggcatgagccatgatattcccaccaatcggcttaaattggggaccagcaaaaagagctgaaccatctacttgcgcaactacttggtttgttataacaacagccacaccaaactagagccattaaacataagagagaatacttcaggatggtgtctcagagcaatattggaaaagaaacagttagtactgaatgttcacctcatctgctaacttctgaagacttctcaagaactttgcaagatgcatttgtcgagccgaaagctctccccttccagagaaatctgttctgtagagagcggtagcactatcgacaatcaggagagcaaacctgtgccaatagggtcatcgtaactttaaaagttagcactctcatgatagacataacggaactgaacaccaaaataaactcaacacaccttgtttcaatcatcattgatgctgcttcaagcaaaagccttgactgatgatctgtattatacgccctcgcataggcaacgttttctagtacatcagctccatttaatccaaacctgcatcatttcatttgatttcttacagatgattccgtctcaagaacgctattgtgatctcatgtgtgttacaagaataacatacctgtcagctatctgtaagagtctttgtggcctgaatgttccctcagcatcaatgtacatggcctttccctctccacctccttgatccatgggaagctaatcattcaaacgtgaaccttaatgtgaatatctttctcaggtttggaaattgtaagaagaaagacaagatcactgatttctgctagataagcaacaataactgagtggtataggaacagggttcttacttgacaagtcacacacagtgtatggcacagctgagtctttccagagcggaactcaccatataactctgtgatggaaccagtttcaatacctcctgttgagcatacggcaaagtaagatcacaataacaaaatgccgttataagatgcaccagaaaccagcaccaaccttctagaactttatcgagctcccgtgatccagaggtaatctgaataatttcctgtctctgagcatggagctggctcgcactagtgaaccccagaggaactagctttgaagctatcacagaagaaaacacaaataagaacacacattaactctaagagtatcaaagaggtgttatgtatttaacagagaaggaaagcaaaaagtttctacatgtgtaatacctgcttctacaatcttgtcaaccttggcatcactaattcctttaatctgcaagagatccttcctcggagtataagcaacaccttcaacagtacagagaccagcatccctaagcttctttacatcaacagaagcaatacctgctgcctgaagttttgaagatttaaagagatgaaatagcatataatcataacacaaaacacactgatgcatctcccttttatgaacacgaattgagaagaactatagagattatatgacactggagtcacagcaatagagaagttccccagaaaaggataaaacccccaaaaagtgtcgatttttttctgaattaaacgaacccctaaaaccaattcgcctaacagacagtagcgaaactcaattctcgcccagattcacacctatttcacatcgcgatgtacaaaaaaagcagaaatttttagtgaattaaagccgaacccatttcaattagcgcaagatctgatgaagcgtatagactgcgaaggtaaatttccacaacaaatgaaagaaatctgcagaaattgaacctgaagctgttcgacagggaaaggtccgtgctgggtttcttcatcgtcttgttgttggacagcattctggtttctacgctgctccatcgtcgtcatttctctcaatcagagcagattcgggtcaccagagaaagcgagagaagcaaaagagagcttgagagtggagggaaatggcgaaactgaaaacaaattgaaagaagcgccacaaccaaaattattatacaagacgacgatgagggcaaaggcttcttcaacaagtctcgattacgtttgggtcagcttttcctcggccttgatcatattgggctttaaaggctattaaagcccaaattcttattctataaaatactcaaaaacaacaacaaaatcctcctcatttttattattaattaagtaccatagtaattttaaattttcagttaaatgcatgaaattataaatgttagatattatcaaagttgatcgaattatggattctcaaaattatttttttattttaaattatttttacttaaaattatatatttttaaaacactaaattaacgttttgtaaaaacaataggtgtttgaccgccgagtgatacctaggtgtttgaatgtcaaccaaatggtacctaggtgtttgaccgccgagaaccaccacaattccaacaatgtagtaatcacttattataacaaaaataaaatattacaaatatcacaaaatttgtcaattttctttattcaagatgatatttaattttttttggtaaactaaaacatatagggcccaaccgggttcgaaccggtgacctattgatctgcagtcaattgctctaccactgagctatgaacccttattgatttaataagttcaaaattataaactatgtatttcatgaattattttttgctaagaaatctaatatagttaagtcaattgtttacttatttagaaatcacataaattatttataaaaaaaaattcacaaacaaattaaaccatgaaagttttttaaaaaaatttcagttgttaaagaattatatgcaaaaacaggtcaaaatttgttttattcaagatgaaaaattgctagctaaaaccttgaaatataagattagtgaactacttgacgctaaatgctaatcaaatatataactaaaactcttataaaaaattattggtaaactgaaaacatatagggcccaaccgggttcgaaccggtgacctattgatctgcagtcaattgctctatcactgagctatggacccttattgatttaataagttcaaaattgtaaattatttatttcatcaatttttttttgctaagaaatctaatatagttaagtcaattgtttacttatttagaaatcacataaattatttaaaaaacaaaattcacaaacaaattaaaccatgaattttttttaaaaaaaattcagttactaaagaattatatacaaaaactgatcaaaatttgttttattcaagatgaaaaattgctagctaaaacgttgaaatataagattagtcaactacttgatgctaaatgctaatcaaatatataactaaagctcttctaaaaaattattggtaaattgaaaaaatatagggcccaaccaggttcaaaccggtgacctattgatctgcagtcaattgctctaccactgagctatggacctttattgatttaataagttcaaaattataaattatttatttcatcaattttttcttgctaagaaatctaatatatttaagtcaattgtttacttatttagaaatcacataaattattttaaaaaaaatattcacaaacaaattaaaccatgaatttttttttaaaaaaaaaattcagttgctaaagaattatatataaaaactggtcaaaatttgttttattcaggatgaaaaattgctagctaaaaccttgaaatataagattagccaactacttgacgctaaatgctaatcaaatatataactaaagctcttataaaaaaatattggtaaactgaaaaaatatagggcccaatcgggttcgaaccggtgacctattgatctgcagtcaattgctctaccactgagctatggacctttattgctttaataagttcaaaatcataaattgtttatttcattaattgtttttttgctaagaaatctaatataagcaagtcaattgtttacttatttagtaatcatataaattatcaaaaacaattttcacaaacaaattaaaccttgaaattataaagaaaaacatattcacttgctaaagaattatatacaaaaacttgtcaaagatgttttattaaaaatgaaatattgcgagctagaaccttgaaatataagattagttagctactagttgctaaaagctaatcaaatgtataaataaagctctaataaaaaattgttgataaactgtaaaaattataagatttaatcggatttaaaacggtgacttattgatctgcaatcaattgctttaccaccgaaatataaaccttattgctttattaattataaagttttaaattattatttttagtccttacgttgtcaagtcaaatatttactaatgtagtatcttattatataaagtatggttttcaaagttactaactcataggatcgtgcaacgtgtcaagtcaaacgatcagatgtttacatatttcattcaaaatttatttttttattctttttaaaaaatagaaaatcttaaaaagtaaacaaatatacatatactaatttatatatctatatatttataaacaattaacatttattcaacaaaaggaaaattaacaaatttgtctttaactaatgtaatcataagtgaaaatagaacattttgagaaaaataacttagcttataggatttaacttttcaattatttttaacgagaatatttttatttattaattttaactcatttaatattaatttgcatgatgtaaaattaacttacgagattacggcatatataaaaaacaatattcaataatgtttggtttctaaatatttttgtggatttctgtttttttattaattattagccctaggcgtttgggtattcgggtcgagtattttgggttcgggttttgggacttagaagtttaggacccgttcgggtaatttaagatttcgggtcgggttcggttcggattccagtttatttatctattgaaatatcaaattttgtctgcaaatctattaaattacttgaaaattttaaaaattcccaaaacaacacgaatagttttgcttgaatatatctaaaaatacacaaaaataactaaaatatccaaaacatcctaatattttatatatataagtataaatataactaatatatacttatatttgagatatgtttggatacctattcgggtttgggttcgggtttttcgggttttgaagtttagacccgttcgggtatttgaaaattttgggtccgggttcggatcgggtttttcgggtcggttcttcgggtttgggtattatgcgtaggcctattaattatgttttgttaattgttaattatttttaatactaattaggatatagatttgatatgtcataaatattattttgatatgaaactcaatatgaagttgtagaatttaaatcgagtttattatgatgacatatatagttaaactgtattacaaaattgaatggtgtaagatagaaattttttttttttttttttttctagatactaaattaaatatagaataatggtcggttactttctagaattcaaatatcattgataagattgagtgtatataaaattaaaataaaatgtataagactgaaattttgtttacaccaataattattaaattaaatatcaagaaaaatatataaattgctatacaatattcaaatattatcgataaaaatttatttttgtatcttacaaccgcctaaataggcggccttatctagtattcatataaaatatcataaacaattatcactaacaatttggtatgctctttcatttgtttgaccaaaagaaaaagaagaaagtcttacatttaagtttcaaatatattcatgaccataccaaattgaatttacattcgatggttaactctaaattgtatctttttttttggtgtaaaaactctaaatttgtatcttaatcttaaacttatacttaaaaccattagtgacgtcttctccatttcttctctttactttttttcactaaatcccggaagtgaaacgaactcccgtagagggcaaccaagaaactccatctaggaatttaccgacgctaaaataatttgcttcttcaaacccaatcgaatgaaacccttcccacgtcactctcttggaaattctagctttaggaccataattcttgaactctccaaaatacaacgtctttagtacttcgtctccggagtctaaccacccggcccatcctccctccgcgatcgcgtcgtcaatatatgattccatcactatagccctcgaatactttctccacgggcgtcctaagtaagagctatacttatgtttcacgggcgaaagatctgagtctgtcctgatcctacaactatgaagtgcaaatccggtattttgacgttggtccgtcctcccgttagcaagaataacattataggccttgacaccatgagggcgacgcaagaatatgttgcagctttggaaaacagcagctgcgtttccgaatatgaaatctatagttccataaatgtcacattctctatagaactgacgcaaggcagctgcgtaaagtgtgtcttgataaccggagatgctacatcggtataacactgattggtctgatgtgatgcttaatgctatggcttgatgtcctctaggccctgctatgttcttgattccgatatcacgtgcaatgaatccgtcacccgtaaccgctacaaaaattgcattctaattatcaaacaacaaagtttcgttataaacaatttatgtatacgaatgaatgagtgtatgtacttactcattgtagcggtgtccgggacagaagttcctccggtggcactatcatcgccaacaatcaccgtcaggtctttgccttctccgatcaaagtaatctcatgtttatggattattactttctctttgtaaacccctcttttcacgtaaattatgaacctaccatttccatgggcagccgtgacagcctccatcacggtgcggtaatctccggaaccgtctttggcgactaccacgtgtgctcttgctctacctactagaagtctccgttctccggcagtgacccaccggggaagagcggttgactttgtctttggttttggattcttcatgattgtgtcgaccagagtcagggagttgctgaccagtcgagataggtgatccattttctgtgatatgtggctgatggcagaggcggaggaggagccaccggagtcaaggatggagtctttgcaagcttgttggaaagtcatggcagcggagagccatgtttggacatcgtgtttggtgtgacgctttctcgatgagccattgagagcttccatggcttgcctaagtcgtcttgtggacattttcatgagccgttcacaagaatctgtataacgttattgatgccaattagcttattagtttctttttttcacgtaacggtttgagttaaaaataaattagtagttgtgaatattatgttccgagaatttgtacttagcttgtgtgttttgtcaaaattattaggtaacttggtacataaaagagaaatacttcaactactttatgaattcttctttagtttagtaaccaagtagataatagtttctggcatacacatatttttctacgtacaccataaactatatctaaaatgtttttgagtaaaattgttagcaactaaaatgaaagacagagataaacaaatgttacggaagagaaaaattatcaaaatagatgattcctaacaaaaattttattataactagagatgttaattatgatgtgtacctgagaccgaaggtgaaggcaacgtataagtggaatcttccagagaaacaagtttggaggaacccatcgacgaggagagaggtggaattagcagattggaatcagagatagtcttgttaacaagaaaagacacaaagtcgagaccgtcaagagatccatgtcgaaactctcgtaagttttggacacagagtgaggtgtactttgtggagctacaatgcctttgcatttcattttggtaagcaaatggcatatttcttgaagaggcatcaacaatgagaagggcattgaccaataacacccaaaacaagaccatatctataacacccatttctttaaaacaaaaagttggttatcctctatttatattcttgggtactttatgtggtaaagttgatgatatccaattaactagagattagcattgatttatagagaggagggaatgaagaagatagttttagctgaggaggtgagtgtctggtgagttagtttagcggtctaccatttttttcatagagtagattgagacttgagtggcttcgatgggatcattaacactcacttttttgttttgtttttcttttttcgtttttatttgggaccaaacatatttttttgttggacaatttgatccaactatatacctcaaatactcgctcgatcatacccaatttttaatcatcaagatccaaaataccattatccaatcacttaaactatatatccactaatgccaaaacagaacatataatacctgtcataactctcgtactagttgacttggacgacatatgaaaaccttagctactttctgtgtgggtaaacaaacaagatggaaccgaaaaaacaatcagttctaactggtaagaagataatgtaacatgcttttactacaacaactctgcaaaaagaagtcaaatcattttatcatacggaagagtgacataataactgctaatccgacggaccaccacactatagttccttatctgaattttggtatagttcttttgtcttagaaaaggttttaccacaaaagtctcaaaacgtttcaggttcaaagacaaggcagattatggactctaatcacatacgtccaccttgttatccgctttcattccatctattacgaatcaaatcatcactattaacctatcaataatttaacataacaagtgaaaaaaaggaaaacaagttctaagacagaataattacatgtccagttatcgaattatggacaattgtatttacatttcaatgaaagaatgaaaaaaacatccccaaggatcaattagagaacaccaaacagattaccatcaccacggctgcccccaacctatactttgcttcagatgcacctgaattcctcggtggcggattcgacatctgctgcctgctcgtgtcgatttcgataggaaacctacaggaaccacttgacggatctatcttagtaacaaccccaagattgttaaaatcacatgagccacgacgatgatccattttttgaaaatacatattgaacgcataagaagcattcgcggtcgggtccaaggcggcgcaggaggaacccggcccgagcgaggtgcagtcggcattttgacacgcgtacgtagcagaagcctgccaagtggcagcaccgttacccgcagcctgagtggagagcacgcaccactcacgtgcctggtaacgaacacctttagtcggaaccaacggacggccgttaccgagactcagaggatacttaacggcgccgtcataagagaatattccccaatgtctttcgaatttcccgggatcaatgctcttggcatcttcgtctactaatgagaatatataaacttccggcgccattctccggcgaggcgtaccttgtccttgaaggatacgattcaataacccttgattgaatctctgagccattgcaggatttgcgttctgatcaccgtcggttggccatccgacttctccgacgatgatttcaattttgttcgcatcaaatccgttcttctccagcgccgagactaaagtgtcgaaatttgcgtcgaagacgttcgtgtaagagattgaaccatcgacgacgggcttagctccaccgccgccgcctccgtttgggaagaaggcgtattcgcgcgggaaatttggatcagcgttgagagagaggaaagggtagatgttgaaggtgattggtgagacggaatcagctaggaatcgaacaatagagatcattaaggtttttatgtctgatcgaaaatcgccggaagaaggaagaccatcgctggattcgtagacgtcggcattaagaggaaccgtcactttgacttgccgaccaagaccagctttaactagagctgcttgaacgttttgcagcgctggatatgttgatcggacgaatctgttattataggtcttcaagaatggctcattccccaccgctacatatctgatcaccgattaaaaatccaatctttagaaacttcaagcatgtttttagcttaaaagtctaagctttcgaaggttgtttttagtttaaaagtctactcttcagaagcttaagcatgttttagcttaaaaatccaagcttgacaaacttaaaaacatgttttagctaatggcctattgaactgcaatgcaaattaccttatgtcggttccatatctagagatgtattgagagacgttttgttgaacccaaagctctgcgttggtaacagtggatgccatagttgccaagagatcgttggggataccgaccatgacttgaataccggatttaccaagagctctgagtgcaccagggtcagcttcaaatagcttaactttgttgaacccattgtccctaaggagtttcaccactatgtttggtggtagtggatggctcgcttgtgtaccccagttacatgccaagccctccacattcttcaatatgttttgaagaaagaatatggataggcaaaacaaaatgagtttttggtatgtatcatgactactcatttctctaaaagtgtggggtttgggtttcagaatgtggggtctaatgagaatttgggttttatttgtgtatatatacaaatatagacagagatatagatgtaggagatggggaagatgagtatatggaagaaagagggtaaaggaaaggtatttgtgttagtaattcaataaggaacttgattccattggtggtaaacctgaatttaaaccatccaagtaactattcagcatctcttatgtatttgttgcacaaaacaaacttattaaaacatattattagtgattaaccattgatgctaatatccaataagtggcagggagaagaagaaagggatggagtgtaaaagatggagaccatgtcattgggcatttgcagtttgtttcttagagaatattagaagaaagtctataaacttttgctaacttcatggaatctcacgacccaattagccaaactactatatgatagcaagtcctaaccttgagattcctcacattgtgtatcaagttaaagagatgtcaaaacattttctatgaagaaatctaaaacagttttatgttttagacaagggaggtcaaagaaacaatcttgaaagacaagcatcaagaaccaaaaagggtatttctccgggaagacaaatcttcaaacttgtgaatttttgatcagacggcaaaaaggactattctccaatctacgagccatcatgatgatatcactcaaaccctttggttgaaacacacgaagcatttcctgaatctcctccttaagccctttgacgaatacaacctcaagtacagtatcaaggtcatccaaacactgcgtcgagagatcctcaaattcaccaagatatgatataacagaatcaacctgtttgagagtgagcaaacgttccattgcagatctaggatcaccaaacctctgtaaaaccctagctttgaaatcattccaatcaacaaaagggttacggttctcaaggttaaaccaacacaaagcacggccttcgacactcatgtaaactaattgaatcttctccgcgtctgtgaaacttccaaactcgaagtatcgttctgctctggtgagccatgagttaacattgggaccttcgaagactggcatctcgatcttgggcttcatcagctgaatgtagcgagacatacggtgcgggtgcgtgtcgattgagttatcctccgccgcggtcgattgtttcgtaggaggtggtggtgctacagggaggtcatgatccaccgtaactttagtagattccgacgttgctgtagctgtgggttgttgaagaagtgctgatttcatctccgccatggaatttagagtctcggacatggaattgagtaactcaccaaccgtcgagtgaagtaaagccatcgtattttgaactccacgcatcgattctatcagtgaatctgcggaatcgtcgacctgatctagaatctgtatcgctgccattgaagatgaatttgatagcaacgaacgaacaaacttctcctctacgaaaaaaccctctttttctatacatgttttatttcttcaggaaacataaagagtggaccccacagtcgacctactcatcaaaacgactgcgcttcatttgcttgcccccccccccccccccaattttctctgtcccttgccaatgatatttttttttttttaacaaggatgtcactcacaaaagactaaacctttaatatgagtagactaaattagtggcaaggatttgagtagactaaacactaagaaatctttgttgtgtatattgctaaaattgcgtccaaggagagtgaggcttggttcgaggtagacatgcggccggaagagggtgagaaactgagaattaacctaaccatcatactttcacttgtagtagtaggttgatggttcatgataaggctcatgagaaactgagaatgaacctagtggtgtcggctggattttacaactttaagatggtatggttgatcaaagtatcaacacttcaccaccaaccagaaaacatttgtatttgggaaattaaggagtttggtatgtattattctcactttgttacaatcccacaaatctagttaagatggttaaaaatagtgactttgttaaaaatagaaaggttttatcaatgcaaatttgattagagattcgtattagaaagattgattaccccccataggtatgtgaatgtaacatttgctgacgatcgaccagaaatctgatggtttgaaattaatcgatgatattattattatatttcctaatctaacacattaaatcccccaatttacaaaaattaaccactctcactacttaaatttctaattgatcaaaatcgatcccactaaataaaaaatcaaataaaaatcggaaaagacaaaaaaaaatgaaatcagacgtgaagatcatctccgaagaggtagagaagccgttcaacggcccagctaggttcgttcttcgtcggccaatcaccacacgacgtcgtattagcagcaagtagcggagttctacaaagaggacacgtacggtgattatcctcctcaccttcgttattctcatcaccaccgcaacattcataatccaaccaccggtcaatacactcacggtgaaacatatggctacagttcctgagttctctaacctcatctccatcttccagatctccgagacacacagcgcaggtgtcgttgatcatcgccggagatctctcagctgcgtcacggaacgtcgtcacggagaggctttctttgatcgcctgtgaggaaatcgaaggacaggcggaagtggaagaagaggtggatctggatctggatcggtagcgtaagatccaagcgaggatccatctcaagacggtgatgagaacagccattttgtagagaagctgagtgactatgagaccagaatcttcgatgaagaagctcattgtgatgactttgctcaagtatgtgcgtttgtgtgtgtgtgtgagagagagagagagagagagaaggggaggagaaagtggagaatgagattcgtttttaatagaggaataaagctgcttgttgctgatgaatgatgatgctttgctttatctttattagtggagcctttaaatttttctactattttcattttagtttaatttaaactttaaattaggtttattttgagtttaattattttaattttcaagttgcttggagatgattttatatatattacaaaacaggtgtcaagttttcaattgtgatgatgtacatgactaaaaagctatgttggtttttaaaaattgggaatattctgctttaattattatgtaatgggtgaacaatagtatatgatttttaattagtcgatgatgagacacataattgctgctttacatgattagtttaaacgaatcattcaaataatgttgaaatttggagatactcaaaagattccggtccaaatatgagtaatgaaggagaatataggggtcattatgtgaaagttttaaacaaaagattcttacagttttgggccgtgtgtgtaacgagtgagtggggggacaaaactgcaaatttataaaagttaatagactatgacaagaagaaacaagtaaatgacgtgggaacattgcaatttcgtaaaagttatagactatgaattaataatgatgataggaatcaagtaaatgacgtttgcctaagtattttgtgccgttcgtgtcacactttagtttttgccttttttttttctttagcaaagcacccctaaagagaaacattattttatgttttgttatcttgtttttgatgggagatgaccatttgatgaccataaagagagataaatactgtaatatgttaagttgattgcttacaatatattactatgataagctgattgtatatggcgtcatttctggcttttggcccatacgcagagacaatttttctatctaccttacgtgattattgaccggccaatatgttaattatattttaatacttacgcttatgtaatacctttttctctaatgaatgatatggactgatttacaaatactccattaatagttgatcaatcccattggtcttgctttcgttgtccatatgactcatactcgacccgaatttcacagtctaggaaaatgaatcgggtatatgataggataacgcaactaactgtttgggaatatagtatattcataaagtccaatgagttattttgtatcctagtcattattagtttgctacaaaagaatcaaataaaaatggtggccttgacaaaaaattgtagtaatcaggagattatcaaaacaagacaaggtatcaacaacaaacgtttaagagatttcttcacaaaggaatatgcattgctctgtcttgatctcccaggaactataataaagataaagagtcttgaataacagaatcgtgataaattcttgaaaatcgaacacctttggaagcccaaatttaaacctaggatgacatgtcaaccaatctatcgaaccttgtccctagagtctagactatgaattcatgtcggctcaatattatttgttttattataattttctgaaaatgtatagtttatgcatttccattaaaatttcttgataaactggtgcactttttttgtgggacttttaactgtttggtaaaagaagttgaaatatatgaaaccatgaattcaaatcaaatcatatataaaacaacaaaatcgaaaaacaaacatattttttctggtaagacgattgataaagggtcgctataattaaagtttgcgattgcaaggacccatgttttgatctgctctgctttataatgtggtttggtcggttgaccaaacctttacaacgcaaaactacctcatcgttgtaggtgatgaatgatataccttatagatatttatttatatataagatggcctacgattttttcagaaatgggatccttcaagttttcctttggtatccaaataacttacgttttggtacttcgtttttcttttccacacatccctattatatcagaaccatctcagtgaaaatgccaaaatgggatgcaggtagaaacagaagacacaacgtcacaaccaaacaaattaaaaactttggagctaacacttttttcaaacgtctaaattcaaactcaaaacaagattaaaaggaaacaaaacaaaaagatgagttctaaggaggagcaaaacattaaacatattagaaaagttgtattctgatccaaatcgaaaacacaatcatggaatctctaggctcccaccacgttcatgtgtttgtgttgagtttttcacatcctgtcttctctcctcctaggagcacatgtaatgatttcatccactcgcaatatcatctcagatgcttctgtggctgaaagcagaaccgcttgcttcactttgaatgcttcatagattcctctctcttccatatctcctacctgtaaacaatcaatcatcatcatcacaattcaagtctagccttgcacattcaatggcgaatcctaatgtttataaagtttacttacagctccagtgatgacgtcgatcccagcgttacacccttcagtgtggtgctctgcacgaagctgagcaaccaattcggcactgtctaaaccagcgttgtcagcgattgttgtcggtatagcaactagagcacgtgagaaagcttcaatggcatgagattttttgccagcagttttccttgcaagctcatctacttcctttgccatcaccatctctggccatccacctccaagcaaaactctagtatcattcactgtttgagagagtacacataaggcatcatggagtgatctttcagcctcatctaggacatggtgactgcaagaaaaaagaacccatacaaaaattgattagtgaattagaaacagaataaagtttagacgaagtctttcaagtaatgggagtgaaaatggatacctggcccctcttaggacaattgaacaagcctggcccatttcacaaccagagaaatgaatcaacttgtcttcaccaatcatgatttcttctataagcttgcaatgcccaagcttaacagactctgggttgtcaaaggtcgaagcaatttcaccaccagtaaccaaaccaagacgctctattccctcaaagtcagcatgctcaatagcaagtataccagcatcagcaaagagttcctcagggaaattgtagatcaactgcctgttaacaaagcagttgattccgtggcctatgatcttcttcaccttgtctttcattttttccttctcagccccttcaatctcagcaaccttggtcatggaatccacacggacacgtgcaccgtaaatcttcactttatcggtatccatagcagtattagctactaagatatttgcattctctatgcgcttaggctgcccaattcctattttcttgtcaagaataaacctacaggcatagattttaagttgaggtgacatgagaccatattactcgatagaagaagaaacacaacacaacaagatgacatgatgactatcaacattccaaaataacactataaatgaaattaaggtgcgtaagctatgaagaagaaaagaaacacgacagagttaccatgaacagatgaatactaaagaaagatcaatagctcagaaaactgaatttgaactgacgccaaaggcacaaagtgttgtcttacccttcatccaaaaacgaatccttcagagaccctccaggttttttgatgatctgaatagcttccaagtttgtgcttccctgttgaacgataaaagcagaatgtcagaaaaaaatcatataacaatccaaaacgaaacgatgcaactatgggaaagactaatggtgaaatgataatagcctaatttcatgacatttcgtcaaaggaagatcttctttcatgagataacacataaatcaagagaaaaagaaggaaggaacacatgacattgctgaatcagtttcaaaaggaggaagaaatggaacctttagcctgaaaacagcatccacggccatttctgcaaaatgttccttgtcctgtgagagaattttggaacataaagtagtcatcgcaatcttcaacaagtctgacctaaacttctctgcattgacaaaaatacaatgctgtaaaataacagtgtgatttccgttctgtattcaactgaaaggaaatcaccgcttgaacccaacagtcgaagtaatcacacaaacaagaaaatgctatacttaaatatgtcagcataacaaggtttaaccatctctataatgattacctgcattgtccttgttatcaatgactcttttcagtaaagcattacgagcacattccgaagccattctgtaacctaagaaaccagaaaacgaaaaaattagaaatcattgccatagtgagagaagctgatacaaagttgacatcttaacacttaaagctccaaaagtgtacctgctatgatggtcatagggtgaatcttagaagccacaagcttttctgcttccctcagaagctcgccggccaagacaacaacagaggtagttccatcaccaacctcatcatcttgaactttcgagatgtctgaagaacaaaccagatacaacgaactgtgagagaaaacccaactaagaaaaaacgaatgtgaaaacttcatgccagaatgtcgcagggaaattacataccaacaagaactttagctgcagggttgtctatgtgaagtgacttgagaatagtagcaccatcgttagtaacagtgaccgcatgacctctaccagtagattgcaagattttatcctaaacaataataaaaaggattcaacaataatcaatagaaccaaattgaaagtttgtagctttctaaatattcagagatcggaaattaccatgccctttggccctaaagtagacttaaccagatcactgatagccattgcaccaacaaatgatgcctaaaagagcaacaacaaaagaaaagaaaatcagatttaaacagtagaagagtgaatctgaaaaaccctaaatcctaatcgattcaaaagactcaccatcctcgcacgttctcccttctcttcactagcatcatctttgaagatcttatcgatctaaatacgaaatagctaagttcagttaacggagagcactggggaaaagcaaaaggattgaaagagacgacggaggaacattaccggcatcgggaagagcggaaaaagaagaaggaggcttcttcagtatcggagatatccaagttagtcgaatctgagactagcgagaaacaatagatgggatcgttcacgaagaacgaacaagccgagaggatctcgaaatattgagtgtgcttttgaagaagagtagaaaatgagaggagagagccaaaacccagatctttcggaaccctaaatgaaactcgtaaagaccaaactaccctcgtatttcccagatttcttatgcgcccttcagtaaaaactaaaaagtttagattaacccttaaccaaaaagttataagttacattaagaagtaaattttatagtttcgacaattttgcattttgtttgattatatagaggaaaaaaaaaaatgttccatatacaaatttgaatttggtgatgatttagcggtcgaatacaaaaacagaaataaattaattcgtgatttgtatgcgaatattgttactaaaaaaaactataaatgtaaagaggcttataaaatagaaagagaaacattataaatgtaagcagtcaaggtccattttagaagtcattttaagacgactaagcccaacagtactttaagagcccaatgaatcaaggtccagcaaactcaattagtttaacgtctcagccacttataaattatacacgtttggagttccggataaccgaaatgagaaagcatgtcccacatagaaggccaacgacaccgtatcatattcgagcacgtttctaattaccctcttgttgtcttttactgtcgtagcaccaaaagtcaaacaataaaaatcaatatctatcgccaggtgtcaaattacaggagcttctgagaaggataaatctcggaggttcccggtctgaacgacgtagagacgaagcgaaacaaaagtactctaagggagagaagtatcaaaattctcatcggaaaaagacagatctacaaattttgagagacaagccatgactaaggtgaaagatgagccacgcgcttccgttgaaggtggatgtggtgttgccgacggtgacggcggcgcggctgagatcggcggtaccggatctgttgagaaatcgattaacgaagttaggtatgagctgtgtttactgttgatttcacatgtttttatctgtttctctctttgctttgagtttagtacttaaaattgtatcttgtttctgataaggaagatcagcatttcgatctggttactttagtttctatttagggaaagtcatatttctcaatggaaccaatttgttttttggctggaacaattggattcttaacaaacttgtgtttttcaaagtcctttaatgcatacataagttttcatgtgaatttgattaatagaacttcaccgttaacatgtgaaattggagagactggattcatatgtggagagttttcttaatgttgcatcaataagtccatctttatagtgtcggtcacaagtttaatagatcttctgctattgaaggtccacggagattcaaaccgctgagccaacggttcctccaaatcaacttactattttctttggtggaagtgttactgtgtttgatggacttccatcagaaaaggttggtccattagagctttgttgttgtcagaaaaacttcagaatttctgttctcactgtgatctatgcctataggttcaagaaatccttcgtattgctgctaaagcaatggagacaaagaattctacaagcatcagtcctgtctcatcgccagcactgaacagagctccttctttctcaagcacatctaatgtggcatcaccagctgcacagccatttcctattcagccaatctcgttttgcagatccacggctggtaagtattcgattcaactggttatagtaatcttcaaaccttgaaaatggatactctcattagtttcttacaattatgtttgccgtaacagatctacctattgcaaggaggcattcgcttcaacgattcctcgagaaaagacgggacaggtatgcagcctttaaaattacacttcatccttctccatttcaatggaaattcaaatctgatctattttattcagtttttgattgattactaatacagagcttgttaatgtacctgtgagagacttgtaaagacagattgatcataatgtttaaccttgatattgcatctaacaataacattcacttttttttatctgcagattggtcaacaaaaacccttaccctacttcagacttcaaaaagacagatgtcccaacaggcaatgtctctatcaaggaggaatttccaactgcttagcagaagatcaaacctccacattaagcttataagcaaactaagtaaaacgttttgtcaatatagtaattaatatgataatctatcatgtacgctgctgtgtgtaatgtgttgtatgatagtgtctgtataggtttgctagacaaaccgaagattgtttccatgtctgggagtggtcagatatgtttgccattttacaattctactgaagaaactattgtagttagtaacactgtcctagagtctatctaactaatgactctttgatgttatgttattgaacttgtcatctcttcaagatacaattgtgtgtaaagtaaagaagtctgtgttgttattataagctttcatacaaaagacattgaatctatatgtaaaatgggatttataattgtgaatgatgaacaacaattcggagatgtttcaaggaaagacaatgggagtgtgccataactgattgaaatttaaacgtacatatattcacctccgcggacagcattctctgcgcccttcctctcttcttcggcctctttctctctctctttccagttttcgtatttctgatcgtctgttggtaattcatggcggcatatagggcaagagttatgctcgtcctgccataaaacaatatgagcataagctttatgttcttacttactagtaagcttgaaagaatgggatttttttttttataccagccaaggctttaggcaaggagggtgaaatgtgtgcttgcatggcaattcctgcatcttgtcgccaataactagattctccttgcagatgcaacattctgcctctgctccaaactttttaagcaattcctcggtgaaaataatgactgggagtttctctacaacttctttacttgccggtggagctcttggtggtccaccatcatctagtatctgcatagaacacatcatatatcacttttcaatcatgaagctaagaaaaagacgctaccaatacaatattagaggttgaggttaaacactcttgatacagatgagtgagacaaccaagtggagaaactcaatatgcaaaaaacaacatatgagtagaatgcggatgattaagaattgctttcatctctatctttaggtgaagaaacttgtgatatcagctatgtgtgatagtacataatctaaaactagtaaggaagaaaagagaaggcattacatctggaatgatcatgtcaagaccattgataagttcttgcatcaagttagcagtttccccaatagtgttttcagtaggaccattagaggattcaccaccaacgatagaagcgaaagcagacatgagattctgctgtactagccactgaggctgtggcggctcacgatcaaccgtaagatgtccctcaaaaagataacctgcaaaaaattcacaagagaaataaaaatcatctccagataaatttcacttaaaaccatcaaaagccaaactaaatgtttcacaaaccttgtgagctctctgttggctgattatctacttcgcttaactgctccttagcttgagcaacgcaagatttcaaatgtttcttctcagaagcatcagagacaagtcgctcagcctcttcgaaaagactcagtccagcaacccaaaatccagtagctgtatatcttgtcttaagaaccgtagcgacacgagatacaactatatagaactgcaatggcaatcaaatcaatactatgtcacagagggtaactaaacaaaaacagatcggattaaatgaaatttttgacatgaacatgaactttctccacaattgaaatagaaaaacaataaaagaaagatatttgattcctgattcaatcctcaaaagttaaacccatcatcagacataagcaatgagtaaacgtcaaggcaggcataaaccctaacaattccgaataattttgaatctattgatccgaaaatctaagaataaaaaccaacctgtttgcggagagaaggagaggaagaagagtagtgatcacggagaagattatgaatagaacaaacggatgcttcgaatctcagctttttgttcagctgtttctgaagatcatcaagctcaagcttcaagctttcctcggaaggagacggtgaagacgatgcatccattcagaaatttatttcttagagttaaggagaatactcaggggtttcgaatgattttggggattttgtaagaatgatgcaaaagaagaaccaatctcttgtcttctgggatttttgtaggagacgagttttcttgatcaggaggaaaggacgaagtcggtcggttaatatagttcagttcggtttggttcggttcaagaccaaaagaacaattgttaattaccaattgttcggtttggtttgagaccaattttttgttggtaaatactaaatcgtatgcggctatattagaccaaaccgtatacattatttgttttttgtagtatgattgtaactgtagataaacatagtgtatattggactttctgagccttccacgctttaatttgagatgttgaacgcaatgcctgtggacgttaatatcattagtctattaattttgaactaagaataatcttaacacaaaaaagaagtccatggatttactaaatcaaccttcaaggtgaccacatgaacctgacagagtaaaaggttttgatcctatcccattttaaaagtcaagtcataatcatattccaaaacaaaataaaaaaaacaagacaagtatttcttcaactcataaactcatacagaagcagtagaatagctccaaactccataccaaggtcacttcaccttctaatttctcaagtcttcctgcgactaacacgagcaacaaaccctgttttgatcggagccacagatcgttgagatccacactgcaaaaaccatgtagcccactcgttaatcacattagcaaattcaaacacacaaaatactttattactttgttgcgcagaaagtaaaactgtaaaacagaaacaaaggaatgcatatcaagatcaggactaattagattaacttataccttttcacatctcagaaagaagagacggttctccttggagagaatggtgtctgggctcttgcaaccaaggcaaatgacgtagtcagctgagaaataataaaacaagaggttaacaactccaaactgatatacttttatggcaacttaaattttgagactaagaagaaagttacttactgatatatcgccgcaaaattccttcaaaattcttaggtgcaaaccttcccttaacaaccaacctttgctgcccatcaagcgaaccactagtacccaactcagcaagcaagtattgcataacatgatctggttgacgatgcatcctgattttttatatgcagataagacatgtcatcgaaaagtcatcaaaattaaatggtaatattacttatggttacacagaaaaagtttgaagaggaagataaagagttagctcatacgtcttgcaaaggtccatgaagttgacaaagacagtcttctttgtcccctcacgaagaacttgaggaggcctcataactgtacgacgcctatctccagcaagctccggattattttcacggagaatgttaaagactctaccaagaagctgcatatataactcccgtcagcaaaaaaacaagggagcaagatatttatgaaggattaaaacaaaagaaatcatcgaaaatatagtcacctcgtcatatatgtaatccctctcacttccctcccaggggtaacgttgctgtagaactattccttcttccccctcttgctcgtcattagcaatctctgcaatatattctcagtaagattcaaacaggataaaaaccccgccaagagaaaaggtatattagcaaacaaaaaaaaaggatattaaaagtaccatccaaatcttccccagcatcaacactttcgttgttcaataagcttgattcagtctaaatatcaaacaagaacaaatgtgagtcacagaatcatcaaacacacaagtttaatgacataaaaaaaatactaggcacaaaacgtaaaacaatactcactggcttcttcttctttttcttcattccagtaaatgaactctcaagaccatcattaactgcaaaaacaaggaattagacaaagtaacacaaaagaccattgaaacaaaaaaaatgtttcacatcacattgactcttcatcatacataccaggcaatgaatcagatttctcagtctgtgaagactctgctaagtcctcgacaggttcctgaatcacaaccttcttcttctttttcttcttggaaggatcaaagggtgcgagctgctgtaaaaggatgaaccaaaacataaaaaccattcaatcatgagttcatcaaacaaaacaaaaaaaaaaatctatatggctaacttgagccctatcattaagaaacagagaaaaaaaacaaacttacttcttgctcttcccttatctcattgatttcatcagccatgattgcaactgagatacaaaacgaaaacacacaatgataataagacctcagaaaccaaacatatacatattagaatcaacataatctgtaacaacgatgagcataggcaagtccgaaattagggtttctaaatcagagaggtaattcggaacgcaacaaaaccataacgagattcagaacaacttttcgattcccaataaaaaaaatacccaaataaaatgtacgacaaggcttcaaatcagaaacggaacagctaggtttaccaatctgtttatactcaattcttccaaaaacacgatttactctgagatcgaccagaagaattcgaaaaggaatcgaagaaaactcacaaagggatgtctaagcgctgaaattggcgtagagagtaaacgaggttgcttcgggaggaatctgagagagagtaagcggcgcaggggttgttttaatctgagataagagttaacccttgctcctccaaaaaaatagtccatctcgaattgtaacttttttttttaattcaatagtaaaaggtctctgtaaatatttcattttgcctaaaccttaatattacatttttacttttttctttttcttaacgcatgttacattttaattttatctattaattgacactgagattctcatttattattttatttgtcttaattaattaatcaattgaaattttatcaaatcaattttttttttttcaaattaagatttatttcttattaaattctgtgaatagtaaattatataaaaatgttattaaatataaatgaaactagtaaagaaagaaatcagaatatatttagtgtcaaaattaatagtctagcatatcttattttactataaattactaaattatattattttattatttaatatattaagtattttagtttgttagatattcagtaacaaaatttccgcaaatgcattaattttcaaccgctaaattaatcgttcaaattgtttaataacgcttgagacggcaaccgcctacttccgcaaattcatatagtcataatcggattttagcgtttaaaccacgagtctggccttagatcaaagaaaaccctacttatagtcaaccctaatccatgataccaaatggagaaaaaaaaagaaagaaaaaatggaaatttcccaaattaacacacccataactcaaacttgtctcaaacctcagattatataattaggctaaaatctgataaaccaaaaaatgtatcagagtgagtgctaaagagaactttgtgttgacctctctttccctcctaattccttagggttcctcgatttttctttttcaccgaaacaaaaaccttattcctccttctctttctctgtctatctttctctgtacgttttattcactttcctccacgtggatttgcataaaagcatgaaaatttgttgatgggtttctcttcgacatccagattctagcttccaattccgtaattctccgttaaaaaaccctaatttctcgaatttactctgatctgtgtagaaattagggagtgaagtgtccgcaagtgtttggcaatgtcggatgacatggttttgcatttctcctcgaattcttctaatcagtcggatcactctttacccgacaaaatcgccaagcttgaggcccgcttgactggtaagaccccttcctcggccaagccaccacaacaacaacaacagcagcagcagcaggtctctctctggtcatctgcttctgccgctgtcaaagtcgtcacttccacaccgccgggattgtccgaaacctctatcagtgattcagacgacgaggtagcttccgatgtttgtttcaaattcttttgtttatgtctatgctatgattcttgtgagtctaagggtcgttgctaattgaattgttgatgtccctatcctccttgtattgatcagtttgtgcctaaagattgatcaaagttgtatgcaatgctggctacatatcctggcattgcagatgcatctatatttctttcttgaacaagaaatacagtctcttttttagctagatctcattctccttgttactgtctcagaatactggagatttcctaatccgagcaaatacaaaaaagcgccagaaagttcaagaatctaacaacttcagtgttgttgatcatgttgaggtattgatttttcataaagagttttcttttagtctcttatcgggttgatgttttttatatcaaatattggtgtatgatgtaagttttgtctcctagtatttctcatcaacttataatgaagaatattgttgaattgaagccacaagaggcagcatatgatggaaggaaaaatgatgctgagtccaagacaggccttgatgtaagtaagaagaaacaaggtcgaggtcgggcttcgtcaacaggtagagggcgtggttctaaaactaataacgatgtgacaaaatctcagtttgtggttgcaccagtatcagctgccagtcaactggatgcctctgatcaaaaggttagtattgtttacctcatcggaccttacatggaaccactcttctcatcatcgaggatttacatatatgagacttaatttcgttgacaaacgtggacacaaattatatgttttcctgaagtaaaaccttttaattggcctgtatgaaaaaattaagcaggacaagaaagaattactatgccttttcctacctttttttttgctgtttgcattgatgttgatgaccagacgcagtttatcaatgaatattttctgcattttattctccaggattttaggcctgatggacagctcaggaatggtgaatgctctctccaggatgtaagtttctcctataatgtcttttactctgtaatattggagaatatgtttgtgtctcatcgtctaggactaagctgcatgttctaagttggttagaataagtgaacgggattattatatatgattatcctacaacaatgaaactgtacaattatatctttctttattcactattttgttccttgtttataaatcaggaagacttaaaatctttgcgtgcaaaaatcgctatgctggaggaggaattgcgtaaatctcgacaagattcttctgagtatcaccaccttgtcaggaatcttgagaatgtattgtgtgaatgcctttcagatttagctatttgtgcctatgctattaccatttttatctattcccattcccctgctctgcttataatcctagtaatgatatatgcaggaggtaaaagatctgaaagatcaggaacaacaagggaagcaaaaggtacgcaaacttttgtttccgtgtcttaatagattattgagaatttttatgttcttttataaaattttgcacctactatggcatggttacttttaatattctcaatgattttgggagaatcttagagttaaacatttttctccataagaagcatggtagttctatcccgagaaagttaaatcaatagacagtctcctgatttgcttagaatgctcagtaaatttattgatggtgctgctgctaaataactgaaatatctgtgaaagcttggatcttgcaattgtctacgttacctatagtactccatttccagtgagctcttttcgtaaagcatttagtagtatttctttaggtaataattaataggcaatctattgcggagaaggcgatttaggtgcattgaatgtggaaccaaattgtaacgaactgggtatcttcatatcaacttggtacttaaattggcagaaacttttgcaaaccctgtagcactattactgttagtgtaatgaagaaatttatcaaatgttttgtggctgcttctctctgatattcttaataactcttacatacttatggaaatcatgcggaattatttggtctaagctaacagtgcacttgctaacagcaagctttgaacctttctttttcttcacgcagacaactaaagtaatctcggaccttctcatatctgtttccaaaactgagagacaagaagcaagaacgaaagtcagaaatgaatctttgcgattaggcagtgttggtgttctcaggtctgccataatatatttataattttatatgagttcttagtatttatccaatatatcattcatttctgtgatcatttacacaaggtttgaaattatatttcacagagaggtataataaaacatgtatagcaaatacaaatttgctttatagtaaaatctttaaacaaactcgaatagagttttagatagaagttgctttcacatttctcaataattgcagctctcttctttgctaagttacaaggttagttcttgattttgtgatcaaaatttaatacatatgcttgtgtgtgttttttggtgatttcaggacaggaacgatcatagctgagacatgggaggacggacaaatgttgaaagatctgaatgctcaacttgtaagttaagctgtgtagcgagggatttttatcaaactaataccaataagctttgaagtaactgtactgatttttctataaatttgcaacgaaaagagacaattgctggaaaccaaggaggctattgagagacaaagaaagttacttaagaaacgacaaaatggtggtatgttatcccagtatttttttgtttgtcagtgaatccgcaatctcctgtaatatatcttgtgattttttccttgggcaaattgttatgatgtttggcacccttggtttttccatttgggtgtagataagaatgacggaaccgacacagaatcaggagcacaggaggaagatatcatccctgacgaggtttacaagtctcgtcttactagtattaagcgggtatgttctttatgcatcatctcagcttcttgtttcctataagttgattcggttctggttacgtatcatacatttattggttttacctttcaggaagaggaagctgttttgcgtgagagagaaaggtacacattagagaaggggctacttatgagggagatgaaacgcatacgagatgaagatggttctcgtttcaaccatttcccagttttgaatagccgctatgctcttctaaatcttcttggtaaaggcggatttagtgaagtctataaggtcagaacattgatagatactacattcttttacatgtgagaattattttgcagtaatatgatgttatggattttaagcaggcatatgatttggtggaccatagatatgttgcgtgcaagcttcatggtttaaatgctcagtggagtgaagaaaagaagcaaagttacatccgccatgccaacagggaatgtgagatccataaaagtcttgtgcatcaccacattgttcggctttgggataaatttcatatcgacatgcatacattctgcaccgttctggaatattgtagtggtaaatcagaattctcctattcctttgtagatcctggagtacagttctgagttctcactcttatgttttgaatttctaatgcagggaaagaccttgatgctgtattaaaggcaacatctaatcttcctgagaaagaagcaaggattatcattgtgcaaatagttcaaggccttgtatatctgaacaaaaagtcacagaagataatccactatgatctgaagcctggtaatgttctctttgatgagtttggagtagcaaaagtaactgattttggtctaagcaagatagtggaggacaatgttggttctcaaggaatggagcttacatcacagggagctggaacatactggtgagcaatctagtttttgtctccttgatatggtctatattatttttgtctcttctacttccggacatcttatagctaacaaggttctataatataggtacttgcccccagaatgctttgagcttaacaaaactcctatgatctcatcaaaggtcagtgattggtcaatgatgtcataatctgattatcttatagaagttttgtggtactaaattgtgttgaaactcaggttgatgtatggtcagttggtgttctgttttaccaaatgctgtttggaaagcgaccttttggacatgaccaaagccaagaacggatactaagagaagacacaatcattaaagccaaaaaggttgagttcccagtaacaagacctgccatctcaaatgaagcgaaggtaaattaactgtaccggtcttaaacatggtttaagtaaagtagtaccaaatagtcatgaaactgtctctccatgttctcacttttgcattttctgcaggatttgattcgacggtgtctaacatataaccaagaagataggccggatgttctaacaatggcacaggatccatatcttgcctactctaagaagtgagattgtgtagtcttcaaaaacaaaccagagatgctaaaagaccagatcctagaatattttttggtatagcttataaagtttctgttttgtttgtctaaatattttatctcccggccccttgaaccatattaatttcgggtgaagttaatgtgtcttgtcttccttttattatgtaacatgttatgtatattcttcatgttttataatagaagaaagctgaaagttggaaacaggccccaaatcgttcttgcttctcaggtttaagacaatatgaaatgtgatcaattgaagaaataagaaatataacaaatccggctggagaatactggactggaactgaactaaaccgaagagtaaaccaagacaaaaccgaagattgaaaatcattggcttgctagtaaactactacgagacaaaagtctacttatccccccactcataccactaaaaaactcacacttgctggcttcttcttccatggctttatcttttgtttcttcaactagattctccaagatgcaatatggcatatggcacagtggatccttcacgcaacgagtcagtgtgagatgctgtgaaatcgcaaacgaggctccacgaccaaaatcgaagctccaagtaggatcaccgatcatcatcgtcgaagctcccaaagttataaaaacggccgcttcaatgccttgccttagggccaactctggcttggtcaagcctggcgatgttggaaggtcttcttcttcttcttctattttatacagattttaagacaaaactcagactaatcatctaaacagtgttttcttgccaattaaattagcttaattttacttctcttctttcttatcctattgtttttgcagaatcgtgtcgagaaaaccaaaggacttgtgggcagttagactctccattggaacatatcttttagatggtaaatatttcaaagctttagagcttgacgaaggagatagtgattgagaatttgagatcatgtctctaaaattgtataagcaacagaaaaatacgaattattattttaacattttgccattttaagttttggcgcaacaatcttattaatgaaccgaaattaccgaatcgaaaaccgttaatttggtttagtgatcaacccgaatccaaacgggtacaacgggtcgtaatgcgggtcaccaacgttcatcggcaactgatccactgtcttaaaccacgtccgagccaatttcccggtgaatccataatctccgaacaaaacatcagccactccttgaccttccgttcccggaagccacgccgccactagagcatcgatgttcgaaatctgcatcaccaccggacgtcccgatacaaccaccaccacacatttcaccgatgcgcacacgttcccgatcgtgctcggacctggttccgatatggttaagttcgtactgtctccgaatccctccgcgtacggtttctctccgacggccacgattgcgtaatcgaagtcaccggccttgacgaaattggtgtcggggttttgattgtagataacttgcgtcttcggatccaccgtcttcttcactgcggcgaggatcgttgttcctgcaacattcaatttcagactggtaaatatatgttcttcattagtgttgcatattgaaatcacaacacacaaaaagtggtatgaaaatgaatcttagagtatgtcacttgttctgagaaaccctaatgttcttctatatgatgatgattcattggaatagagtgaggaaaggtgtgtgtaccaatggtgagattgttgccattaaggccttgccatgtgattgtccagccaccacattggtatcccaagttatcagcatgtgttcctgcgacaaggatcttattggctttctttggcagaggaagcaacggcttatctgcgttttcaccattcttcaacaacacgagagatttcctcactgcttcccttgccagttccctgtgttcctgttgagtttgttcaatgttaagttgggatctatcttaaaactgtttttttatcttacagaccttactaccgagcttcttggccaagctatgatcagcaatgggattctcaaagagccccattgtgaatttgactcttaagattctctttacagcatcgtcgattctgctcatcgggatgaattttcgcttcacctgactggttagctcgtcgattaatttggtcaagtttgatgagcccatgaactgcattggaaaatttgaatcactttctatatctttgaaattaagaaccatttttgagactgaccatatcgagtcccgcagtggtagcagcatacacagagtgtgaataattagcaccaagaggtgtgttgatctgatcaacacctaaatagtcggagatgacaatgccctgcagagagatttaaaatctttctcatgtcaatactgaaatggctgcttctagatgctttgcttaagctggaattttctatgattatagttaccctgaacttgagtttgttcttgaggaaacccgtgataagtttcttattagcatgcattttcaacccgtttatggacgagtaggataccataactgttgcaacgcccttgtttaccgcatcgtgataagctggcatgtgaatccccagcaatccatttgaattaataaccgtgttgttcgcgttcatccctctcaatgtacctccatctccaacgaagtgtttagcacaggctgcgactttggtcctgtaagtttacccagtcatctgtctaactccatgaatctttgcttctctagagattcagtaaagtgtacttacttcccagcgacgaaaggaacacccttttgaccggtgggaaggtcaccttgcaaaccaggtatgatctcagtcatctgttgaactattttgtgatcctcactatagctctcatagcatcttccccatctagggtccctacacacctgttcaaagtgattaattacaaaaactgatgtttccgcttatgttcagattagattttacttactgcaatgcatggagcaaagacatattggattcctgttgctctaacttcaagcgcagttgcttcaccaattctcttcacaagaccaggatccctaacagatgaatacaacagtaaagaaacaatgttttgggtctatccattcatttgaaatgggatattttgtaagaacttgcctggtgactccgaggcctacgttatgcgggaaaatggtggcgttgtacacggtgttgtgaccatgaacagcatcgatcccgtaaattatgggaatacctaagcgggttgaaagagctttcttttggacctcattcaccatgttcacccaagcttcaggaccgatatatggcttcggcacactccctcctccgctaaacacactccctacaaacagacttctgaaactgttgagtgttcatatagattttaacaacgttgtgaaggtccagtatcataccgacgaagtacttttgcatgacttcggttgtggcattgacacgttccacctgaaccatctgtccgattttctcttcaagggtcatatggctcatcaggttcttgatcctgactcccagtggctcttttgggtccttatacttggcgtttgcgagtggtactttattagctgccacggtacagcagagcagcagaaggcctaacgtttgtagcaagtaacttgaactccccatctttgtcttctctttcactctcaataaaatagtcgagagctgattattgattaaccagttgagaaggggaagacgatcaagctatatgttgacgacaacaacgatgagtattacaatatttcgaacgagataaggaacatcatgaggttgagattttgtctatatgccttgtacttgggttgttttgcttgtgagatgatgtacagagacgtgtgaaaccatttccgtgactagagaacatcaacaaaatggattctttcccttttgtcaaataaaataaaatctttgtaaaagtaaaccaattttaactttggcaaaataacattctaaaaatattagcttgtaggaactactttttgttctaatagctaatgaaaatcatcatttttttcctaatttccatagacatagcaaatcatttgtttcttttctttgtgcgatttctttctttttcttctttatttgtttcatttgaagtatgtttttatttgcttgtcgctttgttgaaataggttggactttacttccacttcaaaacttttcatcttttttagatgaatatttttcttgcaagtttatgttgaattttgattttggactctaaaattagcatgttattgttttctttctttttctgaaatttgaaaaggtccctttgcaaatgcacacctgcatatgtctggatacgccctgcatgtggcacaagtctcatctcggtttatgagaggcccaaatgttagatatctcataaaatggaacaaaatacagaatcatacgggcaaataacaaaagctgattcatatcatcactgtttataacatactagttttgtagacagacaatctcaaagcctcaaccttaacttgagagctagaacccacaaaattgtgcatcgaagttatttcgttttgtcccttaatattgtcctctccttgccgaataactaaaagggagtctacattttgtatggttttgtggtcaacccgaaaccgaatgggtacaatgggtcgtaatgccgatctccaacattcatcggtagctgcttcaccgacttaaaccacgtccgggccaactttcctgtgaacccgtaatcaccaaacagagcatcagccactccttgaccttctgttcccggaagccaagccgccacgagagcgtcaatggtcgaaacataaggctgaatcaccacgggacggccagagaccacaaccaccacacatttcactgatccgcacacgtttcctattatgctcggaccaggatcacttatggtcaggttcgtggtgtccccaaacatttcagcataaggtggctccccgactaccacaatggcatagtcaaatttacccgacttcacaaagttcgcatcggggttttggctgtagacgacttgtgtggtaggagccactgtattcttcacagccgctaggattgttgtacctgtgtgtaattaaacaaaagtcaagattaaacatccgaattttgtaaggcaatgttctgtattagctcgcacactatggatggccaaaacctagcgattgctgtggttgcaaccaagacaaagaggttaaagagaactttatgagtaaacataccaacggtatggtcgttgccattaaggccttgccaggtgatggtccagccaccacattgatatcccaagttatcagcatgtgctcccgcgacaaggatcttccctgatttcttaggcagaggaagcagaggtttagcacctgtcttaccattcttgagcagcaccagagacttcctcacggcttcacgagctagttccctatgttcctgttaaagtgttctattcagtttcattctgatgatttgctaacgattggtatgatggctaaacaaaagataaacatagcagaccttgctaccaagctggttggcaaagctgagatcagccagtggttcctcaaagagtcccattgtgaatttgacccttaagattctcttcagggcgtcatcgatcctgctaatcggaataagctttttctgtatctgactgctgatttcgtctatgaactcagtgtagttgtacggaaccataatctgcaattaaacagaagcacaagcacaacaatcaagcaaccatggagcgcataccatagatgtgtaagatagaatcactattgagactaaccatgtcaattccagcactgattcccgcgtaaacagagtatgaatagttaagatgaggaggagtcgtgatcctatcaatcccctgccaatcagagatgacaaaaccctgcagaaaaaaacagaaagaagggccttaagaaccatagcacagaagattatgtgaatccacatgtatcatttcttaccctgaacttcaacttgttcttgaggaaacccgtgacaagttccttgttagcatgcattctcaaaccgttccaggcagagtaagacaccattattgttgcaacacccttgtttacagcattgtaatatccaggcatgtgaattccgaacaggcccttcgagtcaatcactgtgttgttctcatcaattcctctcactgtacctccatctccaacaaaatgctttgcacaagctgcaacttttgtcctgtaatagtcacaaactcatttcggtaagtaaatgggatttgtgttcgtatcattcactaatgcattaattaagttatgactgaaatgaatctagtcaaacaatatacttatagtttcaacgagaaataagctcattttatctccctcacatgtgaaagatagtaataagttcacactggtccctacagtggcagaaaattcaaaccacgactctttaagaacctgtctgaacctacaatagatagatagacttaaaacgtatcacatgggttggccagtcattcattgccagacaggctttgcacttggaaaattgaccaccactttctcaatgaaagcacgcgtgagcatgacctgatgattttccccactctgatcattgactcaacatacagaatcaattcaaatcatacccaaatgtaatcgaaaaagaaagcaagttaacatgagttcttgccttaattgtatcttcataaaagtagttttaaaattctcctagtgactatctataaacatatcacagaaggaagattaattacaggcaaaattacttactttccaccaacaaagggaacaccctttcgcttggtaggaaggtcgccttgcaaaccgggtataatctcagtcatctgttggacaattctataatcctcgctgtagctctcgtagcatcttccccatcttggatccctacaaacctgtcaaagcatatccacattgcagaaatattaagcatacacgtttcttaatcagttttctgcaacaacttcaaactagatagcttcattatacttactgcaatacacggggcaaaggcatatgggattccagtcgctctgacttcaagcgcggttgctgccccaatcctcttaacaaggttaggatccctaagagattagtcaaaaacacaaacataaagttgttcagtatcatagctatataaaacagaccaattccaacaagaacaaagtcgtttcaagtttgtgataaccagagttaaggctttctatgacaactacttgcctggtgactccaaggcctacattgtgcgggaaaatggtggcgccatacacattgttgtgaccgtgaacagcatcaatcccgtagatcatagggatcccaaggcgggtcgaaagagacgccttttgaatctcattgaccatgttcacccaagtttcaggagtagctttttccgagggcacacttcctccaccactcaaaacactccctacacaccaaaacccaacaaagtccactcatttaaacaatatatcgaacacttaacagacaataattcctccaagctcattttcttcttaccaatgaagtatttcttcatgacttcaggtgtagcgacgctgcgttcgatctgaaccatctgaccaatcttctcttgtagagtcatacggttcatcaaatctctgattcttgcacccaaaggctgctttgggtccttgtacttcaaagtaccctcagcagcagccacgatacagcaaagcagcatgagacatagcaccttactcaaagtccccatttttgcttcttccacagtttcactacaagtgcagataatcagatctaagctattgttagtcagaggaactgttccattgtaaatcaaatcatatagtggaagaaacaactcgagaaaagaagaatctaaaactgaaacacttccaaatctgaaaactttcagtacaagaagctacatttacatgaaagagctgaaaaaatcaaatcttttttttttggtagagactgactggttttgaaaagtcagatctttattagcaaactggtgaagaaaggaaagacagacgcagattagttgttcaaatgggaaaacaagaaacatacactaaagcaacagacgaagagatttttgaaaacaatataggaataaaagttacaaggatttggagaagacgaagaagcaaaggatgaagaagcttacagtcttggaaatggtatcttcttgaaactgtagaatgatgatctcttccctctagtagacgatagagtggtgatgacaaagacagagagagatcttgagaagtgtgctgctgctgctgcttcttcgtgctactctctcttctttttaataacactgaaaagttgctcttctttttcactctttttctcattatttttttcaagatttcttttggtcaaaattttccaacgattttttaaaaaaatttggaacaaaaaattatatattttgctatgataataggtttgacaaaaaaaaaattaaaaaagtttttgtctttttcattttaacagaaaaataaactaacttgtaatatgggaaaaatattagctaaaccctttttaaaaattttttaaaaaattgctactaccaaatattatggctttcaaaaaaaaaaattcgttacttatcatattctgtcggttgttattgttggctccaacaaaatgaaaatccctttagcaaaatcagtattgtctacattaattttgtttaaaataagagaaagcgtgaaataacatatctagatagatagaattatccactatcacaagtcacacgagtcgtaaatatcggcacgaatagtgtgggcgtacgtacactcaagtcaaaggtacatatcactcaattacgtcttgactaccacatgatgccgattatgtcatgacttaatatcaacgtttttttcaaaaacaaattgacacaaggataatagtaatatctcttgtctacaagttttaagcaatgaaagcaaaaagctttacgaaattgtagttaagttaattaaactattcaagatcttagatcacaagacgactaattattgaaacttgagaagcaaacctctaaacaaatattttggttatccgaaatagttttacaatatcttgctctattttaagagcgtttatgtaatcattcttcactgcaaaactgtacgaataattatactattaagaatcaaactatactatatatatttggaaaagtcgtttcagtcgtctaagttctatcacataacaaaacttttgttactagaatttcaaatcgaccaagttgtatatatactaatatcatcacaaatacatacataataatataaatgaacaatttgtggcccgttcgagtggatcatatcggagaccgtgatgcttgcaaggtcccaggaggttacgcacgttacactccaaacggtctcatattgcttttcagatctctgtaacggatacaatttctcgcttttttttttcctctctctctctctttctttactcttaaacatagagaataacatagagatgctttatttgactagtacatctcatttcttataaactttgaattttatgggttttgaatgtgatttgttttcttatagattattgatctttcttaggatgatttttggaagtttgtagtaagtagttttcattttgtagccagtgcatgtgcatggttttattaatcaattagtcttgcagatatttttttcctttgttttatttatttatttattgattatttaatttgccttgttgatcattgggtttcaagagagttttgttttccaatgaaagattagtggtgttttcagtatagagaagttagagctgaattagaagacaaaactctctatagtttattcataaattgatctctgcattagaagtaaataccaaagtctctctctcatatatcagatgtagttgtttggattgcataccctagagaatgagaattcgaaccaaaaactacccctacaaatcataaaccgaaagaaaagaatattgattttgactagatgtcaactttcttgagagagatttttaagagcaaaaaaatgtttttgaattgtgtcatacaattcctaatgggcctaacctaaactctgatgggctgttggtgttaaggttaatgtgtacctgagatactttaaactgtagacttgttgagtgcaaacagttgttatacattttgtctatgataacacctaatgggcctgacctaaactctgatgggctgataaggttaatgtcgcagctgattatatttgaacttttttcatttaaatatttgtacttgctagtaaatacctttgcttcagcatgcaaacaagctacaagagccaaatgctaccaattgtgatcttaaaacgtaatcggtaacacaaatgaataatttgacaacatcggcggaaaaagataaactatggtctcaatacgactgatgattgttacaaaaatgactaatttattttgttcggatatatccagatttttaataactgcaaaaacaagattggccggtatgaatcttaaactacactatcgctgaccacattgtcaatcgatcaaagctgtcatataaatgcatagacaaaacattgatgattaatccctttttgtcaacgaatcttgtaggtatttatttattttgtcaccaaaacatcaaatcacactagatacaagttggtccagatcgtataagtttgtttcacagtggtcaatgataacaactaataattcatatttttgtttggtaatcgttggcgatcagccgattacgactatcgagactgattgttatttcaatatattagatcctaaaatttataacgatcaaaatacatagtcactaattttttttttgttaacaaacaaaatttttagtcattctcgtgactccctaacgactacgaaacgaatagaaaaaagtgttgttggttgatgttgttgtggaataatattttgtaaagaaacgttacaagtatttaaatctagctcagtctttttactacttttcccacattcacttcaacaattgcttattttatttgctttcgttggaggacatttatcattttggaccatacacctagttgagtgctgaccatgtctacttcgactgctacgattagtcggtccggaataacatcaaactaaattgtaatatgttcattttttttttaaactgtaagatgctttcggagacttcgaatcttgcatgctgatttgagatagccttgaggggactggtttcacctatggagaagagaacctgcaaaataagttgacgagatgtagaaagaaaaagaaaagtggacgacatgtagttggttgtctactttggttgtatctctagctcacctgaggtgtggctaagctcattagtatctatgtaacgtgttccattagtctctctttttaagaattcggtatgtttttgggttttcgttgtacaatataaaactttttttatttggtataaagtttaacattaaaccaaaaaaaaaaaatgtagttggttgtcttcggccaaaattttgtggtttatattaatatctatgcccagataatcataatattaagtatctatacatcgaaattcagtaatcaattctctcttttccttatcataaatttttgacgaaaaagtctctataaaactgaaataactataatagtttatagtataggtgaagcatgttaaagatatccgggaagatatctcccgcacacattaaatacataaagatattgtaaattattactgatatatatagagttgtgggtatatcgaatatatacgctggtttaaatagaaactatgtggtctccttgactataagcaacgttcgaataacaaatagtatcgcgataatctcgtatctgctaaacgcgatgatatttccgttaactttttaaagaaagtccacaatcaatagactacgagtttaaatggtaacaatgttagtcgatataactactagcagataattaaaataataacaacgatgccacatgttgtccatttgttttataacaaaaatcaaaactaggaacacgttcttgatacatgttgttcatttgtgttttacaacaagaatcaaaactagaaacacgttctgataacattagtatcgcgataaccttttttcttcttcatcttcaaactcagatattttccactgggtaatccagtaacgatcttgaactccatctctcatattcatataggcatgaaagaagaagactattggttaattggagaaaagaaaataaaagaaaaaaaaactcccaaaacaatatctcaacaaaatctattcctacaacatgccctacgtacattctataattgacaaaaccaataacgtaggggtatatgagtaaaaaaaatgttaacagtactaaggcaacagttcaaatggaagagacttaattatccactcttctgagcatataaagtgatattatccaatctttatttgtatattatttgaatgctattgttgtaaactgaattatagagtaacaaagtgtaaaatactctatttatttcaagtgtggttttaaaactttccagtttccatacaatttaacaaaacatattaaaacacccattatacatctaaaagacaaatgaattttggtatcatggtttgtcattaaattagaattgaggtataagtaagtattttatgctataatttatatttaaatctaaaattttaaactataaaacaattgtaaaacgatactattttaatttatttgaaaaatggagagactgttaaacttacgtaaagttagacaacgaggcaagatttgtcggatcataatcacgggactgtagcctttttctttctcacgatattttatttaaaattcaagtttcatatatgcgatgctaaaaagtgtgctagttttgaagactataatatatacatggtctacttgaactctaggaaagttacacaattaggtgtaacaggtaattttcatcgaaagaatgtgctgaatataccaatgaacacaattattgaaataagtaaaaaacaatatttcccacctattaatttgttgcaagaagtgggatactgaaaaaaaaaaagagttgaagtggatttctctttttcactaattttccttttgacgggccatttgactaaaaaatagttatgtaatgatatttacttttccaatttctttttaatatgtcttctcacattaatattatttcttagtctgtttccattttatcaggtccctggactagtccactccactctatgaaattttgaaactttatatggtatttttaatatacgttttggtagtttgtttattatattcagtgttgtcaatatctcttacctcctcggattcaattttccagaagattcaaatatgtacaacacgtatccaatttgtggacgactagaagaaatacaagtaaacggtttgatttgtccaaacgttcttaaatcaaaagcaaacaaaatatggtgaacccttatttttacttttcattaacttacctttgttagcattatatctttcattattaatcttacctaatccattacgttcaccagataccaaccgtacaaatatgtataaaataatattgaatacgactaatcttatctgtgtattctcgtacacaggaaatataaagacttcgtgtctgttacatatatcgcaaaaaaccaaagcctccatttagagagtcgatgtcgtggaactaagttctggtttggttttatgctatgggtgagaaagcgattgacgaagacaaagtagaagcgatgaagagcagcaagacctctcttgttttcgccattaacggacaaagattcgagctcgagctctcttctattgatccttccaccacactcgtcgatttcttgcgcaacaagactcctttcaagagcgtcaagcttggttgtggcgaaggtatgcataacaataatcaaagttgatcgctctctatcttcatgttcttgaagtttttttcctctctaagaaaaagccctagtttagtgtatatatgaactagagttttagattcaaaagagttttgattaaatatacactctatgtatgaaccctttagctcttatgttcttacctcggtttctatgttttgagagactgattcattttcgaagactgatccgattttttttttttttgggggtcaaagactgatccgatttcgactccgattttaaacgctaatttctgcgacgatgattcattgatttattgtgccatcaccatgttatagtccagattcaaatctgatagtgcgtgatttgtaaacaacaacaaaaacaaattgttttcagcttttccataaaatattgtaatttgtaatcgtaattgctactttttaagttgtgttaactttaaataaaatactaaagaggggttattggatcaataattccaagaaaactccacatgcttttataatatcgaagggtttaattttgatattattttatactaagattccctgaaaaaagtattgaagttttaatataagtgaataacactaccctttaaactctcttagcaaataactgaaaattgaataatagtaataatgtgaagtgtgtttagaattatggtctattagtagtctattcaattcatgagtgaataaacacccctaaagcttgggtcctaagttatattgtatcttctttgtgtgtgcaggtggttgtggcgcttgtgttgttcttctttcaaagtatgatccattgctcgaaaaagtcgatgaattcacaattagctcgtgtctcacgcttctctgtagcattgatggctgttccatcactacctcagacgggctcggcaacagcagagtcggtttccatgccgtccacgagcgtatcgccggttttcatgccacacaatgcggtttctgtactcctggaatgagcgtttcgatgttttctgctctcttgaacgctgataagtctcatccacctcctcgcagcggtttctcaaatctcacggctgtagaagctgagaaggctgtgtcagggaatctttgccggtgtactggatatagaccgcttgtggatgcttgtaagagttttgcagcggatgtggatatcgaagatctcggattcaatgccttttgcaagaagggagaaaacagagatgaggttttaagaaggttgccatgttatgatcatacatcatctcatgtctgtacatttccggagttcttgaagaaggaaatcaagaacgatatgagtcttcattcaagaaagtatcgatggtcaagcccggttagtgtctcagagcttcaagggttattagaagtcgagaatggtttgtcggttaagttagttgcgggtaacacgagcaccgggtattacaaagaagaaaaagagaggaagtacgaaagatttatcgatatcaggaagattccggagtttactatggtgagaagtgatgagaaaggagttgaattaggagcttgtgtcactatatcgaaagctattgaggttctaagagaggaaaaaaatgtttctgtgttggcgaaaatcgctactcatatggagaaaattgcaaacagattcgtgaggaacacgggaacgataggtggaaacattatgatggctcagagaaaacagtttccttcggatcttgcaaccatacttgttgctgctcaagcaacggtgaagatcatgactagcagctcgagtcaagaacagttcacattggaggagtttctacaacaacctcctcttgatgcaaaatctcttcttttgagcctcgagattccatcttggcactccgcgaagaagaacggttcttcagaagatagtattttgctatttgaaacttacagagcagcgcctcgtcctctaggaaacgcattggcatttctgaatgcggctttctcagctgaagttactgaagcacttgatggcattgttgtaaatgattgccaattagtttttggagcttatgggaccaaacatgcacacagggcaaagaaagtagaagagtttcttacaggaaaagtgatatctgatgaagttttgatggaagctattagcttacttaaagatgagatagtacctgataagggtacttcgaatcccgggtatagatcaagcttggctgttacttttctcttcgagttcttcggatctttaactaaaaaaaacgctaaaacgacaaacggttggctcaatggaggatgcaaagagattggttttgatcagaatgttgaatctttgaaacctgaagctatgctgtcatctgcacaacaaatagttgaaaatcaagagcatagtccggtcgggaaaggcattacaaaggctggagcttgtctccaagcatctggtgagtgctctttgatcattttccaggtgaaaatgtgaaacattgcttctttgttaatgttgtaatatattttcaggtgaggctgtttatgtagacgacattcctgctccggaaaattgtctatacggcgcatttatttacagtacaatgccgctagcgcgaattaagggtataaggttcaagcaaaacagagttccagaaggagttcttggcattattacttacaaagatattcccaaaggcgggcaaaatatcggtaccaacggtttctttacctcggatcttttgttcgcagaagaagtcactcattgtgcgggtcagataatcgcctttttggtaagtttggtgaagaattctcattttctctgaatcttttatttagaataaaacttagattcaatatgttttatctacaggttgcagatagtcaaaagcatgcagatattgcagcaaatcttgttgtgatagattacgacaccaaagatttaaaaccacctatactgtccttagaagaagctgtcgaaaactttagccttttcgaggtccctccacctctgcgtggttacccggttggtgatatcaccaagggaatggatgaagctgaacataagattcttggatcaaaggtggttcttttccaagacatatacacctctaaagccgtgctcttttctaaccatcatataaaatctttgtgattgtgtagataagtttcgggtcacagtacttcttctatatggagacacaaacagctcttgcagtgccggatgaagacaactgtatggtggtttatagctcgactcaaacccctgagtttgtacatcaaaccatcgctggatgtcttggagttcctgagaacaatgtgcgtgtcatcactagaagagttggaggcggattcggtgggaaagccgtgaaatcaatgcctgtgagttcgcgtttcgaaagtactatcaagtgagagttttgatgttttggctttaacatttctctttctatcaacaaattgttttctaggttgctgcagcttgtgcacttgcagcatccaaaatgcagcgtcctgtgaggacatatgtgaaccgaaaaacggatatgataactaccggaggaagacatccgatgaaagtcacatatagtgttggattcaaatccaatggaaagattactgctttagatgtagaggtgttacttgatgcagggttaaccgaagatataagcccgcttatgccgaagggaatacaaggagcactaatgaagtatgattggggtgctctgtctttcaatgtgaaagtatgcaaaacaaacactgtgagcagaaccgcgctgagagctcctggggatgtacaaggatcatatataggagaagccatcattgaaaaagtagcttcatatctttcagttgatgttgatgagatcaggaaggttaatcttcatacatatgagagcttaaggttgtttcacagtgccaaagctggtgaattttctgagtatacgttaccattgctttgggacagaatcgatgagttctcgggatttaacaagcggaggaaggtggttgaggagtttaatgcatcaaacaagtggagaaagagagggatttcacgtgtgcctgcggtttatgcagtgaacatgcgatcaacaccgggaagagtaagcgttttgggagatgggtcaatagttgtggaggttcaagggattgagataggacaagggctttggacaaaggtgaaacagatggctgcatattcccttggtttgatccagtgcggtactacaagtgatgaactgcttaaaaaaatcagggtcattcaatccgacacactaagtatggtgcaaggctcaatgactgctggtagtacaacctctgaagcgagtagtgaagcggtaaggatttgctgtgatggcttagttgaaaggcttttaccagtcaagaccgctttggtggagcaaacaggaggacctgtgacttgggatagtctcatcagtcaggttcatactcttgaaacattcatgcttttgatgttctctggtaactttgaatgaatttacagtgctttactcttgaatattctggtgtaggcttatcagcaatcgataaacatgtccgttagtagcaaatacatgcctgactccactggcgaatacctgaactatggaattgcagcgagcgaggtaaagctctatatattaaagaatagctcttcttagcttacttacaaattgtgaaataattcacttctttggttgtcatcaataggttgaagtaaacgttttgacgggagaaacaacgatcctgcgtacagatattatctatgattgtgggaagagtctcaatcccgctgttgatttaggacaggttagagccaggaaaccactctatgtgccgttttatgttatattgttctgtttcatgattctcttattttattttgttttgtttacagattgaaggagcctttgttcaaggacttggtttcttcatgcttgaagagttcctaatgaactcagacggtctcgtggtaacagacagcacatggacttacaagatcccaacggttgacacaatcccaagacagtttaatgtggagattctcaacagtggacaacacaagaatcgtgttctttcatccaaaggtgacttacttatctattttctcttttactgaaacccaaaagatcaacaactcaaaaattctttctaaaccttttgttttggtttcgatacagcttcgggtgaaccgccattgcttttagcggcttctgttcactgcgcggtacgagcagctgttaaagaagctaggaaacagatcctgtcatggaatagtaataaacaagggactgatatgtacttcgaattgcctgttccagcaacaatgcctattgtgaaggagttttgtggacttgatgttgtcgagaaatacttggaatggaaaatccagcaaaggaaaaatgtttgatagcttgtgtttgtgttttcgatgtgaatgtaaaattgctctgtttttgtttgtggtttgattcgtttgaagcgtttgatagaatgtttgggattgtgatatacttgttgttgtaataagctgcatggcaatggcaatggcaatggcaatggcaatggcggtgttctgcttaggaaaaattatgtcgatggcaatggattgtgatgtaattttccattgttgtaataaaaattatgtctttcctgccatattatatatttaggaaaaaattatttaagaggcttctgtttatatgtataatacgatattattttttcctaaatataatatggcaggaaggacataattttagaagatttgagcatggcaattgtggtgttctgtttagagtcatcatcactcaacgttgcatattaatacaatattatttcttcatatacatatgtatgtacaataataatagtagaaatatacaatgtaattatatgtttatcacaaacgttaaaaaatttaattttgttgacagacaattaaaaagggatatttaatactaaactcaatccaaagaatcatcaaaatcttcaagacaaagaaaacacaaagaagaggaagaggaagtggtaaacccaaagaactaagccttcgtttcttcaaactaaaaccaaaactctttgttgtctaataatcttctttgcctataaaatcttagtgatctttctatgctttctcacaaaacaaaacatttacctataaaccaaacaaagagcagccaaaagcaaaagagagatagagaatggctaactttggaatcgaacgtgtttaccaagaatttgagcctgcaactagatggacctctgaaccagacgccgaggttcttgtcgctgatcttccaggtttgttttcttcttctcgatcttgtttatttgtgttcctttttttctacattaaacacatagaatagagagaaagattttggtaagagcaagcaagctcatattgtcttctgtcgttaggattcaagaaagaacaacttaaagtgtcggtaactgcaacaaggaagctaagactaacaggagaacgcccaactggtggaaacaaatggattcgcttccaccaggaaattccagttccattgaccgttgacatcgactcagtttcagccatgttcaaggataacaaactctacatccggcatcccaaactcaaaacagaaatccctcaaaccaagccaccaacaccggtgatcatgaaaccccatgatcagcatgagagaaaacaaggccagggtccaaaggcaatggttgagaagccaagcggtggtaaaaccgatcagctgaaacatgatgcacagcagctaaaacatgatgcacagcagctgaaacatgatgcacagcaaaaagcaagggaggtagtacagagtggaaagaataaattaactggtgagcctaaaggacctttgagttccaaggatgacgagaaagacaaagttggagcgaaatggtttgagaagtacaaagaggcaactggaaatgtggtaaaggaagcaaagaacaaaagacagttactttgcaatttggctgcttcggtttcattggttctgctaatcttactgtatgctagaaatgcagtacgttcatcccttgtgtggaaatccgaggaatgagtgacacttgcatttgtatttcacaacgtataagcttgtttatgcagaaaataaataacatttgctatattactctacatttctgtaaaaatgtgtgacgagaaatgacaaaagcttcattttacagatttctaattagccctagtataattaattccggtgccagaaattttaactagaattgaggaaaacaatcagaagtataacataacttccaacccaagaagaactgttaaatgaataaaaaacaaaaaaaaaggggaggaattctataaaagaagatgaaaatcgatgagacttgttgcatgcgtcaatatgaaattcattccaggcactcatagagaaattctacctacccaagcaacgattttgaggaaacttacttgaggaaaggttcatgacttatttagctgagagcggattagcttggcagctgcaaccatgttgctaagtgcagatttaacttcagagtaattccgcgtctttaggccacagtcagggttcacccaaaggactttgctgtccagaacagcaagcatcttgttgatacgttcagctatttcttcagtagatgggatacgaggagagtgaatgtcataaacccctggaccaattccagcaccgtatttcactccttcatggaagactgataagagcttctcatctgaccgtgagttctcaatagtgatcacatcagcatccatatcaataattgagtggatgatgtcgttgaaatttgagtagcacatgtgggtgtggatctgcatgaagtacaagaagaacattaaggtgtcatttgaataaattagatctcttcctttatttagtaattgtttcacgtccttcatcttgatatcacattctattgtccacgaaaatggcagaaaccacattatggtcaacatactcgtaaaaaacattctttaagtgggaaggagcaataaagtgaaatacaaatacctgagtactgtcttgcacaccgctgtttgtaattctgaatgcgtggacggcccagtcaaggtaaaacttttgctcggattttctgagaggcaatccctctcttaatgcagcttcatcaatctggataacagtgacaccagccttttcaaggtcctcaacctcatctttgatggcaagtgcaatttggaaacatgtctcatgcctacaaacaacaagaatggtgaaatggaataccatacagcgaaaggaagcttgagaggcttagatgtcacacctgggttggtcatttctaacaaaggaccaattgagaattgtaacagggcctgtgagcatccccttcataggacgttgggtcattttctgtgccattgacgaccagaaaaccgtcattgcctttggccgggtgatatcaccatagatgataggtggcttgacacagcgggacccatatgactggacccacccattcgaagtgaaagcaaagccagacagctgctcaccgaaaaactccaccatatcgtttctctgcaggactatgtcatatcaggggggtaaaaatgaaatagtttgaataataaacctaggttaaggtatattcccacctctgcctccccatgcaccaatacatcaatcccaagttcttcctgaagcttgattaccttttcatattcctctttgatagtctggacatagtcaacttctgatatcctgcaaatgcagcgtatacatcagtatttatataatgatatgttagaatatttcagatacatcactggattagataggcctactttttggccttgaattccctgcgtatccgtctgagatctgtggtctgaggaaaagatccaattgtagttgttggaagagcaggaaggttaagcttcttctgctgggcttgtagcctaacacttacttctgttgaacggtggtgatcagatttctttactgcatcaacctgagtaagaaagtaattaaagatacaagtccaggatacaaagagcaatttgttagaaaaccccttacatcctgctgtacagctgcatttgtcacccttggcgatgatcttctagaagcttgacgcatggaattagaagaaaacaatgcctacaaaaggaccaagacaatacaaagcctaaggttaactacttctgatatcaaataaaagcaaagtccagcaatgatccatgagatcaggtaaaggtacagtatatgagatataaattcattgggcatcgatgtagttgcagtcattgggacatatgtttaaagccgatcacttcaaccgtgggaaaagttataagtcaaagagtcaaagacaactagaaacgcaaagcctttccaatattaaaaaacctcagaagtactacataatgtaataagcaaaagatgtacctcatccttagctccagagaatgatttggcaagtgcattcacttcaacgaccttttgtgcagcaaatgcaagccaagattttagttctttatcaagtttcatttcattcactaagtccacagcagtatggagtagagagcaagaagtagaaaccacaactttttctgcaaagagaagagaaaggtttacatcaatctgaagctagataggaaaaagaagtgaaagcaatcaactgaaactttgtttactgacaccttttccaacaatgtcttcaagagtctgtagtgtcttgagtgacgcagaaagatcattcgcccaaatgttccttccatcaacaactccagcaaatagtagcttcccacgaggaaaattcatcttgattaaatcaagagtctccaatccacgaacgaggtcaaatccaaacccagtaacacatttcaaagacatcaatgtcttgtacgcttcagcaggaacatctgcaaagtatgtggcaataagaacattcaagcctgccaaagatgactccatgtgagagtacgcatcggaaaatgcctgcaattggctggtgtcaagatccatcacaagtataggctcatcgaactgaatccatcgtgcaccagcagacttgagatcagccaaaacttctctgccaaaataaatgccacataaaccagttatggtttcgagcactatccaaatgaaattgtatcttttgaatttattttggtctagctaatttctaaaagcgtcacagttggcgtaatattattcttacttgtagacaggaagaatcttgtcaatcagagaaagaaggcagaatgatttttcaacaccctttgctggttttgacaggagcaagtaggtcatgggaccaatgagcacaggaactgtgtctatgccaagctgtgccatgaacagccaaaaacacagctgtgaataagaaccttgggataaaaagaggaaagctgaagagaatagcaataccatcaattatctatatgccagtatcagctcaactaaaagttattccgagaaactaagtgaaaagggttccagtcgtcaacttactgctttcgcctccttaaattcaaccacagccttgtgagatgcataggagaaattgacgtcaggacccaactcaggaacaatgtaatggctgttagagcatttattagcaataataactgagaaagaaacttaacaaagagggaagaaagaagattcagttacttactagttggtatcaaaccacttggtcatttccatagcatgagcagaagcatttccccgtgccatggagaagtaaacatcaaacccaatctcaccactttcccaaccatatctagagggaacagcaccaagcatcgctgtggtatccaacatctgatcatagtatgaaaaagtattgctgggaatatatttgattccagcatgagccatatgtttccaaatcgattttctcagattagcagcaacattttgcaaatcatcaacattggttttcccatcccagaaggactccaatgcaaacttaagctctctcttcggtccaatacgaggatacccaacgatgtgggatgacattgctctattttgttttcacaaacaacaacaggattagtggaaaattcatgaatctaacaaataatacaacacagcatcaatacatttttcgaatgcttatgcaaattgcaaatggaggatgaaaaacaacctatggtacaaaatcgatactgcaaacaaacaagagaaaccataacaggattaggttgaatagtgaaaccataacgaaagtaaatagagttgcaaatacaccaacaagagagatagaatcatccgagggaaatagaagaaaacctggcgacgtagaatcgggggcggcgagaggcggttgcgcaagggagggacggagtagctgaagacggtggcgggagagaaggagggcgtcttggaagcgaagctaacggctggagtctctgaagagcgagctgacccatttttatagctttggtttcaaactgagctcctatttctgttcactatccggggaaagaggagactctctactatttcatttcgtttcccaggttttaattaaggtaaaccaaaccgaaaattcgtaaaccaaaccgaaaatgaatgtttaatcaaattgttgatattttctgttatttggcttatgcaaagtatttttctcatcaagggatatgcatattattacaaaaaagtagaaccttattacaaaaactacatttcgcaccatatatagtatttgggtttcgtgtaactaactcagcaaacacaaaacttgtcaaaagttttacagtcacaacagtgcagagcaaaatcacttggggctttgtggagaagctggagagttttagtgagtacaagaacatccagcctcttctttcttctctcccgtctcataggctgacttatagctttggtcccatgtatcagtcggtagggtggcttctgcgtgaggtatgtgcttcggatgtttctctctcttgtctcctttgatctgcttcagtgcgtgtttcaatgcaggtaacagagcctccatacactcggccactgcgtttgggtttccaggcatgttgattatctggggaaaccaaaaacatggaaacgtgagtgatgatggcaacttagatattatactaatgtgaagttagagatttgtaccaatgttgagcctctaattcctgccgcagagcgcgagagcatcgcaaatggagtgatctgtcacagagaaaaaaggacacggaatcagatgactgctcaccaccattcttttccattatgaagaaaagcaacaatgttcaatccaggtctggttattcagttttagaaaatagtgacctaatttggtttcaggattttgcatattagagaaagaagaactattctgactgtattgaagctcaattttttgaattggatgggtttggtttataagattaaatatcagtagagttaagaggtaagtaataaacctttaagctctcttgcatcataacaaagaggagaccgggtgtttctctctcgatcacctttttcgttgcttcaggtgttacatctcttggagtgaagccagtaccacctaattccaagatgttaactatatcaaaaatatgcttcaaatacaacaacaaatcaacaataagtaactaaatgtttgtataccaagtgtaagaatgagatccatttcgtcaacatcgctccatttctgaagaatgtcttttattctttccacttcatcggggacaacagctgttgcaactaccttagctccccccagtttttcagacgaggaatcaactactgacacagctctgggcccactacaccagcataagaaattcaaacaagaaatgatcataaaaccaatggataaataattgataagaccaaaactttcacacaaatttgaagtgaatacaaacaaaaaactatctggagagggtttgggcatttaacatgaagaatggcatggagatgagattttgcttaaagatgtagcaaagcactgtgatgctttcctgtctcactatgacagggagcaatataactgtgcagttttactatggcatcgaatttgtgacctcaccagaataacgaactggagaggtgtatctagatgcactctttttaatcgaccaaaatgaagtaagtcttgtaagaagtttcggttccagagttttcactcactgaatttaactcgggatgaggagatatcaactctacattattaatatttgcatccattttgccacattataagaaaatcgagaaggtgaatctagacgtttttttactataaattcatgttctagctcattcctcatcaaatagtcagtcagtaacaggtcttctaaacagacagaaaactttttacccacaagcataaacttaatatacccatcaactagccacttccgcaattatcagaagctaagacatatgtgacaaatatgtttaagaccatcaaaaccaatgtattccaggacaaagaaaaactcagtgttgccatttccgaatcatcttcttacagtggttatgcagtcttaaggttgtaaagatgcaaagtgtgtatatcttcaacattcttacataactcaattcatccagatttgcaacgggacaatcaataaagtttaacagtaatcataccttcgatcaggtccagccccagctgagacagtatcactgacggtaagaatagccactttatactcaggcccaggtacttcatcgtacttcttttctttccgaatagagcctggttctgataatgaggctttcttgtctattgaaaaggcactaatatcagaaacaattatagctgatacagaacttccagcagaaagcacatttcccgtagcaggcaactccaacaaagcattagccgacctcatacttaaaagcctactgctcatctgatgtccagtgctctcagcaacaaatctgacaaacaggtatatcttattagcccatttaagatagtaatgcatactagaacttccaagaaaatctaggaagatccagctaagtttttgactcacaagaagacataattatgaacaggctcacccgggagtccctgatccatcgttgtctttccatttgattatggcccgatgaaactcggggcggatgggatcagacttgatgggctcctgaagtcgaagtcgcactctgagcagagattagactgtaatctacccttttctcgacgatcattttagaatgaattcatatagagaaacaagtataatgaaaaacttcagttacctcagtggatgggggcttgtccatcctgcaagctggcggattgtaggcacaacaaagatattgaaacaaaccaaacagctcacaggatttccaggtaatccaaatgcaaggactgttttccccagcatactttcagttggttttgctctaatctcggcgaaggtcaaaggtttcccgggtttcatcaatacctgcaaaaaaactaaaatatgaaaacttctcggttcattctatatagcaaactaaacatagtcaacttactgagcttagttgagaaactaaacagtagagtcccgtaaaaagaattttcagaaaacatagtagccaactcttccgctttaaagcagagaaagaaaaagtgcagggagaaaacttctactgcttatttaccttgctgaaatatactttccctttctcttcgagtaatggcttgacgaaatccctgtctcccattgaaacaccaccagaagttaaaataatatcaactccagaggatacggcctcgtccaaaaccttctcaagttcttttctatcatctctaacaattccaaggtcaacaactttgcattgctgctgcatcactgctgccactaacattgctcgatttgagtccctaatctgcagagagctcattattaagcctctaaagatattataaggttcaatacctatttgcaattattacacaggtataactttcatatgcatcaggaatcttagttctacataatacctgcccacgacctaaagtcccagctgtcggctccacaagttcatctccagtagagagaatagcaactattggcataggatatacctacaggaaagttttttttcaacactttttttggacttatcttctagtaactctgctaaaataaaaatgatatacagcaataccttcaccatggttactcctgcggttgctagcaagccgatttctgaggcaccaattctttctccagttgttagtacagttgcatctttctcaatatcacaaccctagcatataaattgtcaaacaataatgaacatatgacgattgtatctcctccaaacagctgaaaaagctgcttttcatcacctacttagatttgatggttaatacgagagaaacatgctttatctatccccaggtcttctagcggtgacctcatgcatgcttattcttagtcccacaagagtcttttctctaagaaacattgcaaacacaaacctagataataacaaaaaacaggatgctgtccgacaattcaagtacatatccaaaactagcccaccatcttccatttgttccaataacttacccatcaaacgacacagtaattcaatttatttaacaaatcggttaggcatactcctaaaaaaatggtcttagatcaacaaatggcgttacatataaaagaaaagtacgagatttcaactatttagcaaacagtaagagatataagaaatcaaagatatcaagtacaacactggttacataaacgagaaaagaagaaagcataccactctacggatatcggtgcctttcttggtttgaatcagtatttttactctttttgattcagttgagacgtctccaattactttagtgtcctcaacttggacaactgcgtccgcaccatcaggtataggtcctaaaggagaaacataccaaagaaaacaataggttgaaatcaaagaaacatatacgttcagacacttctccatgcatatacactaccaaatggaaaaatagtaagtagtgaacaagaacagaaaattagaagcactttcatatactctaaaatgcaggcacaaagttttcaagtcatcaaatgcaatatactcaccaccagttgtcacataagccacagttccaggagtaacagtcacacccaaaccatcattcccagctcttgattcagtaatcaccggatattctccaggaccatctgaagcaacaactgcgtacccatcctaaacaacgataatgtcaagttattaatcaaatattcgctgttgtaatcatcaccagattaaattgatcctattagtaaccttgacggaagcaggatatggaggtaaaggatcaggagctcgaatatcttccgccaacactttcccaagtgcttcatacagcgatacgattaccggaggcagacgcttagagacgccgaatactattctcagagcttcctccgtcggtatcatctccgtctttccgccgccgccgccacaacaaccttgaccttccatttatttccgtcgctgattgatagagagagacgatggccttgtttagcaatcggattagatatgaccctattagattgtcaatggtcaattaacttcgacgtccaccagcgacaagcgttgacgaacaaaaacattcaaaaataattttaataataaaaatataattttacttgttattgtataatcagaaataattatatatctactataaatatattttacatatatatttaatacattgattcttataataattagcttttcaatttcaaaactaaactaaaaatataaaaaaaatgatttaaaacttttagatataaaaatttaaaattaaaaccagaaaatttttattagcaacaattaagtaagggaacggaatttttttttgtattatcaattaaaaaaattaactttttatttttattaaaaaataaattattacaattatactcaatacacatgactatatgaatttcatatgaaagtaatatgaaaaaactgagtatataactttttagtttaaattaaaaagttaataattttaattgataatataagaaaaaaactaactattgattaaaaatatgtaacaattaaaaaaattaacttcttaaaaaaactaactattaatattaatgaatagttcatatcttaaaaaatgtttattctcttaatttagttttgaaattgaaaaaaactaactatattgtaagaattaatttattaaatctatatacaaaatatatttatattggatataaaatgtgttttattttcttatacagtatcaaataaaaataatgtttttaatattaaaagttagttttgaatattttgtttgctaacgccggagttagtcgatcagttatttatgatatatgttttaacctgagattatatgtttatgatattgatgacatgataccatatacttcgtatatgttgtcacgcaatccatatacgtatgtaactagatgtcctttagtttacttggtatgtgttgtcatatgttctgctatatttcggtagctaatcactaatcactaatctcaagctgccttatctacatatactcatctttgacatgtgtcaaacatttattttttcaggacttctcggggaagacaagagatttttcaaatgaagatacagatccgttgtctaatgagaaactcataggtgattaacatatgttggtttattacaacagtatgcctcacattttttgttccctctagatcctagttgcttcttaatagaatccatgttttgcttattttcttgatctttagatttaggtctcgaagaaagagaagctgccacagctaatcttaagggcattagacgtcttgtgttaagtcctgcctcattgatttccaaaggtatactgatcgtttgtacggcgtcgttgtggttttttttatactgcactctcatttttctattgaattgagcagggatatatagtactcagtctttccagatggatgaagaggaaggctttggaaggtctcttattgttattgatattactagtatagtagtatgacattcatttactttaaatcttcgtttttggcttaagctgattatcttccacatctcaaggctgttgcattgttcattgtgtctttgctgaaatttgagaagaaactgaaatctgcagctgagaagcagtgctcagaaattatagcatcggtctacggggagatacaactagagttggagaatgataggtcggtatatacagatagatatgattatcatgtactggtttttaatcaaatcacaaagaagattagagtataatcaacatcattccttggcttattcttgccttcatcataagcccattcccacatattttccacactcttaagttgaagttccaacatcataacctcttgtttccacccaaccttagctccactgaaagccgtttccactagaacacaagatgtcttcattgacttttcagcttgcttaaggtgtgtcttgagaagatatagcctagctctgttctcaagaatcaggaactagaacatacttcctagtagcaattcactatactcgataaaacccacaaactcattttcatcaatggggttaacttgacaaattgcaacatcactaacacagtcatcagccttaccaactatatatttctccatagacttgtcaatagctagaactccacgagtatggactgttccatgaagggtatgaaaacatgacttgaaaacataatagggagccaaacttgaagtttttactatcatgtttacgctatctccggcgacaacatatggtcgctcacgattttggtcactcgggatggtgtttttctgaaccatctgcagttgagtagccgcatttggaaataaataaatatgagacacgaagaccatcacaacagacttaacgctgcaaatgactaactttgatccaatgaggaaggatgatgttttctccacttgaatatatggtttgtgacatagtactaagattatttgatactagctaaagcctctgtctcagatagaggtgtctccctgtttcctttaactcaacaacactttgccaattttgacttctttcttcttctttttctgcataacctatcaattagataccatttagattagcagcgaatttcaaacggagatgtcagaatcagtgattcagggatcgaatccggatcgggttttatctccgacgagctcgaaatcagtgacgcagacggtgaacgggtcgcatcaattcgtgattcaaggatacagcttagcgaaagggatgggtatagggaagcacatagcgagtgataatttctccgtcggaggttatcagtgggggatcttcttctacccggacggtaagaatccggaggataattcgtcgtacgtctctgtttttatcgcattggccagtgaaggaaccgaagttagggcgcttttcgagctagctcttgttgaccaaagtggaaaggggaaacataaggttcatagccattttgagcggtcactcgatggtggcccttatacactcaaatacagaggaagcatgtggtaagttttttcagctcactgctcataattttagtttttcttgatttcaattagttcgtttgtagggttagggttcgcattgggtttcattagctttctaaattgatgcatgtttgatcatttcctgtgaggaagaactacttttgattagggttttcagtactttctatatgcattagccttgagcttgatctgacacgtgatcgtggattccctcatctagcttttatggtagagatatctgtttactagctgtgaggtaaactgaagatgagaaactgtgaaaatgatcacatgaattagaagatacatcatggtaatcttattagggtactgtcagagagattttgttcagagttcagtttctctattgatgaatcctgggcttacttggaagtgacagccatagctgataggtgtatcgaacacttgtgaatttctaagagaaatgtaaatttgaactgtgtttgtactgcatgatttttcatattggtggtgtaaagcatgaaaattgaagaattcagctactcatagtcagtgtagtaacacattcctctgactaatgagtgatgtgggtggtttaatgttcatgacgccaaaaaaaattgaatgggaaaatctatattttctaaggtgtttagctaactgaattttctgagtgtatccagacagagccttagcttaagtcttaattgggaaaaaaaatcttgatttaagtggagaagctgtgtctttatttcttccaatttactttgatccttcttgaaagagatatatttgatcttctctttacatatatcttttgcttaagttctggttaatcaaggtcctcttatacccttttcttctttgtggtttgattaggggatacaagcgtttcttcagacgttccattcttgagacatctgactacctgaaagacgattgcttgataatcaattgtacggttggagttgtggtttcagaaatactctgcccacagttacactctgttcacgtccctgattcagaacttggatcacattttggagttctactggatagcatggaaggttctgatataacttttaacattgctggcgagaagtttctagctcataaactagtactggctgctcgatctccatttttcaagtctaagtttttcagtgagtttgaagcaaacaatacagaggttactattaacgatttggaacctaaggtttttaaggtacatcattgatcattggtggttattctttagttatttctgttagtttagatcgtgcttgtattaatgctctgttccatccaggctttgctacaattcatgtacaaagattctcttccggaagatgtggagcctgcaacagctcatacatttgagcgcttaaagctgtcagaaatatacgaaacattgattgtaaaagttttagcagcagccgacaagtacgacctgattaggctcaggttgttgtgtgaatcccacatctgcaaaggcgtatcagtcaaatccgtcgcgaagatcttagcgttggctgacagatataatgctaaggaactaaaaggcgtttgccttaagtttactgccgagaacctagcaggtatgcttctacattgcatttttaaaacaatgttttaatatcatacgctaggccattaaagtgtatgatggtctccatagaactattggatcttctcttgtatttgatttggtgtggccttggatattgcagctgtcctggagacagacgcttaccaacagatgaaggatgaatgtgtgaccctccagtccgagcttctgaaggcggtggctggtcacgaggaaggtagtaacagtactggaggagcaaagtctcagagcgtgtgggcccaactttctgacggcgggggcgataccaccagccgacatgttagacaacgaaccacctagagcctcaaaatatgcatcatttcctcaggttaatagtagccatagagagggtaaatagctgtttttttctgtattcaaaaaaaaatatatgatcccaagtcctaactctatgataggtaaactctttcacttatcacttcagtaacagctttggattattcttcttttcgtgtttatgtattttaaatcccagaacatgtggttgtttcttttactctaaaacattttgatttttacggatccagaagtataccagtgtacatatcaaacagatgcatatttttccatcgagtgagttgattttatggcaatttcgagcctgttactacaagaaatgttctttatgacattgggttataacttcactcgggttaaaaaagtattagcatatcttaaaaagccttctctctcttatctctctcaaatcttctagagagagaagggcttagtttttcttccgccatccggtgaatccggcaaagccatctggttgttaaaccagcttcagtccaacagcctccggctattatagaggaggttggttggcttttcactggcggtgttggctccctcagcaacgtcggccagttttctctccggcaacgatggctccgtagcaccgtttggctggctcctcttgtatgcggcatgttttcggctttctatgcgatggtgtccgcttttgtctctggtcattccaccgtcatctttccggtggttttggccagttatgtaccggtgttagatccggtttatttgtttctgttttacttttaataattctcattgagatgtgttggtgataatagtgatagcaatctcgatttctattgcttcttatccaatccactctcttttgagattcaatttgcaggaatatttacagagatttgagttttaagatgaagaaaagaagttgattccttcgcttattatcattgccttaagctgttggtttaattggagtttcgattactttataccggcgaaaaatcagaagaatctatgtcgattgttatcggttgtgattccttcttcaccggaatcggtgctcggacgacaaaggaagaagtcggttcacttttaggcttctcatctcacacgtataggtctttctcctattgacgacacgtgatctgagatagagacaaattccagtttcttcttctgtaggaaatctctttgggccttgttgggtctaaataatttctgtaatcttgcattttgaataggcttttcttaggccttgtatgagttggatatgtttaatacaaaatttctcttgtgaaaaaaaaaaacttcactcaggttcatgtaacaagaaacaacttatatcaatcgtagtaataaaatgcaactgattatgtcttaagtttgcgattcaataagaatcgaaaacagcaatcaacaataaaatagagaataaacgaaaagtcatgaaagcgagagaaacaatcttgttatttggtttgttcattagaagaaaagccaagtcacttgtgcttatttttgttctttcagcaaaagaacattgaactagcaacgttggtgttcagcttcggcatgggaggcacagggactgctccagctgtggtgatcccgccgtggctcgatgaagtctcagacatgtcctcaaacttcattgcagttgccatctgtgcagccgccaaatgagcataacatatcggcgcaactgcataataatcaagttgtgtcaatttttcaaattctacacataaagctgagatatcaaatgccaaaagaattaccaagagagatggcagttgtgctccgctggtagctacaagtaataaagcaaagaattaagagattaatggctaaattcaatacagagatttaatgtatcaggtaaaaaaaagtttgaagtgatgtgctgcttacacataggatagtgaatgcacaagttcttggagttgatctgtgtcaaatccaatctcgtcgtagagcacatggtaatgtgttggccttgtagttccctaacacatcgaaaagtgtttttaagtttttgttcgattcataaaggattcgagcataataatatatatacttatcacttacaatctttccagcatgagcacaaagatagaaatcgttgttgtgttggtgacagatgttgctgtcaattattgttcctgcgggtaaatagagaacaggtttcaagtcatttcaacaacactaacaaacaaacaaaacacaaaaaaatatctgcaactgtttacctggaagaacattattagggctttcggtttggaagaacttcgtgtggtggtttatctgagctatgatcagtgtaaacttgggatcttacttctgatccaagaacttgcatgcctaataatgtaacaaaagttaaaccttaaactccaaaatggtcaaacataggctaagtatttaagagcttaaaaatggtaaaaccaaaatccttacttgcatcatctgatccagttcaatattaagaacttggttaaactgagattcactgacaccatccctgcatgtattggtgtagttaagagttagaaaaattgtattaaactacatgcatgcctaaaaattatacatgcatacctgaaaatgataatgtgattcggtttctttccagaacttgagtgaaagtcaagcaagagctctctgtaaacacatcattgaatcttaaaaatcatatactgttacataaaagcagggctaattaatacgagttacaaaatagtccagtaatatatagtattacctcatgataccttgatcatctttgtcagagacgggtttaaagaggctatcgatcatttcaactttaggcgactgtgtacgcacacaagccctgtattttgagatcagtggccactctctggagctcacaacctatgcattccaaagatatcagtagcttacataaaaatacaacacaagaaagtgaaaaagaaaaaaaaaaacaatgttaccgcggcaatggatggtatatgatcagactgtccaggagaaccatgagatacatccattccaataatgatggtaggaactctcattaccagaggcattgttcctgacagctccatatccaaaactgaattcaatccaccaagctatacagaaatggcagagattaactataagattattatatcagaaactacaaagattgattcaagaagagatcatcaccttggcatttatctttagtagaagatttgtgagatactgatcatttaagttttgaggaggaacaatacattcacaattccacattgaacaagatttttctttttccaaggacctaagtgataaaattttccatatgagaaaaaaaaaaaaggtgtatactatatgattcaggaaaggttaagtgcttagtgttaccataaacatcagagtttttcttttcgagtatgcatagaaggaattttggaggaacttcgccgagtattgattgtaaatgttgaaacatcttatcaactcttacagaaccagtggcatccttaaactgaggattttcttcaaagacgacatggtatggagaatctacgttctggtaatgaaaacaaaacaaaaaaaccaagagagggttttgttattagtgttctttattgtagtaaccaatggtcctgatgacgaaaagtaagcttacaattcctttcatctttccacatctggtcaaatcatcaataatcttttgcgggtcacagcgagcagagaagttcacaacagcccatctagtaactgtggctggcttaaaaaatgtctgtagatgaaagtttgatgatcagtgtcacaagttttcaaaacaaaacttgtttgagaagacagaggatagttaaggaccttgttcttgaagttccaactcccattaataggatagatgtcttgttctttgccagctttaagctgtttataagggattaagagaccacagatatataataataaaatcaaaccttccataaccaaaaatgtaatggaagaaaaatcacctttggtgttggtaacacgcggccttcgacttgagtgaagtcagagccaatcctaacaccacattcttgcaacattgggtcatcattataattactagtcttgagagcctgcaaaacatggaacttagtatacataaaaatgcaaataaaaagaggataaatggaaaatttaaagtccttactctggttaacacaccaattctttgttgtggattctgccttgattctttgataaggttactcctctggaatttggttagcgctttagtatagcgttgtagagatacaagctcacagagctgcaaaatgttttataaaacaaaagatgggaaagtatcataagtatcataagccattaaacatgagattatgtggaagaaaaacaaaacaaaaaacaaatattacctcaatgggaaagtaggtaggacgatttggcttaccaacattgatacaaggtaagccacccgagtaacgcagttcgatttcacggatcctagtgaagtaatcggacactgtaatctcaacctcctcaaattccctgttttggttccttttcttccaagtaaacctaaatcacacaagaaaaagagataaacgagaagcaaaacaagaaaacttaaaataaatatcaactcacaacatacgtttgatctttgcagtgtagtccacttagtccggttatcttgtattcttgatttgaagggaggactttaactctaagatttttcagagtatttttagcctatacgagagagaaacaaaaaaaaaaatcagaaaatgaagtacttcacctcaaagatatgctaaaacaccatttgaaattcttgtaaatacctttttccagttaatagagaatggatcgttcacaccttgatttgcaataagaaaatcaacaacaggaccaggttttactatcatagcagtcgaaacatctgatgaaagaaattaaaactgaaatgttacaaagaatgtttttaataccacatgaaaaaacatatgttaaaagaaaagaaattaccaatattgagggacaagcctccctgagtagttctgaagcttgaatgaaatcctttgcaacaatctacaccttcaccgatattcgcaaagtactttgcgtcattgtggaagaaagattgccgaactaggaggcaacctctgcgcaaaatagaaatgtgtcacaacatgaacatcaagaacatcaaatatccaagaatatatctaagaaaaaaaaactaaaaaaggttcactaactgtctagctgcattttggctcaaaatacagtccatcactctgatagcatctagaagatgtttagttttctttccttgaagagcatttgcaatagcttccattgggatttctggaggcgcaaaaaggattgcaacattgaatttcttggattggtgaggaagctttagtcttttgtctgcgtttctcctagaaggcgcggtttcaagaacaacagagaagtctagactggatctaggaagaggaccaacagtataaagattcttgtcgccatcataagcaaaatgtttgcaacccaaatcagcttgacaagtctgttgaactttttcaagaatctttctgccaaaacctttggctaaaagtggactaccatcttcatatgtgatagtaacctgtatccaaagagacaaagcacactataaagtatgttttccaaatcaagtcatggaaacaggaacaggaagggaaacaaaaagcgcacgctgtaatggaagaaattatgactgtttggttttctgaagttgactctgaagtggttagtgagcagaagaatcttctgtcctttggaaccgttgccacggcgagtcattggaagaagactactcttgctcttcaaaggttcacgttccatgtgttgaggaggcggtagagtcgtatccatttctcggcctccagatgttatgcgtcgttgatccttagttcggttctggctttgacgtacctaaggtgtttggccccgaataaggaataacccttaaatagtaaaagaaaggattatgtaagaggagatgaagaggcgtgcggtgagtgcaaagagtcttaaagcctttttatgttttacgctaaggaagacaaagagtttttcttgtacatgaaattcgagagggtacactagtcattgatttctcacttacattgcatgcattacttttttaattaagtggataattattggcttttgttgtggattaactgcaatagaatttagtgggtagattgaagtcgaagagactaggaattcaaacgagagaactaggaattgatctgggaattcaaacgaaagaaccaagactcatgaggctttgctattctgtcatggtcgatcaaatatcaaattcttcaagtttcaaagaaaagccaatagagaattggaacttccttttttgtttatatttttcgttttcttgtttttgaacttgaaaaatattactatgtttgttgtattgtaagattttgaaattcagttagaagttagtgaaccttcgaggaatctcttgcattttttcatactaaaagcttccaaaatatatgaactaaaagccaattttctcattttccaccaatcataaagacccaactctgatagcttaaaagttaaagccaacatgtgtcaaggttataaaattgctttactaaatgtattaaagataaatccaatcttatcgcttaggccttcgccttcccgcttgctcttcgtttactatgccaggctcggttcctttctccattgatggggttcttatgagcagcaatggagcattggtcaggccttccattctttgcgttcatctccatttgcattctccttcgtctcatcctattctcatgcctcattcctttcagagctcgggtccttcgctctatctccaatgcttgtgtgaagttccatatccggactgtgccttcttcacctccacacactatacggtcataacccacgtccacagagaacaagtttgacccgaacccgtgcagcattcgttgtggcggttccacagtactcgaagaaatccttttggaataggcacaacggttagtttttaacagtttcctaacgtcgataagtgcgagtttaccgtcaccggatgctgagacaagccaaggaaactcaaaagaaagagagtagacaggactagtgtgaggcatccattgagatataagtacaacgcttgtttcactaccgtatcttctgatctcaaacattttaatccctccatcttctccaccagtaaacaggaaatccccagtatggcttcttgccaaagagtaagtggtaccctcatgagcatcagggatgatcgccaatggagtctcactgctaacgtcccaaatatatacatcagaacctgacgtgctagcgagggtggtttcatgaggtgcaagtccccaaacccaatcactatgcctcaaggttttgacacacttcattgaagatcgatcccatatacgaacagacatatcccatgaaccgctaaagatacttgtcatgtccagggcaagagatgtaataggaccctcatgtccccatagccgaaactcagtcttctctttctgaaaacctgtgagatcaaacaggttccggagaccatccagtgatttccagcaatgaatgaatccatcagtaccgccagctaccaacagctttgtatcagcagcaagtgccctaatcgtacaaccgagaggtttagatgccgcaatagacaagccttcttccatgtcccacatccgaacaatggaatcatatccagaagtgaaaacgagcttggcagaagctaagagaaaaacagtccggactgcttcagtgtgaccatacagagtatcaatactataacgtcctaaaaaggtcctactcctaaattccctttcaacaaacagatctttccatgatctctcatcagaaagccctgaacttgcagctccgaaaactacagggagtccccatctctcacgatagaactccttccaagcgtgatgctcagatgctaacctatgcagataagttgaaacacaagacactagacccaactcttttgggtcaaggcaattaagaatctcagatatcaatgcctgaggtaaatcaataatggtagtagacaaatccttgtcagagagtaactgtttcgagccactgggcactaaagttcccttctttttctgacaacacaacttcacatttggaatctcaacagacccatcattacctattctcaaatcggtattcaaaagaccagactcacttctttgatcgttcgcagcttcaagtctctcttggcactcaaattccatgaaaagccagtcagcgtccgatgtagcccgtaacacttaaacaaggagcttttcacgaacgactctgaccggatctcgaaaatctacagcaccagagacgaatccagctaagcttgaagataaacgagaaaaacgattcatcaatagaaccaaaccagattaaacaaaatacaaatttttacccccaaaaatcgataacaatcagaccaacacatcataaacaaagaaaaacgaagagattcgtaaatgttagctaaaacgaaacagaggaacaacgataaatccctagaaacagagatgaaagctaaaacaagcaagcggaatcgagaaaagttagtacctttagtaatcaaaaacaatctattcgtaacagagagaggattttcgccaaaattacgttgccctaatttctctaatcggattgatgagattttgaagatggagaaccaaaaggtccaaaaccaaccaagcatcaaacaatgtaaaaaaaaaaacattattgccaatttgttttttttttatggtccccggacggtgctatactaaccgtccgatcgaaaaacaaatcaagcgtccagatcgtacgatatgagcagctacaacacatgtatatctttgttttattatataagattgatcctatttttgctgcgttatattctcaaagttttcaaaattccacaataagtgatttttagttgtaaatacgctttttctagtaagagtaagattttgcatggagatcatatatcacatgttcttccatgcaaccatgaccttgaagcaatagcttattcttgtccaataatgctattggcgccagagggaagtggacaaagaaagagtttttgtgagatctatcgaacataatttgttccatggcttgttgccgcctgaagaatctaacgaccatatcacttgggttagcccctttgtctccgatacacacaagcgactattgaggatgcacatgatgtctttgaaacggtcacgttcatgagataacttgaaaagtttcggtgtgaaatgacccatctaaatacacgggataaagatcaaatttaatttgggcttctagcccataactatcaagcccataatttggtttacttttatttgattctatttttgctgcgtaattttctcaaagttttcaaaatttccatatttttcacctctactctctcagaagcgatcatcatcttccccaaaatgtctgattcttcctcaagccatgactcaccaccttctccggcgatcaccggagattcagaaaccacagtgaccaacaacgaatcagaatccaacacaaaatgtcaaacagcaatccaatccttatccacgatcgtcacaaacacaaacatcccttccacaataaccatcctcctcgacgatgaagccgtctccaccgcgatctcctctctcctcctacgtcccgattcaggcgccggagataacaacctctgccgttggctctacgacacattccaatccgcggaaccatcgcttcagcttctcgtcctccgattcgttcctttaatcgctggtctctacctctctcgtgtccctctccgtcaaccacaagccggattcgaagccgttttactcgctctctacgcgcacgaaacaacctcacgtgccggtcaagcaataaccgtcaacattccagatctctcatatccaagcatttaccatgaatccaaaggtctcacaaggaacaacaactcaacgtgcctcaacatcgctgtgatctcctccacgttagatccacacgggacggttagatccacgcgccgcgcgaggatcgtcggagtcgcgttggagctttactatagcaaaatctcgaaaatgccacgcgaatctaagcttaatttctgtgaatcgtgtgagaaatgggcggggcaaaacggagaaacggagcaatcttcacgggctgtgattccgactttgagcgatgattcgtggagagaggaagagaatgttgctattggaggaagatctgagagagatagtggaaggattccattgccatgggagcttctccaaccgattttgaggatcttagggcattgtctccttgggctcaaaatggaagatagggagttatctgaggcggcgaataaagcttgtcagagtttgtatctccgatctctgcatgatataaatccgaaggcgattttggctaccggaagtcttcttcggctccgtgagatggctcttgatcccaagaatcaaatcgatcacactgagctatcaaacgacaccgttctctccgtttgaccccgttttgttatttatttagtcaacgctttcttttaaacaaccagcaaaaaaaaaaaaaatctctttttggtaatgttaaggagaggccacgttcttgttggctaattttctgccttgacaagatcagagaagagatcaattatgaattgtgttattattattttgataaaaactaaataccacagcctcctctcagtgaaaaagatcctgcaagtcgatgatgtctgcaagaacaccggctgcagttgtgtcgttcccggctccggcaccttgaatcaccaaaggctgctccttgtagcaacggctatatatctctacctgcagttttccaatcatatcactatatcagttattcttactcacaagacaatctagaggcaaatattgtgcttgcgttcatgagataaagtgagcaaatgaatcacaatcaatatatgacaatctcatatgagctaagtctgcggagaagggcactgataagccgttgaaaaccgaagtattagcagtttcagaaaggtttaacaaacagaatattataacaaacttactatattgtcactgcctcttagccgtcccaatggtgaatcttttgaaacttctcgaatgccaacttgaacgctgcagagagaacgtgaaattcaaaatcagaagattccgacattgtacactagcatttgcatgtaccaatataattaggaaacaattgttctctctaactacatcaaattagccttgaaacaaatttctttacgttattgattattgactgtgagagtaaaggtaaccgttattaccttgaaccctcaatcacacagacataacgaagcacacacccttttgatgaagcttttttaactctctcctctatattctgatcaagttttactattccattatggaggaaatcatccacagacatgagtccaggtcccatctcttctggatacaagctctctatctacagatacacccaaaaaaaactacagaggttatgtacaggagaaaaggatcaaaggagtcttgttaggagcctttttttggggatcgagaaagcagaaccaaaatttagacaagactgagatcagaaatgaactagaattctccaccttactcgaagagagttggttaccaaacatatatcatagcatcagaatacaaaaagaaaaaaagaaaaaagctttgaatgtggttcataccttaatgctgtccataattatcctcttcccaagaagtcgagcaagaatcaaaccctatcacgacagacacaaacaaagttgaaacaaattaaagtttgtattaattatattctcgtcaacaaaaaaatttgcttgaaaaatgaaaatatatgggaatatcaacgcatagtctttttaatcgcagtgagttggtaaaaacagaacaaattggaggatttgcctaccaatagcatcaggaaatcagattcaagaaaaaagagttgttcacatgaccaccagacaaatcataactgccttttctactttactcaaattagatgaagaaagcaatctgccatctggactgaagataacctctcacctacatcaacaaaggtatgcatgcactctaactctcgcaagagacactacatatatatgttcatacctttctagcaacatccatgccaccgaggtcgtcacgtggatctgtgaagaaaacaaaagaacatgtcaatcaaacatcatattaagaatattcaaagatgatctttcttttcatctattacatgtagtttttcccaaggctaaaccaactatgatgcactatcaggtcaaagcaagttggagtatattgtcgagctacaaaacagctaatggagtgtagaaaagcagacaaagcaatatctatttgaagatagtgttgctaaaatagtagtagataaagcagatgtgagatgactatcaatcagaaaacaagatatgtgctatgatgactaaaataaaactggacggacctggttcagtgtaccccagctttttggcagcttgaacaacttggcttagaggcttgccatcttcaagctcactcattacatatcccaaggtacctatcattaatcgagaacggatacaaagatacgtaaataaataatacatgcatatattgggataagaaaaacgataaacatctgaagtctgcttaccgctcaaactaccgacaatcctatgaacaggatctccagacgaaattatgcggttcaaggatgcgatgacaggaagaccagcaccaacctataaataaacatatgtcaggcgcaaaagcttttcactacctactgtatagagccaacaataccaccacatgtttacaactagtttcattttcaaatgagtactaaaatgtgatataatagtgttatactctatacacaagctgtgtttcacctacagtagattcatggcggatgaatcgcggatgcaaagccaatttgtcgtaatgttcctgcgcagaagacaagatgagagaaaatatgagtaatttccaactacttgaaaaattagattagcacagatgtactgagaaactttttttgtagttctcgcctactatctagggtatgtccggttgttaaaaaaacaagatggatttgcagatagagaatttggagaactagattaacttcttattcttgaaacaatttgcagaaagggtatttttaattcaaagagaacctaaggcaacttcttattcttgaaaacaacataaagtaaaagttcaagattctatgatgtccctgaatatacctgttcaagctaatgatacacaacaataaaaccaaaagggaagagaaacagcttcagggaacaatccgatgcgtatgctttcacattaataacataagcagaacatgcactagtgacaagaagttaccagcgttgaagtaacaggcttcttatttgccaggacaatacagcaacccaagtcaactgccttcatcaatatttcaatcgtctccatgctggctgagcaatccaccacagctaagcctatagcaagtacatagattttatctatcagaagctattgaggcccaacaccagatttcaaacgttacaaaatgttgaccacaacagttgtaattcaaccttatatttggtacaaacctgtagatttaccaagaagttttgcaatctcttctgtttccgtgcttaactcggaatcatggacgactcgatatccacctttttctgggattaagaacatatgatcattcggcttatgatccataaagagactcatggtaaatacttacccaaagcacccaacttcgataatgcagaaccagttgatttgataaggcaaacttctgacaagagttcatcattcagttcctctttgagcacatccattggagcaactaaggatttactatcacatactccaatcacccgtatatgaactccctgttaaacggatacaagtgaggaattc

SEQ ID NO: 1458 - DNA, 84413 bp, Arabidopsis thaliana
aagcttgattaccttttcatattcctctttgatagtctggacatagtcaacttctgatatcctgcaaatgcagcgtatacatcagtatttatataatgatatgttagaatatttcagatacatcactggattagataggcctactttttggccttgaattccctgcgtatccgtctgagatctgtggtctgaggaaaagatccaattgtagttgttggaagagcaggaaggttaagcttcttctgctgggcttgtagcctaacacttacttctgttgaacggtggtgatcagatttctttactgcatcaacctgagtaagaaagtaattaaagatacaagtccaggatacaaagagcaatttgttagaaaaccccttacatcctgctgtacagctgcatttgtcacccttggcgatgatcttctagaagcttgacgcatggaattagaagaaaacaatgcctacaaaaggaccaagacaatacaaagcctaaggttaactacttctgatatcaaataaaagcaaagtccagcaatgatccatgagatcaggtaaaggtacagtatatgagatataaattcattgggcatcgatgtagttgcagtcattgggacatatgtttaaagccgatcacttcaaccgtgggaaaagttataagtcaaagagtcaaagacaactagaaacgcaaagcctttccaatattaaaaaacctcagaagtactacataatgtaataagcaaaagatgtacctcatccttagctccagagaatgatttggcaagtgcattcacttcaacgaccttttgtgcagcaaatgcaagccaagattttagttctttatcaagtttcatttcattcactaagtccacagcagtatggagtagagagcaagaagtagaaaccacaactttttctgcaaagagaagagaaaggtttacatcaatctgaagctagataggaaaaagaagtgaaagcaatcaactgaaactttgtttactgacaccttttccaacaatgtcttcaagagtctgtagtgtcttgagtgacgcagaaagatcattcgcccaaatgttccttccatcaacaactccagcaaatagtagcttcccacgaggaaaattcatcttgattaaatcaagagtctccaatccacgaacgaggtcaaatccaaacccagtaacacatttcaaagacatcaatgtcttgtacgcttcagcaggaacatctgcaaagtatgtggcaataagaacattcaagcctgccaaagatgactccatgtgagagtacgcatcggaaaatgcctgcaattggctggtgtcaagatccatcacaagtataggctcatcgaactgaatccatcgtgcaccagcagacttgagatcagccaaaacttctctgccaaaataaatgccacataaaccagttatggtttcgagcactatccaaatgaaattgtatcttttgaatttattttggtctagctaatttctaaaagcgtcacagttggcgtaatattattcttacttgtagacaggaagaatcttgtcaatcagagaaagaaggcagaatgatttttcaacaccctttgctggttttgacaggagcaagtaggtcatgggaccaatgagcacaggaactgtgtctatgccaagctgtgccatgaacagccaaaaacacagctgtgaataagaaccttgggataaaaagaggaaagctgaagagaatagcaataccatcaattatctatatgccagtatcagctcaactaaaagttattccgagaaactaagtgaaaagggttccagtcgtcaacttactgctttcgcctccttaaattcaaccacagccttgtgagatgcataggagaaattgacgtcaggacccaactcaggaacaatgtaatggctgttagagcatttattagcaataataactgagaaagaaacttaacaaagagggaagaaagaagattcagttacttactagttggtatcaaaccacttggtcatttccatagcatgagcagaagcatttccccgtgccatggagaagtaaacatcaaacccaatctcaccactttcccaaccatatctagagggaacagcaccaagcatcgctgtggtatccaacatctgatcatagtatgaaaaagtattgctgggaatatatttgattccagcatgagccatatgtttccaaatcgattttctcagattagcagcaacattttgcaaatcatcaacattggttttcccatcccagaaggactccaatgcaaacttaagctctctcttcggtccaatacgaggatacccaacgatgtgggatgacattgctctattttgttttcacaaacaacaacaggattagtggaaaattcatgaatctaacaaataatacaacacagcatcaatacatttttcgaatgcttatgcaaattgcaaatggaggatgaaaaacaacctatggtacaaaatcgatactgcaaacaaacaagagaaaccataacaggattaggttgaatagtgaaaccataacgaaagtaaatagagttgcaaatacaccaacaagagagatagaatcatccgagggaaatagaagaaaacctggcgacgtagaatcgggggcggcgagaggcggttgcgcaagggagggacggagtagctgaagacggtggcgggagagaaggagggcgtcttggaagcgaagctaacggctggagtctctgaagagcgagctgacccatttttatagctttggtttcaaactgagctcctatttctgttcactatccggggaaagaggagactctctactatttcatttcgtttcccaggttttaattaaggtaaaccaaaccgaaaattcgtaaaccaaaccgaaaatgaatgtttaatcaaattgttgatattttctgttatttggcttatgcaaagtatttttctcatcaagggatatgcatattattacaaaaaagtagaaccttattacaaaaactacatttcgcaccatatatagtatttgggtttcgtgtaactaactcagcaaacacaaaacttgtcaaaagttttacagtcacaacagtgcagagcaaaatcacttggggctttgtggagaagctggagagttttagtgagtacaagaacatccagcctcttctttcttctctcccgtctcataggctgacttatagctttggtcccatgtatcagtcggtagggtggcttctgcgtgaggtatgtgcttcggatgtttctctctcttgtctcctttgatctgcttcagtgcgtgtttcaatgcaggtaacagagcctccatacactcggccactgcgtttgggtttccaggcatgttgattatctggggaaaccaaaaacatggaaacgtgagtgatgatggcaacttagatattatactaatgtgaagttagagatttgtaccaatgttgagcctctaattcctgccgcagagcgcgagagcatcgcaaatggagtgatctgtcacagagaaaaaaggacacggaatcagatgactgctcaccaccattcttttccattatgaagaaaagcaacaatgttcaatccaggtctggttattcagttttagaaaatagtgacctaatttggtttcaggattttgcatattagagaaagaagaactattctgactgtattgaagctcaattttttgaattggatgggtttggtttataagattaaatatcagtagagttaagaggtaagtaataaacctttaagctctcttgcatcataacaaagaggagaccgggtgtttctctctcgatcacctttttcgttgcttcaggtgttacatctcttggagtgaagccagtaccacctaattccaagatgttaactatatcaaaaatatgcttcaaatacaacaacaaatcaacaataagtaactaaatgtttgtataccaagtgtaagaatgagatccatttcgtcaacatcgctccatttctgaagaatgtcttttattctttccacttcatcggggacaacagctgttgcaactaccttagctccccccagtttttcagacgaggaatcaactactgacacagctctgggcccactacaccagcataagaaattcaaacaagaaatgatcataaaaccaatggataaataattgataagaccaaaactttcacacaaatttgaagtgaatacaaacaaaaaactatctggagagggtttgggcatttaacatgaagaatggcatggagatgagattttgcttaaagatgtagcaaagcactgtgatgctttcctgtctcactatgacagggagcaatataactgtgcagttttactatggcatcgaatttgtgacctcaccagaataacgaactggagaggtgtatctagatgcactctttttaatcgaccaaaatgaagtaagtcttgtaagaagtttcggttccagagttttcactcactgaatttaactcgggatgaggagatatcaactctacattattaatatttgcatccattttgccacattataagaaaatcgagaaggtgaatctagacgtttttttactataaattcatgttctagctcattcctcatcaaatagtcagtcagtaacaggtcttctaaacagacagaaaactttttacccacaagcataaacttaatatacccatcaactagccacttccgcaattatcagaagctaagacatatgtgacaaatatgtttaagaccatcaaaaccaatgtattccaggacaaagaaaaactcagtgttgccatttccgaatcatcttcttacagtggttatgcagtcttaaggttgtaaagatgcaaagtgtgtatatcttcaacattcttacataactcaattcatccagatttgcaacgggacaatcaataaagtttaacagtaatcataccttcgatcaggtccagccccagctgagacagtatcactgacggtaagaatagccactttatactcaggcccaggtacttcatcgtacttcttttctttccgaatagagcctggttctgataatgaggctttcttgtctattgaaaaggcactaatatcagaaacaattatagctgatacagaacttccagcagaaagcacatttcccgtagcaggcaactccaacaaagcattagccgacctcatacttaaaagcctactgctcatctgatgtccagtgctctcagcaacaaatctgacaaacaggtatatcttattagcccatttaagatagtaatgcatactagaacttccaagaaaatctaggaagatccagctaagtttttgactcacaagaagacataattatgaacaggctcacccgggagtccctgatccatcgttgtctttccatttgattatggcccgatgaaactcggggcggatgggatcagacttgatgggctcctgaagtcgaagtcgcactctgagcagagattagactgtaatctacccttttctcgacgatcattttagaatgaattcatatagagaaacaagtataatgaaaaacttcagttacctcagtggatgggggcttgtccatcctgcaagctggcggattgtaggcacaacaaagatattgaaacaaaccaaacagctcacaggatttccaggtaatccaaatgcaaggactgttttccccagcatactttcagttggttttgctctaatctcggcgaaggtcaaaggtttcccgggtttcatcaatacctgcaaaaaaactaaaatatgaaaacttctcggttcattctatatagcaaactaaacatagtcaacttactgagcttagttgagaaactaaacagtagagtcccgtaaaaagaattttcagaaaacatagtagccaactcttccgctttaaagcagagaaagaaaaagtgcagggagaaaacttctactgcttatttaccttgctgaaatatactttccctttctcttcgagtaatggcttgacgaaatccctgtctcccattgaaacaccaccagaagttaaaataatatcaactccagaggatacggcctcgtccaaaaccttctcaagttcttttctatcatctctaacaattccaaggtcaacaactttgcattgctgctgcatcactgctgccactaacattgctcgatttgagtccctaatctgcagagagctcattattaagcctctaaagatattataaggttcaatacctatttgcaattattacacaggtataactttcatatgcatcaggaatcttagttctacataatacctgcccacgacctaaagtcccagctgtcggctccacaagttcatctccagtagagagaatagcaactattggcataggatatacctacaggaaagttttttttcaacactttttttggacttatcttctagtaactctgctaaaataaaaatgatatacagcaataccttcaccatggttactcctgcggttgctagcaagccgatttctgaggcaccaattctttctccagttgttagtacagttgcatctttctcaatatcacaaccctagcatataaattgtcaaacaataatgaacatatgacgattgtatctcctccaaacagctgaaaaagctgcttttcatcacctacttagatttgatggttaatacgagagaaacatgctttatctatccccaggtcttctagcggtgacctcatgcatgcttattcttagtcccacaagagtcttttctctaagaaacattgcaaacacaaacctagataataacaaaaaacaggatgctgtccgacaattcaagtacatatccaaaactagcccaccatcttccatttgttccaataacttacccatcaaacgacacagtaattcaatttatttaacaaatcggttaggcatactcctaaaaaaatggtcttagatcaacaaatggcgttacatataaaagaaaagtacgagatttcaactatttagcaaacagtaagagatataagaaatcaaagatatcaagtacaacactggttacataaacgagaaaagaagaaagcataccactctacggatatcggtgcctttcttggtttgaatcagtatttttactctttttgattcagttgagacgtctccaattactttagtgtcctcaacttggacaactgcgtccgcaccatcaggtataggtcctaaaggagaaacataccaaagaaaacaataggttgaaatcaaagaaacatatacgttcagacacttctccatgcatatacactaccaaatggaaaaatagtaagtagtgaacaagaacagaaaattagaagcactttcatatactctaaaatgcaggcacaaagttttcaagtcatcaaatgcaatatactcaccaccagttgtcacataagccacagttccaggagtaacagtcacacccaaaccatcattcccagctcttgattcagtaatcaccggatattctccaggaccatctgaagcaacaactgcgtacccatcctaaacaacgataatgtcaagttattaatcaaatattcgctgttgtaatcatcaccagattaaattgatcctattagtaaccttgacggaagcaggatatggaggtaaaggatcaggagctcgaatatcttccgccaacactttcccaagtgcttcatacagcgatacgattaccggaggcagacgcttagagacgccgaatactattctcagagcttcctccgtcggtatcatctccgtctttccgccgccgccgccacaacaaccttgaccttccatttatttccgtcgctgattgatagagagagacgatggccttgtttagcaatcggattagatatgaccctattagattgtcaatggtcaattaacttcgacgtccaccagcgacaagcgttgacgaacaaaaacattcaaaaataattttaataataaaaatataattttacttgttattgtataatcagaaataattatatatctactataaatatattttacatatatatttaatacattgattcttataataattagcttttcaatttcaaaactaaactaaaaatataaaaaaaatgatttaaaacttttagatataaaaatttaaaattaaaaccagaaaatttttattagcaacaattaagtaagggaacggaatttttttttgtattatcaattaaaaaaattaactttttatttttattaaaaaataaattattacaattatactcaatacacatgactatatgaatttcatatgaaagtaatatgaaaaaactgagtatataactttttagtttaaattaaaaagttaataattttaattgataatataagaaaaaaactaactattgattaaaaatatgtaacaattaaaaaaattaacttcttaaaaaaactaactattaatattaatgaatagttcatatcttaaaaaatgtttattctcttaatttagttttgaaattgaaaaaaactaactatattgtaagaattaatttattaaatctatatacaaaatatatttatattggatataaaatgtgttttattttcttatacagtatcaaataaaaataatgtttttaatattaaaagttagttttgaatattttgtttgctaacgccggagttagtcgatcagttatttatgatatatgttttaacctgagattatatgtttatgatattgatgacatgataccatatacttcgtatatgttgtcacgcaatccatatacgtatgtaactagatgtcctttagtttacttggtatgtgttgtcatatgttctgctatatttcggtagctaatcactaatcactaatctcaagctgccttatctacatatactcatctttgacatgtgtcaaacatttattttttcaggacttctcggggaagacaagagatttttcaaatgaagatacagatccgttgtctaatgagaaactcataggtgattaacatatgttggtttattacaacagtatgcctcacattttttgttccctctagatcctagttgcttcttaatagaatccatgttttgcttattttcttgatctttagatttaggtctcgaagaaagagaagctgccacagctaatcttaagggcattagacgtcttgtgttaagtcctgcctcattgatttccaaaggtatactgatcgtttgtacggcgtcgttgtggttttttttatactgcactctcatttttctattgaattgagcagggatatatagtactcagtctttccagatggatgaagaggaaggctttggaaggtctcttattgttattgatattactagtatagtagtatgacattcatttactttaaatcttcgtttttggcttaagctgattatcttccacatctcaaggctgttgcattgttcattgtgtctttgctgaaatttgagaagaaactgaaatctgcagctgagaagcagtgctcagaaattatagcatcggtctacggggagatacaactagagttggagaatgataggtcggtatatacagatagatatgattatcatgtactggtttttaatcaaatcacaaagaagattagagtataatcaacatcattccttggcttattcttgccttcatcataagcccattcccacatattttccacactcttaagttgaagttccaacatcataacctcttgtttccacccaaccttagctccactgaaagccgtttccactagaacacaagatgtcttcattgacttttcagcttgcttaaggtgtgtcttgagaagatatagcctagctctgttctcaagaatcaggaactagaacatacttcctagtagcaattcactatactcgataaaacccacaaactcattttcatcaatggggttaacttgacaaattgcaacatcactaacacagtcatcagccttaccaactatatatttctccatagacttgtcaatagctagaactccacgagtatggactgttccatgaagggtatgaaaacatgacttgaaaacataatagggagccaaacttgaagtttttactatcatgtttacgctatctccggcgacaacatatggtcgctcacgattttggtcactcgggatggtgtttttctgaaccatctgcagttgagtagccgcatttggaaataaataaatatgagacacgaagaccatcacaacagacttaacgctgcaaatgactaactttgatccaatgaggaaggatgatgttttctccacttgaatatatggtttgtgacatagtactaagattatttgatactagctaaagcctctgtctcagatagaggtgtctccctgtttcctttaactcaacaacactttgccaattttgacttctttcttcttctttttctgcataacctatcaattagataccatttagattagcagcgaatttcaaacggagatgtcagaatcagtgattcagggatcgaatccggatcgggttttatctccgacgagctcgaaatcagtgacgcagacggtgaacgggtcgcatcaattcgtgattcaaggatacagcttagcgaaagggatgggtatagggaagcacatagcgagtgataatttctccgtcggaggttatcagtgggggatcttcttctacccggacggtaagaatccggaggataattcgtcgtacgtctctgtttttatcgcattggccagtgaaggaaccgaagttagggcgcttttcgagctagctcttgttgaccaaagtggaaaggggaaacataaggttcatagccattttgagcggtcactcgatggtggcccttatacactcaaatacagaggaagcatgtggtaagttttttcagctcactgctcataattttagtttttcttgatttcaattagttcgtttgtagggttagggttcgcattgggtttcattagctttctaaattgatgcatgtttgatcatttcctgtgaggaagaactacttttgattagggttttcagtactttctatatgcattagccttgagcttgatctgacacgtgatcgtggattccctcatctagcttttatggtagagatatctgtttactagctgtgaggtaaactgaagatgagaaactgtgaaaatgatcacatgaattagaagatacatcatggtaatcttattagggtactgtcagagagattttgttcagagttcagtttctctattgatgaatcctgggcttacttggaagtgacagccatagctgataggtgtatcgaacacttgtgaatttctaagagaaatgtaaatttgaactgtgtttgtactgcatgatttttcatattggtggtgtaaagcatgaaaattgaagaattcagctactcatagtcagtgtagtaacacattcctctgactaatgagtgatgtgggtggtttaatgttcatgacgccaaaaaaaattgaatgggaaaatctatattttctaaggtgtttagctaactgaattttctgagtgtatccagacagagccttagcttaagtcttaattgggaaaaaaaatcttgatttaagtggagaagctgtgtctttatttcttccaatttactttgatccttcttgaaagagatatatttgatcttctctttacatatatcttttgcttaagttctggttaatcaaggtcctcttatacccttttcttctttgtggtttgattaggggatacaagcgtttcttcagacgttccattcttgagacatctgactacctgaaagacgattgcttgataatcaattgtacggttggagttgtggtttcagaaatactctgcccacagttacactctgttcacgtccctgattcagaacttggatcacattttggagttctactggatagcatggaaggttctgatataacttttaacattgctggcgagaagtttctagctcataaactagtactggctgctcgatctccatttttcaagtctaagtttttcagtgagtttgaagcaaacaatacagaggttactattaacgatttggaacctaaggtttttaaggtacatcattgatcattggtggttattctttagttatttctgttagtttagatcgtgcttgtattaatgctctgttccatccaggctttgctacaattcatgtacaaagattctcttccggaagatgtggagcctgcaacagctcatacatttgagcgcttaaagctgtcagaaatatacgaaacattgattgtaaaagttttagcagcagccgacaagtacgacctgattaggctcaggttgttgtgtgaatcccacatctgcaaaggcgtatcagtcaaatccgtcgcgaagatcttagcgttggctgacagatataatgctaaggaactaaaaggcgtttgccttaagtttactgccgagaacctagcaggtatgcttctacattgcatttttaaaacaatgttttaatatcatacgctaggccattaaagtgtatgatggtctccatagaactattggatcttctcttgtatttgatttggtgtggccttggatattgcagctgtcctggagacagacgcttaccaacagatgaaggatgaatgtgtgaccctccagtccgagcttctgaaggcggtggctggtcacgaggaaggtagtaacagtactggaggagcaaagtctcagagcgtgtgggcccaactttctgacggcgggggcgataccaccagccgacatgttagacaacgaaccacctagagcctcaaaatatgcatcatttcctcaggttaatagtagccatagagagggtaaatagctgtttttttctgtattcaaaaaaaaatatatgatcccaagtcctaactctatgataggtaaactctttcacttatcacttcagtaacagctttggattattcttcttttcgtgtttatgtattttaaatcccagaacatgtggttgtttcttttactctaaaacattttgatttttacggatccagaagtataccagtgtacatatcaaacagatgcatatttttccatcgagtgagttgattttatggcaatttcgagcctgttactacaagaaatgttctttatgacattgggttataacttcactcgggttaaaaaagtattagcatatcttaaaaagccttctctctcttatctctctcaaatcttctagagagagaagggcttagtttttcttccgccatccggtgaatccggcaaagccatctggttgttaaaccagcttcagtccaacagcctccggctattatagaggaggttggttggcttttcactggcggtgttggctccctcagcaacgtcggccagttttctctccggcaacgatggctccgtagcaccgtttggctggctcctcttgtatgcggcatgttttcggctttctatgcgatggtgtccgcttttgtctctggtcattccaccgtcatctttccggtggttttggccagttatgtaccggtgttagatccggtttatttgtttctgttttacttttaataattctcattgagatgtgttggtgataatagtgatagcaatctcgatttctattgcttcttatccaatccactctcttttgagattcaatttgcaggaatatttacagagatttgagttttaagatgaagaaaagaagttgattccttcgcttattatcattgccttaagctgttggtttaattggagtttcgattactttataccggcgaaaaatcagaagaatctatgtcgattgttatcggttgtgattccttcttcaccggaatcggtgctcggacgacaaaggaagaagtcggttcacttttaggcttctcatctcacacgtataggtctttctcctattgacgacacgtgatctgagatagagacaaattccagtttcttcttctgtaggaaatctctttgggccttgttgggtctaaataatttctgtaatcttgcattttgaataggcttttcttaggccttgtatgagttggatatgtttaatacaaaatttctcttgtgaaaaaaaaaaacttcactcaggttcatgtaacaagaaacaacttatatcaatcgtagtaataaaatgcaactgattatgtcttaagtttgcgattcaataagaatcgaaaacagcaatcaacaataaaatagagaataaacgaaaagtcatgaaagcgagagaaacaatcttgttatttggtttgttcattagaagaaaagccaagtcacttgtgcttatttttgttctttcagcaaaagaacattgaactagcaacgttggtgttcagcttcggcatgggaggcacagggactgctccagctgtggtgatcccgccgtggctcgatgaagtctcagacatgtcctcaaacttcattgcagttgccatctgtgcagccgccaaatgagcataacatatcggcgcaactgcataataatcaagttgtgtcaatttttcaaattctacacataaagctgagatatcaaatgccaaaagaattaccaagagagatggcagttgtgctccgctggtagctacaagtaataaagcaaagaattaagagattaatggctaaattcaatacagagatttaatgtatcaggtaaaaaaaagtttgaagtgatgtgctgcttacacataggatagtgaatgcacaagttcttggagttgatctgtgtcaaatccaatctcgtcgtagagcacatggtaatgtgttggccttgtagttccctaacacatcgaaaagtgtttttaagtttttgttcgattcataaaggattcgagcataataatatatatacttatcacttacaatctttccagcatgagcacaaagatagaaatcgttgttgtgttggtgacagatgttgctgtcaattattgttcctgcgggtaaatagagaacaggtttcaagtcatttcaacaacactaacaaacaaacaaaacacaaaaaaatatctgcaactgtttacctggaagaacattattagggctttcggtttggaagaacttcgtgtggtggtttatctgagctatgatcagtgtaaacttgggatcttacttctgatccaagaacttgcatgcctaataatgtaacaaaagttaaaccttaaactccaaaatggtcaaacataggctaagtatttaagagcttaaaaatggtaaaaccaaaatccttacttgcatcatctgatccagttcaatattaagaacttggttaaactgagattcactgacaccatccctgcatgtattggtgtagttaagagttagaaaaattgtattaaactacatgcatgcctaaaaattatacatgcatacctgaaaatgataatgtgattcggtttctttccagaacttgagtgaaagtcaagcaagagctctctgtaaacacatcattgaatcttaaaaatcatatactgttacataaaagcagggctaattaatacgagttacaaaatagtccagtaatatatagtattacctcatgataccttgatcatctttgtcagagacgggtttaaagaggctatcgatcatttcaactttaggcgactgtgtacgcacacaagccctgtattttgagatcagtggccactctctggagctcacaacctatgcattccaaagatatcagtagcttacataaaaatacaacacaagaaagtgaaaaagaaaaaaaaaaacaatgttaccgcggcaatggatggtatatgatcagactgtccaggagaaccatgagatacatccattccaataatgatggtaggaactctcattaccagaggcattgttcctgacagctccatatccaaaactgaattcaatccaccaagctatacagaaatggcagagattaactataagattattatatcagaaactacaaagattgattcaagaagagatcatcaccttggcatttatctttagtagaagatttgtgagatactgatcatttaagttttgaggaggaacaatacattcacaattccacattgaacaagatttttctttttccaaggacctaagtgataaaattttccatatgagaaaaaaaaaaaaggtgtatactatatgattcaggaaaggttaagtgcttagtgttaccataaacatcagagtttttcttttcgagtatgcatagaaggaattttggaggaacttcgccgagtattgattgtaaatgttgaaacatcttatcaactcttacagaaccagtggcatccttaaactgaggattttcttcaaagacgacatggtatggagaatctacgttctggtaatgaaaacaaaacaaaaaaaccaagagagggttttgttattagtgttctttattgtagtaaccaatggtcctgatgacgaaaagtaagcttacaattcctttcatctttccacatctggtcaaatcatcaataatcttttgcgggtcacagcgagcagagaagttcacaacagcccatctagtaactgtggctggcttaaaaaatgtctgtagatgaaagtttgatgatcagtgtcacaagttttcaaaacaaaacttgtttgagaagacagaggatagttaaggaccttgttcttgaagttccaactcccattaataggatagatgtcttgttctttgccagctttaagctgtttataagggattaagagaccacagatatataataataaaatcaaaccttccataaccaaaaatgtaatggaagaaaaatcacctttggtgttggtaacacgcggccttcgacttgagtgaagtcagagccaatcctaacaccacattcttgcaacattgggtcatcattataattactagtcttgagagcctgcaaaacatggaacttagtatacataaaaatgcaaataaaaagaggataaatggaaaatttaaagtccttactctggttaacacaccaattctttgttgtggattctgccttgattctttgataaggttactcctctggaatttggttagcgctttagtatagcgttgtagagatacaagctcacagagctgcaaaatgttttataaaacaaaagatgggaaagtatcataagtatcataagccattaaacatgagattatgtggaagaaaaacaaaacaaaaaacaaatattacctcaatgggaaagtaggtaggacgatttggcttaccaacattgatacaaggtaagccacccgagtaacgcagttcgatttcacggatcctagtgaagtaatcggacactgtaatctcaacctcctcaaattccctgttttggttccttttcttccaagtaaacctaaatcacacaagaaaaagagataaacgagaagcaaaacaagaaaacttaaaataaatatcaactcacaacatacgtttgatctttgcagtgtagtccacttagtccggttatcttgtattcttgatttgaagggaggactttaactctaagatttttcagagtatttttagcctatacgagagagaaacaaaaaaaaaaatcagaaaatgaagtacttcacctcaaagatatgctaaaacaccatttgaaattcttgtaaatacctttttccagttaatagagaatggatcgttcacaccttgatttgcaataagaaaatcaacaacaggaccaggttttactatcatagcagtcgaaacatctgatgaaagaaattaaaactgaaatgttacaaagaatgtttttaataccacatgaaaaaacatatgttaaaagaaaagaaattaccaatattgagggacaagcctccctgagtagttctgaagcttgaatgaaatcctttgcaacaatctacaccttcaccgatattcgcaaagtactttgcgtcattgtggaagaaagattgccgaactaggaggcaacctctgcgcaaaatagaaatgtgtcacaacatgaacatcaagaacatcaaatatccaagaatatatctaagaaaaaaaaactaaaaaaggttcactaactgtctagctgcattttggctcaaaatacagtccatcactctgatagcatctagaagatgtttagttttctttccttgaagagcatttgcaatagcttccattgggatttctggaggcgcaaaaaggattgcaacattgaatttcttggattggtgaggaagctttagtcttttgtctgcgtttctcctagaaggcgcggtttcaagaacaacagagaagtctagactggatctaggaagaggaccaacagtataaagattcttgtcgccatcataagcaaaatgtttgcaacccaaatcagcttgacaagtctgttgaactttttcaagaatctttctgccaaaacctttggctaaaagtggactaccatcttcatatgtgatagtaacctgtatccaaagagacaaagcacactataaagtatgttttccaaatcaagtcatggaaacaggaacaggaagggaaacaaaaagcgcacgctgtaatggaagaaattatgactgtttggttttctgaagttgactctgaagtggttagtgagcagaagaatcttctgtcctttggaaccgttgccacggcgagtcattggaagaagactactcttgctcttcaaaggttcacgttccatgtgttgaggaggcggtagagtcgtatccatttctcggcctccagatgttatgcgtcgttgatccttagttcggttctggctttgacgtacctaaggtgtttggccccgaataaggaataacccttaaatagtaaaagaaaggattatgtaagaggagatgaagaggcgtgcggtgagtgcaaagagtcttaaagcctttttatgttttacgctaaggaagacaaagagtttttcttgtacatgaaattcgagagggtacactagtcattgatttctcacttacattgcatgcattacttttttaattaagtggataattattggcttttgttgtggattaactgcaatagaatttagtgggtagattgaagtcgaagagactaggaattcaaacgagagaactaggaattgatctgggaattcaaacgaaagaaccaagactcatgaggctttgctattctgtcatggtcgatcaaatatcaaattcttcaagtttcaaagaaaagccaatagagaattggaacttccttttttgtttatatttttcgttttcttgtttttgaacttgaaaaatattactatgtttgttgtattgtaagattttgaaattcagttagaagttagtgaaccttcgaggaatctcttgcattttttcatactaaaagcttccaaaatatatgaactaaaagccaattttctcattttccaccaatcataaagacccaactctgatagcttaaaagttaaagccaacatgtgtcaaggttataaaattgctttactaaatgtattaaagataaatccaatcttatcgcttaggccttcgccttcccgcttgctcttcgtttactatgccaggctcggttcctttctccattgatggggttcttatgagcagcaatggagcattggtcaggccttccattctttgcgttcatctccatttgcattctccttcgtctcatcctattctcatgcctcattcctttcagagctcgggtccttcgctctatctccaatgcttgtgtgaagttccatatccggactgtgccttcttcacctccacacactatacggtcataacccacgtccacagagaacaagtttgacccgaacccgtgcagcattcgttgtggcggttccacagtactcgaagaaatccttttggaataggcacaacggttagtttttaacagtttcctaacgtcgataagtgcgagtttaccgtcaccggatgctgagacaagccaaggaaactcaaaagaaagagagtagacaggactagtgtgaggcatccattgagatataagtacaacgcttgtttcactaccgtatcttctgatctcaaacattttaatccctccatcttctccaccagtaaacaggaaatccccagtatggcttcttgccaaagagtaagtggtaccctcatgagcatcagggatgatcgccaatggagtctcactgctaacgtcccaaatatatacatcagaacctgacgtgctagcgagggtggtttcatgaggtgcaagtccccaaacccaatcactatgcctcaaggttttgacacacttcattgaagatcgatcccatatacgaacagacatatcccatgaaccgctaaagatacttgtcatgtccagggcaagagatgtaataggaccctcatgtccccatagccgaaactcagtcttctctttctgaaaacctgtgagatcaaacaggttccggagaccatccagtgatttccagcaatgaatgaatccatcagtaccgccagctaccaacagctttgtatcagcagcaagtgccctaatcgtacaaccgagaggtttagatgccgcaatagacaagccttcttccatgtcccacatccgaacaatggaatcatatccagaagtgaaaacgagcttggcagaagctaagagaaaaacagtccggactgcttcagtgtgaccatacagagtatcaatactataacgtcctaaaaaggtcctactcctaaattccctttcaacaaacagatctttccatgatctctcatcagaaagccctgaacttgcagctccgaaaactacagggagtccccatctctcacgatagaactccttccaagcgtgatgctcagatgctaacctatgcagataagttgaaacacaagacactagacccaactcttttgggtcaaggcaattaagaatctcagatatcaatgcctgaggtaaatcaataatggtagtagacaaatccttgtcagagagtaactgtttcgagccactgggcactaaagttcccttctttttctgacaacacaacttcacatttggaatctcaacagacccatcattacctattctcaaatcggtattcaaaagaccagactcacttctttgatcgttcgcagcttcaagtctctcttggcactcaaattccatgaaaagccagtcagcgtccgatgtagcccgtaacacttaaacaaggagcttttcacgaacgactctgaccggatctcgaaaatctacagcaccagagacgaatccagctaagcttgaagataaacgagaaaaacgattcatcaatagaaccaaaccagattaaacaaaatacaaatttttacccccaaaaatcgataacaatcagaccaacacatcataaacaaagaaaaacgaagagattcgtaaatgttagctaaaacgaaacagaggaacaacgataaatccctagaaacagagatgaaagctaaaacaagcaagcggaatcgagaaaagttagtacctttagtaatcaaaaacaatctattcgtaacagagagaggattttcgccaaaattacgttgccctaatttctctaatcggattgatgagattttgaagatggagaaccaaaaggtccaaaaccaaccaagcatcaaacaatgtaaaaaaaaaaacattattgccaatttgttttttttttatggtccccggacggtgctatactaaccgtccgatcgaaaaacaaatcaagcgtccagatcgtacgatatgagcagctacaacacatgtatatctttgttttattatataagattgatcctatttttgctgcgttatattctcaaagttttcaaaattccacaataagtgatttttagttgtaaatacgctttttctagtaagagtaagattttgcatggagatcatatatcacatgttcttccatgcaaccatgaccttgaagcaatagcttattcttgtccaataatgctattggcgccagagggaagtggacaaagaaagagtttttgtgagatctatcgaacataatttgttccatggcttgttgccgcctgaagaatctaacgaccatatcacttgggttagcccctttgtctccgatacacacaagcgactattgaggatgcacatgatgtctttgaaacggtcacgttcatgagataacttgaaaagtttcggtgtgaaatgacccatctaaatacacgggataaagatcaaatttaatttgggcttctagcccataactatcaagcccataatttggtttacttttatttgattctatttttgctgcgtaattttctcaaagttttcaaaatttccatatttttcacctctactctctcagaagcgatcatcatcttccccaaaatgtctgattcttcctcaagccatgactcaccaccttctccggcgatcaccggagattcagaaaccacagtgaccaacaacgaatcagaatccaacacaaaatgtcaaacagcaatccaatccttatccacgatcgtcacaaacacaaacatcccttccacaataaccatcctcctcgacgatgaagccgtctccaccgcgatctcctctctcctcctacgtcccgattcaggcgccggagataacaacctctgccgttggctctacgacacattccaatccgcggaaccatcgcttcagcttctcgtcctccgattcgttcctttaatcgctggtctctacctctctcgtgtccctctccgtcaaccacaagccggattcgaagccgttttactcgctctctacgcgcacgaaacaacctcacgtgccggtcaagcaataaccgtcaacattccagatctctcatatccaagcatttaccatgaatccaaaggtctcacaaggaacaacaactcaacgtgcctcaacatcgctgtgatctcctccacgttagatccacacgggacggttagatccacgcgccgcgcgaggatcgtcggagtcgcgttggagctttactatagcaaaatctcgaaaatgccacgcgaatctaagcttaatttctgtgaatcgtgtgagaaatgggcggggcaaaacggagaaacggagcaatcttcacgggctgtgattccgactttgagcgatgattcgtggagagaggaagagaatgttgctattggaggaagatctgagagagatagtggaaggattccattgccatgggagcttctccaaccgattttgaggatcttagggcattgtctccttgggctcaaaatggaagatagggagttatctgaggcggcgaataaagcttgtcagagtttgtatctccgatctctgcatgatataaatccgaaggcgattttggctaccggaagtcttcttcggctccgtgagatggctcttgatcccaagaatcaaatcgatcacactgagctatcaaacgacaccgttctctccgtttgaccccgttttgttatttatttagtcaacgctttcttttaaacaaccagcaaaaaaaaaaaaaatctctttttggtaatgttaaggagaggccacgttcttgttggctaattttctgccttgacaagatcagagaagagatcaattatgaattgtgttattattattttgataaaaactaaataccacagcctcctctcagtgaaaaagatcctgcaagtcgatgatgtctgcaagaacaccggctgcagttgtgtcgttcccggctccggcaccttgaatcaccaaaggctgctccttgtagcaacggctatatatctctacctgcagttttccaatcatatcactatatcagttattcttactcacaagacaatctagaggcaaatattgtgcttgcgttcatgagataaagtgagcaaatgaatcacaatcaatatatgacaatctcatatgagctaagtctgcggagaagggcactgataagccgttgaaaaccgaagtattagcagtttcagaaaggtttaacaaacagaatattataacaaacttactatattgtcactgcctcttagccgtcccaatggtgaatcttttgaaacttctcgaatgccaacttgaacgctgcagagagaacgtgaaattcaaaatcagaagattccgacattgtacactagcatttgcatgtaccaatataattaggaaacaattgttctctctaactacatcaaattagccttgaaacaaatttctttacgttattgattattgactgtgagagtaaaggtaaccgttattaccttgaaccctcaatcacacagacataacgaagcacacacccttttgatgaagcttttttaactctctcctctatattctgatcaagttttactattccattatggaggaaatcatccacagacatgagtccaggtcccatctcttctggatacaagctctctatctacagatacacccaaaaaaaactacagaggttatgtacaggagaaaaggatcaaaggagtcttgttaggagcctttttttggggatcgagaaagcagaaccaaaatttagacaagactgagatcagaaatgaactagaattctccaccttactcgaagagagttggttaccaaacatatatcatagcatcagaatacaaaaagaaaaaaagaaaaaagctttgaatgtggttcataccttaatgctgtccataattatcctcttcccaagaagtcgagcaagaatcaaaccctatcacgacagacacaaacaaagttgaaacaaattaaagtttgtattaattatattctcgtcaacaaaaaaatttgcttgaaaaatgaaaatatatgggaatatcaacgcatagtctttttaatcgcagtgagttggtaaaaacagaacaaattggaggatttgcctaccaatagcatcaggaaatcagattcaagaaaaaagagttgttcacatgaccaccagacaaatcataactgccttttctactttactcaaattagatgaagaaagcaatctgccatctggactgaagataacctctcacctacatcaacaaaggtatgcatgcactctaactctcgcaagagacactacatatatatgttcatacctttctagcaacatccatgccaccgaggtcgtcacgtggatctgtgaagaaaacaaaagaacatgtcaatcaaacatcatattaagaatattcaaagatgatctttcttttcatctattacatgtagtttttcccaaggctaaaccaactatgatgcactatcaggtcaaagcaagttggagtatattgtcgagctacaaaacagctaatggagtgtagaaaagcagacaaagcaatatctatttgaagatagtgttgctaaaatagtagtagataaagcagatgtgagatgactatcaatcagaaaacaagatatgtgctatgatgactaaaataaaactggacggacctggttcagtgtaccccagctttttggcagcttgaacaacttggcttagaggcttgccatcttcaagctcactcattacatatcccaaggtacctatcattaatcgagaacggatacaaagatacgtaaataaataatacatgcatatattgggataagaaaaacgataaacatctgaagtctgcttaccgctcaaactaccgacaatcctatgaacaggatctccagacgaaattatgcggttcaaggatgcgatgacaggaagaccagcaccaacctataaataaacatatgtcaggcgcaaaagcttttcactacctactgtatagagccaacaataccaccacatgtttacaactagtttcattttcaaatgagtactaaaatgtgatataatagtgttatactctatacacaagctgtgtttcacctacagtagattcatggcggatgaatcgcggatgcaaagccaatttgtcgtaatgttcctgcgcagaagacaagatgagagaaaatatgagtaatttccaactacttgaaaaattagattagcacagatgtactgagaaactttttttgtagttctcgcctactatctagggtatgtccggttgttaaaaaaacaagatggatttgcagatagagaatttggagaactagattaacttcttattcttgaaacaatttgcagaaagggtatttttaattcaaagagaacctaaggcaacttcttattcttgaaaacaacataaagtaaaagttcaagattctatgatgtccctgaatatacctgttcaagctaatgatacacaacaataaaaccaaaagggaagagaaacagcttcagggaacaatccgatgcgtatgctttcacattaataacataagcagaacatgcactagtgacaagaagttaccagcgttgaagtaacaggcttcttatttgccaggacaatacagcaacccaagtcaactgccttcatcaatatttcaatcgtctccatgctggctgagcaatccaccacagctaagcctatagcaagtacatagattttatctatcagaagctattgaggcccaacaccagatttcaaacgttacaaaatgttgaccacaacagttgtaattcaaccttatatttggtacaaacctgtagatttaccaagaagttttgcaatctcttctgtttccgtgcttaactcggaatcatggacgactcgatatccacctttttctgggattaagaacatatgatcattcggcttatgatccataaagagactcatggtaaatacttacccaaagcacccaacttcgataatgcagaaccagttgatttgataaggcaaacttctgacaagagttcatcattcagttcctctttgagcacatccattggagcaactaaggatttactatcacatactccaatcacccgtatatgaactccctgttaaacggatacaagtgaggaattcataatttgtgagctaagctagacgaatttgccttattcccattacttccaacattttatcaactcgagaaaaacctagatgatggtgaggatgataatgcagatgaagaaattttcctctacaagcatggcaaaatcgaagtaagacgattcagaaaccacatttagtataggattcattcattactgagaaatcgagcaatggagacacaagtaagtgaggagaaagagagtaaggaccattttggcgtgaagcgatcggcaagagacgatgtgttgaagaaggtggcggccaacgcctccgcagcccatgagaagcaccgggatcttcttcatccttcctctcttcttcttcgatttcgttttgtttttttctacaactactagtctactaccgtggttttcttcgttcactgaaaatgtcgcagctaagcaaagcccaacgtttcggaaacgcgtgtaatcgtagccaggcgtttcgggtgtcaaaggctactagattggttcttccgcaattacttacaaacgctatatttgcatacgattagtattattagcgtttgataacaattatactttgataacaattacacaaatcgctttttatcgttataacacaacaaaaccgaaaaaaattgagatgaattccaactaaaattcataaatttaaaataattaaaaacattggaattatatattttgcaagttttcctagttatttataatttatgtaactatgtaagtgtttattcactaatgggataatatactaatactagattttaacccgcggtataccgcgggacgatttatttttcaaaagtaatatatattaaaacttgcaaattttatttttataaaatatttatattttacagtttataattgttattaagtaacactataccacgaattcatgagacaattgttaaaaaactgaagtttttaacctctattaaaacagcatgttaataatattttaaaattttataaatattgattcaaatacatccaccatataatccaattccaaaataaaacacgttctgtaatttctttactcgtcccgtgattttttttttaagtagtaatttttaaaatttaataattatttttcatatataaaagttttacaaattgtatcattctctaatacatttatattttatagtttaattttatatatagtaacattatacataccacataacatttttggttttatataatcttttctaaattaggatgatttgatatgtttaatattagtggtcttaaaaaataataaattaaagatttaacccgtattgaaacagtggattaattatattttacttttttattaatgttgattcaaaaacccgtcttgtattaaaaattgaatcacatctaatatgttattaattattgtagtatatataaattataaattttcaatataatatgtatgaaattgaatataaatatttcaaattatgacccgttactcagaagaaagttttcttaaatctatttttcaccgttataatattttttcatgtattgaacagtttatatttgtttttaaaaattcaaattatggcatatgcgaaaaaactctaattattcttttataatgatgatattatttttccgcaaaaatagaatcatataaagatgagaagtgaactataataattaataaaaaaataatatgataatttagatatcaaacataatttgttgattttaactgattatttttttggaaattaataatgtattttgtttttttaattaaattaaattaattaaaatttagatatcaaatcttatatgttgattttgattggttattatttttggaaattaataatatatttcgttttttaattaaatttaattaattaaattagtatttgacattttaatcattaaagagataaattaatttactttttaaaattttatttctaatggcatacctatgtaattatttacaaaaattaaggttacatttaaaatgtacttcccaaataatatagtaggatacattggctccgattggtaaccacttttgagaaaaagaatgagtagaaaagttgtgttcttctttgttccttagttttttttaccatttacaatgtatttttgttccattttcagacatgtgggtcctacatttttcctcatcattcctcaaaaaaaaagaatgatagaacaaaattgttccatcccaaaattgtagaggaaccaagaggaacaaaaaagtaaaattcgtttttatttattaaataaatttaaaatagcttttatgataatatttatatttccatatataatattttccatatctttagtatatattgatatataaatatatttttttatcaaactttcaatttaatgaatgttatgaatttattttaaattagtataaataaatgttttaaagtgaaatttattttgaatttgtaatataatttaaatttttactataaaataaataaatgttttgaagagaaatttataatttaatttattttaaattcatacagaactttaattttaaatgaaattaataaacaaaattcaataaatgatatttttagtaattattatgttaaatattagttcacctttttggttaccatttaccataatcattttgttcaattcctatgttcttcttggttcctacttatggctactttcctcttttttctcatttttgttatttttcattcatatttctattgttctttttgtcatcaccaatcggagccattatgttacgaaaacatttcacagtggaaacaacataggaacataggaacgttgaagaaggaacataggaacgttgatttaactccatttgatcaatcattaattccacaaagagctttcaaatatgtgacagtacaatcatcttttgttgatgaaccttcttcagatcccgtgcaatcgctacaacggttggagcaaagattagtaactttgattaattctatcaaaaatcaaattataattgatatatgtgccaaccagtttggacaacacggggcgttaacaacttcttctgtctttgctttgatgtcttcctcggtgttcatagtttgaatcggtggagctgcttgcatattaccaaagagataaagataagttgattcaagaagatggatattacagtctgaatgtgcatattaccttcgattgtggaggaactcatgatgagacttgatttggattctttgattttgggaagattgggagtacattaaatctttagtgatgtttatgtgtgacgttttgatgtgttggacttggatccccatttaccattctaattccttgctcctaaaactaatagtattgtttttatgtcaactctctaaaactatatatatataatggtaataccaaacaaaaaaattctgaaactttcaaaattggaaaattgtaatttcaaatttatttcgttaatattgactcctcaagtggttgacttggaactttccaagtacattgggcccaagtcgattaataaggcaaacaataatgggattaggtcattgggcccttagcctcggccatttatacatcctaatactggaagaaaaaactgggttagttatttgttggttcggttcggttcgatcgatttcatttaaaattaaaaacccgctagaagaaactaacctcaagatccgggtttgacccgtcagattatccgattacccggtcttgttcactgatttgattcacaagtttcttcttcttcttcctcagaacctcagatcttattcttagaagtttccccatgaaatccgagaagattcaaatgtaaattcagcctccgattcatatattttgctcaccggaaacttcagatcgagctactgcaatttgcggatcgtgtttttttttttctttcaattcacggtgtatttatctcgggagaagaagaatggatactttcacggcggaggatctgtcgacgatcggcggaatagcgacagtatcgctccttcactcgtttattccgacgcattggctacctttctccatcgtcggacgtgcgcagaaatggacgctttcgagaacactcctcgtcagtaggtttccaatcttaaatctctgattcctatatattgaattctgaattttctgactttgatggcgcgtttgatacctatccattgttctgctttttgatgaatcaataataatcgaagcattgtgtgtgcattctttgattgagctagaactagataattgggaattatgaatgatttcaactgctgctttaatggtcgaaggacttgacttgtagttgttttgatcatgtttatcatcaacgtttttgttgcatttggtgtctgatgggatatagatgatgtgagattcttatctgattttttctagtgtcacccattttcagctgcatttggagcagtcctacatgttatatccacttctctccttggtataacagcaatcacaatggcgaataccatcgctggtgaagagactgttcacaaacttgcttcccttttgcttgtatttctcggtggaagctatgttttgctgtttttggctggtaaaggtggtcacactcattctcataaccaacccatggagaaaatggctgttgctggacttgtccttgttcctgcattatctccttgtgcaacaactctcccggttttcctcgctgttggaaattccaagtccatgatggttctcgccatcatagttctgctcttcaggtgagactaagtctattgtttttggtcacatttgttacgccttctcttgatatcgtcaatcttatggcaattagatatgattttacaagggaaagaacatatgtttgaaatgattggtattctttgggcagcaccatattggttatgacatcgctggttgctctatcgttctatggtgcaagccagctcaagtttcactgggtggagcggtacgacaaactactggttggttcagtcctgtgtttggtaggtatcttaacccttctcttccatgatcatgaccatggcggtcatgaagcacatcaactccacaggaaaatcattactctttagataccgtttcgagtctctgttttgcctatctgtcatgtctgtttgttgtagagcgtcttaaggtctattaatctttctgcttcgcgttgtatgtctataactagttgtaacgctctctgttgcacgtgaagaaacatatggaagcattaaattccttaaatagaacaactctttggaggtctagtgtaaggcttgtagcttttacataattttgtagttgttccgttgataaagttgggtttaatttttgtaatacaacatagttgtcttcgagtcataacataatttagatcttaagctcttagtggtcgacttttcctataactatggttgcaccaaacccgaagctaatctaacattatcagtttttacatatgtttgattcttcattcactccaaacaaagaattatttatgcaaacaacttaccgttgcatttacttcgaggaaataacttattcgataatgtgtataataagtattgaagaggaaaaaactgaaacacatgttagcataggaaaaattgggataaatttaacaactaactaatcaagaggaaccaacggcttggctgtaaggaagttgtcgaaaggagtagaggaaggaggattgaagaaaggaggctgattttgatactctgtgacacagatatttgaagccgcgggtgcacctaatcccatcatctcccacgagctccgctggtccacaaacgggttcccaccactgcaaggcaaagcaacagcttccttggtttggctgctgctaaatttgttgcttttggcagacatgaaagacatcttctcttgctttcccatgagaagagcctcgcaatgacctgccatttctgtgtatgtcatgtctggtggatcagacactgagtatctccctaattgtgctgttgtctgagacacctgcacccattttcttctctgtcagtctcatgactcgaatgtttgtttacgtttatgcgtttgcatttagaaccaaaaagaaaaataactcactgcatttagaagttcatcaatgctcagaagaaatgcagttttagcattaggttgtatgtcaagactaaactgttcttctggaggactcggcactgcatcattctccggtataagcaattgagtttcagcctgcgaaagtaaatggaaacataatgatgttagaatagtaactaacttcaaatttgagaaatcagacgcaaactgtggatacattttctcgaggtttgttgtttttttcttcagaacggtaaacttgaactggagattctgtcaactgcgttccaactggacagccatcgataggtataaagtctgaaactagctgctcctttatagccgacgattcttgctgcaagttaaaaccattaacacaggtaagtagttatacactccaacataattcataaatagtgatcaacattatgatagtagtacatctgatagttttcccaaaaacttcattatcatggaagcgtagtgctctcgagattgattttgtgaagcttcttctatcgtgacaagtgaacgtgaagcgtcgtcatcgtcttcttttgatccataattctttgctggttggtctgcttgtccatagaaaacagcatctagcttgcaatcttccaccaattgaagaaacgggtctacctgatatgcaacattttatattttattatcaagctgtatatacaacagactaagagacagagcaagaacataagtaaaactattaactaccgttttttcctgtagtgaggtttttgcgctattaacaagaggagggatgttgaaggctttcgctgagaaaatgatcatcgatgtagccaaagtaaagagggatctacgccgtgatggctgcaagggtcctataattggaaacaaaaagtaatctgtgaaaaaaaaggaagatagtttgcatataacagtgtgcatctactaaaatcttaatttagagatggtccacaagtttatctgcaggggactatacctccaagagacagattacgcaaagaaaatgctagctgaaagctccagaccaagacttcattgctagagtgctacatatatgaaaagaggtaacttctattgtaaaacatgaactaatgcagtgtaactatgtagtttcatacaatggaactttttaactactgtaccttagtccggccgaagagaagtactaagctaaatgtattagcaatggcttcataattttgtggcatgttgtgaggagataaagactgcacccaaatcgatgaaagcaaaaggcaaatttggtggctgcttaatcttaagggtatcacctgaaagttttccgttagaaggcattgaaaccaaattattacaaaatgataagttcatgaatctaatgtaaaacatactggtttctctggtgaacttccagaagaattctgatctgctaccattgaagacgggtttcttttcacactctgagatcggctgtaacttgactttaaccggctcagtactgagctagtattgttctttggctcttcgtcgtcaaaactttcacctcttatgaattttgacgttgacctgctaagtgttgaaactctctccatctttgcagtatcatcaacagaattatctgactccaacttcagttttctaaagagtgcagctgaagaagaaaacacagacacagttcttgacagtgtcctctgcatatcagcaggtcttctggagttgagaactgaacttggagaaacagaagatgggaccagaacaacagaaaatatacggtgagcccccatcctcgattcatggtcagcacagaccatagcttgaagcagttgatgaaaaagtgcatctggaaaagcctgtgaaggaatttcacgttatcttctcaatccatagcagttttggttacatattggagggaaaaagagatagactcttcaaggcttaagaatcttgccttgttttcatatgataaatttggtatagctgctataatttgtgctgtacggaaaactgcggcgattagggttcttgccatgactgtaatatttgacatgctttccaacatgacagccattatgtcaaggataggacctgcatctcctacctacatttcgtgagacaatcagcgatttattcatttttgtacatatgaaaattgtatagcttttagagcttcttggggctaaaataggggttaccttttgggataattgcaggaggcattgttcaactacagcttcgaatttcaggttatactgaatcatctcattccctagattcgaatcatctaatgaacaatggatgctcttcctcagatgcctaatcatatcactcagggcaccaatgattgccacggatggcagaactttagtctgttgggcaagtgcagtagcaacataaactatttcaagttgcattctaggcttctttagaacattcttgtgatcaagatgcttgatcaggatagacaacaggaaatgcgtgttttgccctgtcgtcaagtactcacactattagtaagttactaacaaggtgaccagaaacaaacaaaccaaacggagacaatacgaaccagatctttcgatcagcaactgaacgtcctgcagcacatatacagcaagaccgttctcggtggaccacacttcattaaaatcaaaataacggaagagtgactcgagaacacgtcgcacagttgttgcttctttagctaactttgccagattatgcagacaaaccctcgaccaaaacttggggtttttagcatcctccctgttattaccctctctaatcagaaaatatattctaaaaacaacaagaagcatgccaaagtaaagctggagtagaaggatttacacagatacaattgccttgcctctgtcatccacgattcttgtccaagaagcaatccttgtttcagcttccgcaggagataactctttatcaatggaagcaaccttgttgtcttgattgactgcagaagtggacgattgactatggcctccataattttctaagacaacagagactacctgaaaagaagagaaacaacaaaacagaggataaagtattcaacaatccaagaaataaatacagtcattatagagttcatatacaagcttacattgtcaaattcaactgatatatgagaaaactctcccataaaccaaacctgtggaaaatggacgtgatcatatcagtacttttttttacaagttctcaatcataagaaaaaaaaaacacagagaatatgaataccaaggatgagagggcctggaggccagcagcacacaaatttgttgtgctatcttcttctcccaattcatgagctaaaggacagatttttgggatcaacccatctaagttaaacatgtaagtgccctctgcctgaaaaaaaaatcagaaatatacattaattatcagactttgtcaattataagacaaatcgagataagtaaagttgacaagagttattcacctgactggtaacaaaatcatagagagcttcacaacctaaaatgcgcatctcatcatacctagtttgatctagaagaatatgaatgagaccaaggtagctactagcaaacaacaacctgtaaaagacataactcattaggaaagacaaaaccatttttaagcagtataatgttgaaataataaaaacaaaaaaacatacatttgttcattacaggaaaccaagagcttcttgtagatagacattacaatcttaacagagtgaaattgttccattctcaattccttgtaacacctttgttcaagagaggttgtgatctgaaaacagtaaatggaaatgagaaagttgttgtagagatcaacgatatcccaatatcaaagaataacttgatgcggaattcaccttagggatacgaagagggtttttcgcagcatactcgcataatttaccgatttttcgatcattaggttgctcatcctgcagaccatgaatcaaaatttaggagagactttcacagagtcaataatcagaacatgcatagtggatttaaaaaaacgtttcggtagtgtaaaaaactgatgcttctccaaaactcgattttcaagaaagtgttattacataggactaaagtaataaggtgctctgcaaatgaagttccatcgttatggctccgacttggatatgagcaacaattacactaatctcatcctaattcaatgaaactcatgttctatctgtaggtcacgagaacaagacaagttttggctaatggcattatattactgaggaatgcgaaatggtggattgattcaaagagatcgaagcaaaacctgggatcgagggaagatatcagcgagaagatgtttatatcttttgacgggatgtctcgatctggctcgcaaagccggacaaaagcaacacaagctttcacatacagggaacacggttcttgaaacaacccccatcgatctatctctcttccgcgaatattcgaacaatgatacgagagatttacagacacaacatcataaccgtgaaatcaatgtatgattgggataacgaagagtcaaaacagagatccatctggaaaaatgtgaaagagaatttgaggaggaagaagagaatcgacgaagctgttttgttttgtaaagaaaaagagataattgcggaagttttttcatatgtttttcaaaaccatattttgaaactctttttttttttttttttgcaatctatttactatttttgtgtttttggacataatgatttgaatgatattaaacaaaaaaaaggcatcttattgtaattaaattaataaagtaatggacgtttttgttagtgagacgcctgaacttgtcatgacatacagacataccaattccattcatgcaggagaatgttgaataatgtgagggaacgtgaatagaggaactatttttgggtaaatgcaatcacatcctctcattctcaaacctccaaaccaaaatgtgtagttttcttcctctccaagaaacaatactcttatgactgcaataccacactttagtctgtgtgtgttttttaatagaatggtataaagaagcatactgaaatggtgtttttaaatgaaagatcaaatcacaacaatatccaaaacctaaaataaaaagattgtgggcttatttattaggcccatagtctttattctttaagggcaaactttcagagatgcgggtctacattatttggcccgaaccagtaaaacctgcaggcttctagagaaacccatacgaatggcgagttaccggtcagaagcgtaatcaccggtccttaaatttcatttccaggcgaacgatttggaaaagtcggtgtcgttaagaaaagacaattcctaccctttttgtcgtcatttgtttgctaattgctacctttataatgtaagggaggagtggagttgctattattattccgacatttaagtgttatgtgtttgtcggatcggattctatcttaagaatcttatcttattccccccgaatatcattgactttgtcttaaatcttaatttgttatgtttgcacttaaactctctctttttcgttagtgcacacaactcgtattccatcaaaatcaatgataaaataattcttaccaaattaacaaaaagtgaataaatatcacattattcatactaatcttcatgatatcatcacaagaataatgtgtgcacacaaaaaaccactgtttgtttccgcgtgaagtgaactctcaagagtctccaatgttgaccaaatcaaacaacctcttaacttctttgaccaacaatttttaaaaccatgaaataagttacatacgaagacttgacttgtttctttctcttaaaaatcaaagtttaactgcttcagagtttaattttcaatgtgtccatatacaattcattttaaatctaaagcaaattcctcttcttttttttcctttaatttattttattttttatggagtgagttgagttctgtatacattctttgtaaatggaaaaaaataaaaaaacagcttgattaaaaaaaataaagaaattgagaaaaagacaagaatttaaataataataaaataatgtaaaaagaaagtgaacaacaaaaaaagacacaaaaaagtaaaactgaaaaggagtatttctctgtcatttcccacaccaatcgcataatcgatttcttccaacttcaataaaggggaaccaacgtaaccctaattttgctttctcctctttgttcagaaaattttccctttactctcaaattccttttcgatttccctctcttaaacctccgaaagctcacatggcgtctcgaaactatcggtgggagctcttcgcagcttcgttaaccctaaccttagctttgattcacctggtcgaagcaaactccgaaggagatgctctctacgctcttcgccggagtttgacagatccagaccatgtcctccagagctgggatccaactcttgttaatccttgtacctggttccatgtcacctgtaaccaagacaaccgcgtcactcgtgtgtaagatcctcttttctcttatctcctgttttgaacaagttgattcgccaagaatctgtggagattctattgatacagtctgaaatttttgctctatttataggatagatattctgggtttgtttctattattagatagcatcgtttgatgtttcagtcgatttatgactgagctttaacatgatggtattagagtcatatctagacccttttggtcgttgtggaagatcttagataaacttgaccataacttcctagagattgagatggataagtctaatggggattttgtctgtgtgttgtatttgtttctagctttcattttcccttgtaaacacttcagattggggtaactttaaggttcatgaaactatttatgatatggtccttttcgaagcttcaaatgtagagtacaacaagttaaaggaaaaaagaaacactttctagtatgaaaaggggaaatctaaactctaaagctcctatgttttgcactgtgtagacttttctagtcattggattccttgaaagaatccctaatagttattccatctattaagcagttcaatttttacttgtaccttatgattttctcaatgctttgttactgatctagcttactttttggtccctactttgtgagttcttacttttttagaagaattgtggattctttgtacttgatttcacattatctctaataactgtttgatgtatcaagagaacagctaatcgagtataaaaagttaatgcttgtctcttgttcatctgtgcattattgtcttcttcttctacaatatcaatattggtattgttgattgcatatctaattctacatatattggcagggatttgggaaattcaaacctctctggacatcttgcgcctgagcttgggaagcttgaacatttacagtatctgtatgccatcactcttttgacttttacttatccgaaatttataatggaattaacattgtataccatataatgcacataaactgtttactttgagattggttatgttatagacaatgtaagactaactcttaacttgtcctatgattgatgcagagagctctacaaaaacaacatccaaggaactataccttccgaacttggaaatctgaagaatctcatcagcttggatctgtacaacaacaatcttacagggatagttcccacttctttgggaaaattgaagtctctggtctttttgtaagtttctctcaaactctgatacagacacattgaacaatatactcaagacttctttaaaaattgcaaaatgatttatcaaatgttgagtaagagaacaagattgtttatgtgggttgttctccaatacctgattctttttttgtgatgcctcttcatacattgtctctctaagaaactgtttaatgtggcagacggcttaatgacaaccgattgaccggtccaatccctagagcactcacggcaatcccaagccttaaagttgtgtaagttcagctttttcattgtttgtctgttaacgctctgctacttttctctaaaattgccagacttcatccttttgcttaaaaaaacatattatatttgtcttccttttgctcagtgacgtctcaagcaatgatttgtgtggaacaatcccaacaaacggaccctttgctcacattcctttacagaagtaagtttcttctttcacttagccaacaaagcttcttcataacgtttcctctgcattttgcattttttgtctcttgtaagtagtctttgatacagacatcaattgaatcatatgtttcgtataataaactgataaagttgcatatgagcatttgtacctaataacacaaaacaatggtgcagctttgagaacaacccgagattggagggaccggaattactcggtcttgcaagctacgacactaactgcacctgaaacaactggcaaaacctgaaaatgaagaattggggggtgaccttgtaagaacacttcaccactttatcaaatatcacatctattatgtaataagtatatatatgtagtaaaaacaaaaaaaatgaagaatcgaatcggtaatatcatctggtctcaattgagaacttcgaggtctgtatgtaaaatttctaaatgcgattttcgcttactgtaatgttcggttgtgggattctgagaagtaacatttgtattggtatggtatcaagttgttctgccttgtctgcatttaacacttgtgttttagatctgttatataaagccaaaaaaggttttgtgtgatttggtactatcattttattttccaattcgaatcccatacttatcatatccattgttctgcgattcatcatcaacccataccagacagagcatacatgtgagttcggctaaattgcaaaaataagaaagaaaacacgtgttgtgcttcctatattgtactgtttatagcctcaataggagtttgtggattatgtaaagaaaaacatcttaatatcctcgaatagttgggttactcagctatttagaaattgagaaatttaggattagcttcaactaagtccatataattttgggaccaatggcatgtattgttattatcaataagacaataacacgtattatgttttttaaattttggcagtatatcgatttgaatatgactgaatgtgaagtatgaagtatcataatgattttaacacaaatcaatatgtacatcactgaaagtagttctctcagtgaaagacacttgtcattgtcagtttctttcttctggtcaattatcttctctttttaaaaatatataaatacagtttttttttggtcaattaaacacaataagaactctttgtttcatatatataatatcagtaactctttggaaaataaaataaaaaataagaagcattttcatagcaataataacagcagtgaattaacacatacaatttcatggagactataagtaagagctacattattttgtgcatgatagaaatttagaaagccacatgaatgtacgctcgtatttttatacgtaaataattgatcgtatgattttcgaaatttcgtattcaataattactccagtgtccatcatacgaaactgccaaaatatatggccccgtcgatcttgtcgtcttttctttttcgtttgtaatgtttaagttcaaccactaatatccaccacacacaaaataaaactgcatcttagagaaacaatccacttttgtttttaaggttcaatttttgaaattttcaaaaaacaaagcctatttcatacactcaccagtgcttcacaattcatcataattcataagccacgcaaaagaaaataaagtgaaagattccatggcggtaattgtgtggtggctactaacggtggttgtggtggcgtttcactcggcgtcggcggcagtagtagaatcaacgtgggaggttgagtataagtactggtggccggattgtaaagaaggaatcgttatggccatcaacggccagtttccagggccaacgatagacgcagtcgccggagacacggtcattatccacgtcgtcaacaaactctccaccgaaggtgttgttatccattggcacggcatacgtcaggttattcaataaactctaaatttcttccttctatacaaaaatataagtatgtaatgtgacaagaagcatcaacaaacaaacaaaaaatgtgacaatgagcttattctatacaactatatgtttgattgttttacgaccgaattagaaccattactttttattcaacaaaaaaaaaatacaaatgctaaccgttgttctgctgattttcagttttattttttcaatttttttgtgtgtgatgttagagcatcattattggtggtatcattattggtggtatcattattggtggtatcttaaccaaatttttaagttaagatttgtgaagaaagagcttttatataagagtttttaggcttatatttaaattttttcttcataaatcttagctaagatttggctaagatactaccgataatggtggtcttagattgtttcagagccactactagtactatacagtctgtataattaattcacaaaaaaaattattatcaaaaactaatttgtgatcatggaacagaaagggactccatgggctgatggagcagcaggtgtgacccagtgtcctattaatcctggcgagactttcacttacaagttcattgtcgataaggttactttaaacttgttctagttttatattttatgaatgttaagaaacaacattatttggttaattaattgggaaagaatacggtgtaggcgggaacacatttctaccatggacactacggaatgcaaagatcatcgggactatacggaatgttaatagtaagatcaccaaaagagaggttaatttacgatggagagttcaatctcttgctcagtgactggtggcaccaaagcattcacgcgcaagaactcgctctttcttctcgtcctatgcgttggatcggtgaacctcaaagcttgttgatcaatggaagaggacagttcaattgttcacaagcagcgtattttaacaaaggaggagagaaagatgtatgcacgtttaaagaaaatgatcagtgtgcacctcaaactcttcgagtcgaacccaatagagtgtaccgtcttcgaatcgctagcacaactgctcttgcttccctcaacttggctgttcaagtaagtttctttcttttcaactcacacgtgtactttaaaagctcacacgtgtggtttgattgcgcacgtgacagggacaccagctggtggttgttgaagctgacggcaactacgtcgcaccgttcaccgtcaacgacattgacgtttattccggcgaaacttattctgttctccttaaaaccaacgcacttccatcaaagaagtactggatctccgtcggcgttcgtggccgagaacccaaaactcctcaagcactcaccgtgataaattacgttgatgccactgagtcacgcccatctcatccaccaccggtgactccaatctggaacgacacagatcggagcaaaagcttctcgaagaagatcttcgccgctaaaggatatccaaaaccgccggagaaatcacatgaccagctaatcctcctcaacacacagaatctctacgaagattacacgaaatggtcaatcaacaacgtctcattatccgtaccggtgacgccgtacctcggatcaattagatacggtttaaaatcggcgtacgatttgaaatcgccggcgaagaagttaattatggataattacgatatcatgaaaccgccgccgaatccaaacacaacgaaaggtagcgggatttacaatttcgcgtttggaatcgtcgtcgacgtgattcttcaaaacgctaatgttttaaaaggtgtgattagtgagattcatccgtggcatattcatggtcatgatttctgggttttgggttacggtgaagggaaatttaaaccggggattgatgagaagacgtttaatttgaagaatccgccgttacggaatacggtggtgttgtatccgtttggatggacggcgataaggtttgtgacggataatccaggggtttggttttttcattgtcatattgaaccgcatttgcatatgggtatgggtgtggttttcgtggagggagtagaccggattggtaagatggagataccggatgaagcgcttggttgtggattaaccaggaaatggcttatgaaccggggacgcccttaaatgaaccggggttggtatgtgtgtttattttcctcgttgggtttcttaattttttaaagggataaaaataaggatgttctaattgataggatcaaagaaaatatgtttaattctcttgttgggggacaagatctctttctaaattatttttatggtgcaacaggatctcttaagtgtatgatttattaaagaaacttaaaatcttatttagttacgtatgacatgcatatttataattaatatggtacataacttacatatgaaccttttaatttgtgacttagtccacttcatatatgtcaccatctcgctctatatggttgcacacaaatatgtactttcataggatttgatattggctatgtttttagtttttgttgtggtaacgtacaaatataggtcgtatttcataactcataagtttacttcttataagcaagtagggaacaagtagggaacacaagctagaacagaaaagaaattgataagtggtagatgatagataattgtattagccatggtgtattggcccaagtcacttaactggctttcattttttgtcaggatcatcgtaagtgactatcaattccatgtaacaaagatttttttttggatattaaactggtttaagtgaaaataatacttaattattggataacctgaattcatctcctcttaacaatttaacttatagtatgtacaaattatacttactcaacactgcttgaagcgagttaatttccgaatggtgctagtgtgactgttagtatttttgactgttagtattcatttcaaagtaatatattcaaaaggtataaacttttatggatgtataaacttttccaccgattaagactattgactattgtaggttgccaaaagtatagtaactcgaaataaaagaatattaccagagatacaagtatacaacaacacatcgtgtcactaaaatagtctaaagtatgaattatcgtggtgtcctaattaatgtggaatggagccatctaaattcgaaatttgttgtgagcaaccattcctttccagatcaaaaaggaaaaatatattacaatttattttgcttgttagtaagtttcacgagtttttcgtggagctttcgtcaacttctctttttcatcatctcactcatttgcactttatagaattgaatttaaaatttgatatgatactatatatatcactggtataaactattaggctacacattattgacagaacggatgtcaaatgagactggttttattacgggaaatataatgtaatgaaaaactgtttcacttataacagagattagggagaacaagtgtgttattgagaaactctacttaactctaactggatttagaccacaagtaaaaaattcaaagctacggcctacatatcctttaacaaatctctcgtaatgctgttgctagccgtcgaacagattcaaagcatattaacaaagttatagacgtacgtgatgcgtggttgtaaagtagacaagtaggactgatgatgaaaaaaaaaagtagacaagtaggactctaatttttaaagtttttatttgacacgatcaattattatgttcacaaaagaataatattaaataatttaaaaaaatattttaaaaatacacaagaaagacgtatttaatttttgacatatacctaaaatataggattttgtgtgatagttaacattacgtacatgttcaaaacaaccaagaagtgagattgataaacttggcattgtaaagattgtgaacgtgatctcaccgtctaagacaaattcaactttgtcaccctaaaaacatgtaacatgagatcactactataccgaatcttcttgagatattttgattgtttacacgatcgcaattatgtccattaacattgtgaccattctaaaaccctaaaatttaaagaaaaaataaataaatagcctttttgaccaaaaaacccaatctatggttttgcccactatctcttcctctctcctcctatatatatgtcttatgatgagcacacatcatcatcattcacatacataagccaaatgggtgtgtggtggatagtgctggtggtggctgtcttgactcacacggcgtctgccgccgtgagagaatatcattgggaggtggagtacaagtattggtcgccggactgcaaagagggcgccgttatgaccgtcaacggcgagtttcctggtcccaccataaaagccttcgccggagacaccatcgtcgtcaatctcaccaacaaactcaccaccgaaggccttgtcatccattggcatggaatccgtcaggttctctctcttttttttcactataaccagatcatggatctagaaagcgccgagtattttgtaaacacaacagaagttattattaagatggatacactaagtgtcatcactcggatcatcacttaccatatgaactttttcagatcttctattttcttctgcttaatttgttttcttttttctctatacattaattcaatgattgtgtccattgtataaagaattgtagattggtatgatttgtcatgatattagatgataaaagaagaaagaaaatgggtgaagttgcagaaataatgggttaagcagcacatgccatgcatgatcactttgtctcttcttgattcaataacttcatttacgacgtttgcttttcccataaacactatttattgtcccttaaaattatcgcaacaaaatagtacattgacactactctataatttaccttattttgcattcctaaagcctaattcagtgtaaagttactacttagtagatgactgaatactttaactgcgttttgtgaatatagttcggaagtccatgggcagatggagcagcaggagttactcaatgcgcaattaaccctggagagacttttacctacaatttcactgttgaaaaggtaacttttttcttcttctctttttccattattgtaacaaaaataaatagtaacaaatttggggataaatgaaatggtgcagccgggaacacatttctaccatggacactatggcatgcagagatcagctgggctatacggatcgttgattgtggacgtggctaaaggaaagagcgagagattgagatacgatggtgagtttaatctcttactcagtgactggtggcatgaggctattccctcccaagaactcggtctttcttccaaacctatgcgctggatcggtgaagctcaggttcttttttttttactatctctttactatttttacttactaaaacaatatcaatttactaaaaaaaattcaaaatttgttttaaaaacaaaaacaaaaaagtaggtgcattttttcttttttaatagtggagaatggagattgattgagataaagagcaatttgcacaagcaatagtacagctggcatatcaacttctttttttttttgggaaaggaattttgaacataggcataatgatttctatatttctcttttaaagcaattctaacaagtagcaaattcttcgaatgtgaatagattggccactgagtttctttaaagcgagaaaaaaagaataaattattcttttgcttagagttttctaatatatgcatcatatttgttttgatgaaaaattgaagagcatattgataaatgggaggggacaattcaattgttcattagcggcgcaatttagcaacaacacaatcattaccaatgtgcacgtttaaagaaggtgatcagtgcgccccacagatactccacgtggagccgaacaagacttaccgaatcagactctccagcaccaccgctcttgcctccctcaacttggctgttcaggtttttactttttttccattttattttatatctccattttcattattcagtaggaaattctcaaactaaaaacaaaaaccaaacttgaagtattcaatcatatgcaaaaaacagccaaaatagcaatggactttagctatatattaaaacataaaatatgatcgattttctatatgttgccaaaataatttaatgatttttgacttatgggtcacgagtcttttggcaaatttcatacccgacggttttttctggctgaaagtcaatgaagattgccaattagccaatacctaccaacaaaatagtatcatagtgggaaattttcttcaaatagaggtgatttattaataactaaaagagaacaaaattaaaaagaatgatggactatcctaaactcttttgatagtatagacagtagtatgagctggtactcactggactggaaagtgatgggggtaggtccacagtgaaaacaaagtagaattttatagtatgtagtattttacaccacaaaagttatgtattgtattgagatgtgtgcaacgttccgtagggatttgactaagaggtctcaatcaatctatcaagtaggtagagatggcctcagtgttactttagacttttgagttttgacacgcaaactcatgttcaattcatttttgctaaaaagcctttctattcagctattgtgtgtattaccatatactagatgaatacccgcattatgtgcgaatctatgtgttactattttataaatactttatataatatatttttttataaagtaaatttgaatgtattatttttaaaacgtaaatatgacttgtaattattttttaaaagttcagctatattagtgcataagaaaaaaccaatgagcttcaatagtgttttttgttgttgttcaagattcttagtcctttgattcaatttttatatgtttttatttatttttgttttcatatagttataattgtaatagttagattaatccttaactcgaaatattaattatacttttctcacgtataaatctgattatttatagacttaagattctaatctttcactattatgaatacatacaacaataatatagaatgtattgatacagttgtatgtaattatgttacttatgttgtttaaaacttgtctaacttgatcttaaataaacaattctttattccaaccacatcatgatgtgctagtaatttgattaaacactttagatttctctctttctatatagctatagagactcgtattttgaattttttggtatgtctaatgtctcaatggttcattacatgaaaaaacttacatttcattgttactaatttaccattagacacaaaaatgaaaagagaaaatgtcattgataagttgtaaaatagtgtttgatactttaccctgattttgtatttttaaaagttataaaaagtaattaaaagtgatattattagaagacttttcattttctctcaatgaattatgctaaactttttgttaaataatgtaacatgacatatattatttttttatgtattgatgtgacaatcagagagagttgaccaactttcatatatatgattttctgaagtaatgttttaattatacgacgtattagtgccgacagtgtaacctttcggtttgaaacactcataatgcatgtttttaacaagaacgaaaactaataaatgggaaaatcctaaaaggaagataataatttatttgatgtgttatatgggcacattgtactaggcctaattctatagtaatcggtccaagaaagaaaatgaacaattacatattttcgttccttttttttttttgggaacacagacttcaaaataaaaaacttttgatcacacgtgtggtgatttttgcacatgcagggacacaagctagtggtggtcgaagccgacggcaactacataacgccgttcacgaccgacgatatcgacatatactccggcgaaagctactccgtccttctcaccaccgatcaagacccttcacaaaactattacatctccgtcggcgtccgtggccggaaaccaaacacaactcaggcactcactatattaaattacgtaactgcccctgcttcaaaactcccttcttctcctccaccggtgactccacggtgggacgatttcgaacgaagcaaaaatttctctaagaagatcttctcagcgatgggatcaccatcgccgccgaagaaatacagaaaacggttgattcttctcaacacacagaatctaatcgacggatacacgaaatgggcgatcaacaacgtctctctagtgactccggcaacgccgtatctcggttcggttaaatacaacttgaaactcggatttaaccggaaatcgccgccgaggagttaccgtatggattacgatattatgaatccaccgccgtttcctaacaccactacaggaaacggaatatacgttttcccgtttaatgtaacggtcgacgtgattatccaaaacgctaacgttttaaaaggtattgttagtgagattcatccatggcatcttcacggtcacgatttctgggttttgggttacggtgacgggaaatttaaaccgggaattgatgagaagacgtataatttgaagaatccgccgttacggaatacggcgattttgtatccgtatggatggacggcgataaggtttgtgacggataatccaggggtttggttttttcattgtcacattgaaccgcatttgcatatgggaatgggtgtggttttcgcggagggattaaaccgtattggtaaggtacctgatgaggcgttgggttgtggtttaaccaagcaatttctcatgaaccggaaccgcaattgatttagtaaggtatgacggcatttgagtgtgcttttttgttttgtggttgtgttcggtatgttgtcaaccgaagattggttcatgttattggtatagttggttagttggttagttggttatatcggttattttgatcgggattagttcagcgagttctttccagccgaattgacttggtggatagagcttcatcgtgatttattttatcagtggaatcggacaaatcgaagaaaaaatatcaaatttagttaaactacaccggcaaacttttgcttcacttaagataatttttatctgtagttgtgagaatatttgggtttgctatttttcgttttgtgaaaatatacaaagtgatgttgtataataattgttatttggaaaggtattgttcaaatacaagtttgtataagtacatttgagttttagatttaacaaaagaaaaaaatagagatacagaagtataaaatagtcctaaatataccaagtcatataagaaagttggagttgacgagatagtggcaggacaactcgtctttgttgacaacaaattgaaaattttaatttgagttaaatgagcattttggaaacttgatgcttgaatttgtgctttgtactaatagattgttgaaaagttgcttcaatttcgctatgatgatatttattttaaatttaagtttttttattaataaatatgttatggtacatttcatatcaatcgaaacttaagacttctccattgtaattgaatttaaacttagattcattgggcctagcaacattattgagtttggttagctatttgctactcatctcacttgtcttaactttttattgtttgcatccttgcatataaaatgatagaacacgaatatccattgcgccctctcggactgctttagaagactataacccaattcccactactgtaatcagggcaccgtgatgacacaattacataatctcaaaatcctcacccgcattcgtttggagctgtgtacacctgacagacattcacactctatctcctaaagaagttaagaaataggttgtccttgaataggtagaaactgaagacaatgtagtgagattcaaactaaccaaatgatcccaatatctacaatgcaaagaaactgctagtatcatgagctcaatggaagcaaaaacactacccatggctacaacctcaaactttcgacattgggaatatggatgcaaatgaaagatcaagatcatggaccttcataggacagccacgtgttgctacttccgttgacatgtgcataggacttaggttgaactaattaatgtctaggcctgcttcttcatcgttttgcatttgattctctaggcttagttcggccacaatatgttttacatatcttcatgactttacatttttatgccttgctaatgtgtttttgtcacttagttttaaacgctacataccttatatgctgcataaatcctttatggtatctttcgaggaaggaggctggggatcaatctttgtgggaatacccttctattgttgatggtgtcaagataactccgtttgttctcatccgtatcatttaccttgaagcaggtataaattcatcggaatttacttttagaggattcatgattgtaatagttgctagttacatctcaagccctactagcacgcaaaactcttgaaactgtgcatagtctagtagtatattgagatataattaatggttatggacattttacggtttgaataataagtgacaatctatgtcaaatgtgttttaagtgtacttataagaagataataaaagcctctatgactatgagttgacgaattttcaacacgatttgagtttgaataattttggcgaccgaccattcgagagacatgggcactataaggcatataggccaaagcaaggacgttaaaaacagtttacgagtggtcgttaattggttaatgtgtacgatagatagttgcatattttcacatactatattaataaaacattacttataggaaaacgacgagagttccaataattgtggagtagccgacaaaaaaatcccgggagacacgtttcagacattttaaagaatcattgctggcgacgaaacgtgccttcgtggcacttgtttactttcctattggctatttggttatattcattgcacctcttctacattttctctaagaaaacattatattatcatattaagaaataaatactaaaaacatcatgctggtattgtttttctttgatttgaaataggttttataccctataatatatagttgtactatataccgtatctcatttgaacttaaaatcaaatatgatatttagataactagttgacatttctaaaggataaccaaaataaaataaaacgaaagtattacctgtttcattacccacacgttgaccgttatacaaacagttatagataatatatcatcataattaaaggtcaacatttcatgatttattaagtagtttatataacattttgcaatgagaaacccgacaatttatagtatggcgccaagattacgaaatctcaaatacctatcttttaatgggagagttttaaaatcgaaaaacgaatatttgatgagagttttattttattttttgagtcgtgcattacaaatatcactgtgaaaaatgttgatcgatttacataagaatcataatcgtccattggatatatagacaatgtgatttagaaggttatatatttgtttgtctaaagaaaaaataatatcttcaattatatgacacagtttacaattcagcatagaaaacaatacaataagctacaaaggattgttttaaatagattttaaaacaccatattatcatctttaaattttggcttcttgagatggtctggataaatagaaaattattaaaataaaaaacattgttaactactaattttatattaaaaatacatttatggaatgcttaaaggaaaatggggaaatatatatagacagtaatactagaaaccaatctgttggtcaaatatttagagccagtatccaaagggattgaatgtatattagtatatataagatatcataaattcatagagaatacaaaattcacaattcttaatacaaaatacttacctatatgaaacttttcaattttaatgctatgagcttgtgcaatttaaaaggctcttatatctagcatatactaatataatgcaaaaacaaaaatggtaaactaagtatttttattctattctaaagaatgtcaaattgtatgcttttaaatgtttaaacaaaaatcatggaaatttggtattttgtaagaaattgaaagcgccacaattctgagctattttaaggaattcttcaataattttgtttttttagcattatcatatatgtatcagaattaattagtgagtactggcaacattttttcccttttctttcatactctgccagcttttgtatttaaaactatgatatttttttctatatcatattatgtgatttgtttacattttcaaagcaaaatgtaataatttctatatattttatgacaatgtgcattttttactttatttttattggttggactgtgattagataaatcataaaatatcttttgatttagtaaaataaagaaaatcattaatttcttaatatggaaaaatttaaacgtttttattttgatacaaagagagtaattattttgtaagtctttgggcatgataagtttttagtattcaggacttggtagaactacaagaatctcatttaaattccattgtaaaaactaattgataaaactaatacaagtaaattagtataaataggttgtattttgttttttttaaagtataaatagatcgtacggaactacttactgttttactatttgtttatctagaccgatatatttagatacagctccccatgaaattaaatgcattaacaaattttaaaattcaaacatacgcaccaattaatttaaagctattatttaaatattttataaaaaaaaaattacatgctacgattttataccattaaaatagtaaatttacgtgccttagaaaatgtctatatttggtacttgattcctatttgttttcaaaaatactcgctttatgtttaggggttatatttttcccgcttaagcatacatctacatttgatatttttcttatagtagacatgattatattttttatattgatattaataattttaggctatcaaacaaaaaataatttaggcagaaataaccattttatgggcatgttaatttttcttttttttaaaagaagtgactatatatttaaataaagaatctgaactagaaatggaatgaaactcaaaggagataaataagaaatttttaccatatccttacacaaagaaatgtgtcgtttagcatggtttttacaggcctattatcaccaccctttcgcagtctcttcttatttaatgctcataatatatatagatacacaaacatacatacatacatgtctctatctcttctctctctctgaaggtcccaatagcttctttggtttgaatttggtggccgaagcaacacaaaggtctcaagagttttctgggtatattctcttcttccttcgatttctctttatttttgtttttgttttgttttgcttttacgtatattgtctgcttgcaaatattgttttttgacttgttgggtttggtctatctgatattttgtccgatgggttccattttcacttttgcaagatcaagtatttcagtagtaatacggactggattgttttgtcgttatatgctttgataagaatcaaaagaaagaaaaagatcgatgcttttactgtataatcatttgatgataaaccattaatcttgtttgtgattttcttttaccttctctaaatatttctcctatattatgtacttaatctctttggtagtagttttcctatagtatttattcaatcccttgggagtaataactaatggaatttggatctctaaatctttgtgttattcatatgatgaatcttatttcacaagttagatctctcgatctttcactaaaagtctctgtttttttcttttgtgttatgttattgctagagagttttaatttagattttgataaatacggcattactaaatgacgatgattatgcaattttattcttaaagtgaatcatagttgatgacattatttgcagattctatggatatgtataacaacaatatagggatgttccggagtttagtttgtagctcggcgcctccatttacagagggacatatgtgttctgattcgcatacggctttgtgcgatgatctgagtagtgatgaggaaatggaaatagaggagcttgagaagaagatctggagagacaagcagcgtttaaagcggctcaaggaaatggcgaagaacggtctaggaacaagattgttgttgaagcagcaacatgatgattttccagagcactctagtaagagaaccatgtacaaggcacaagatgggatcttgaagtacatgtcgaagacaatggagcgatataaagctcaaggttttgtttatgggattgtgttagagaatgggaaaacggtagcgggatcttctgataatctccgtgaatggtggaaagacaaagtgaggtttgataggaacggcccagctgctataatcaagcaccaaagggatatcaatctttctgatggaagtgattcagggtctgaggttggggattctaccgcacagaagttgcttgagcttcaagatactactcttggagctctgttatcggctctgtttcctcactgcaaccctcctcagaggcggtttccgttggagaaaggcgtgacaccgccatggtggccaacggggaaagaagattggtgggatcaactgtctttacccgttgattttcgaggtgttccgccaccttacaagaagcctcatgatctcaagaagctgtggaaaattggtgttttgattggtgtaatcagacatatggcttctgacattagcaacatacccaatctcgtgagacggtctagaagtttgcaggagaaaatgacgtcaagagaaggcgctttatggctcgctgctctttaccgagaaaaggctattgttgatcaaatagccatgtctagagaaaacaacaacacttctaactttcttgttcctgcaaccggtggagacccagatgttttgtttcctgaatctacagactatgatgttgaactgattggtggcactcatcggaccaatcagcagtatcctgaatttgaaaacaactacaactgtgtttacaagagaaagtttgaagaagattttgggatgccaatgcatccaacactcctaacatgtgagaacagtctctgtccttatagccaaccacatatgggatttcttgacaggaacttaagagagaatcaccaaatgacttgtccttataaagtcacttccttctaccaaccaactaaaccctatggtatgacgggtttaatggttccttgtccggattataacgggatgcagcagcaggttcagagctttcaagaccagtttaatcatcccaacgatctctacagaccaaaagctccacaaagaggcaacgatgacttggttgaggatttgaatccttctccttcgacgctgaatcagaatcttggtttagtcttacctactgacttcaatggaggtgaggaaacagtaggaacagagaacaatctgcataatcaagggcaagagttgcccacatcttggattcagtaaagaaagcttcagagttttctttttatgttttctagtctttatagctttgtctcttgcttattctctcattaaacacagtttttgatctctccatttcatagcccatgtagcaatggagaagattaggtttcataataagttaataaccaaattcaaagtaattcattatgtgatttgaagagcctctctttttgacaaaagaacagtagaaaatgctttatttgtttagactttagaggtgtgtatttgtgttcgccttgggcttcaaggaagaaggcgtttgtagacatttttaatattaaataatttaaactttgttggtatgataatatttttatttatgtctttttattatgtctttttatagggaattgttttctataaataacagattttttatgtgttaaattaattttgtgcctttaaaagagattaatggttaaaagatgtatttctatataaatctcaaattgaaaaatcaaataaactaagtttgacgatatgctattttaaagttaatatgaataatttcagaaatatttaaatgatatttcgcatattaaattcataaaataaaactatgtgaagaccttactatataaaactatacctttttcggcaaatcaaatacttatattataaagagtttacaagaaatataaatatttccaatacaaccgttgatacaaataaagaaaatcgaaacaattgattataaaagaaaaaaattcaatgtattgctataattcactataatgatcatatttacttttttgaatctaatgttaaattatattcaaaaaaaaaatgttcgttgtacaatttagtggttcgtgagtttgaaaataaattttaaaaagatctaaaagagtaaaaaaaaaaacgcttgtaaaagagcagcttggtttggtgacctcaggagcttaaactctagcaaggatccatgcttgatacgctttgtcgtaccgtctatctcctcttgttcgaatggtggaaatatgaatacaaatttgtttataaatccattttgtgataagagcccccggatgtggttcctttttgtgccttcttccattcctctcctttcaaattgtatagacagtggtttgtagagcatagcgagacagatagctctccgctctactttgctttggttcgatacataatccaagacttgagcccagtcggttctgtactgattttgaagatgccctttgttattgcctcccatatcgtctcccatataatgatcacatcactcatctacaaatttgtatttattcaaatgatcaaatccttaccggttttttcttaccactattccattccatgctaggattggctgcatcctctcatttcagtcaagttaagctcttttgtctattactttatttcattcattttcttcttcaatatttttttttttttttttttttttcttcttcaattttttttcttggcaaaaatgttttacattgaccaatttttacattccgtatattctattaaaactttccattcaaggttcctccaatttctttctccatctgtactaatggaaaatttaatagataatcaacaaaataatatatactcattaaataattgttattaaaagaatctccaaaatgatatttggacgatattcatgcaatcacgtcctaatctccaaatatgcactttctttatcttataataaaatgatttactccaaatccttactgtcaccaaatcaaaaccttcatttcatctgcttcgcattatttctctgattcaagaaaaatgacggtcgagaaaccacaagaaatgaccggcgatacaaactccgacggattcctaactaacaaagacgttcacagaataaagcatccatcgctagataccaacgatagttcctccagccgatactccgtcgattctcagaaatcaagaataggaccaccgcctgggacttacgtcatcaaactccctaaggatcagatctaccgtgttcctccaccggaaaatgctcaccgttacgagtatctctctcgccggaaaacaaacaaatcgtgttgccggcgatgtttatgctattccctctctgctttactcatcattatcgtcctcgcagcgattgccttcggattcttctacctcgtttaccagccgcataagccacagttctccgtgagtggagtctccgtcaccggaatcaacctgacgtcatcttctccgttttctccggtgatcagaatcaagttgcgatctcagaacgttaaaggtaaactcggtttgatatacgagaaaggaaatgaggctgacgtgttttttaacggaaccaaacttgggaacggcgagttcacggcgtttaagcagccggcgggtaatgtaacggtgatcgtgacggtgttaaagggatcgagtgttaagttaaagagctcgtcgcgtaaagagttaacggaatcgcagaagaaaggaaaagtgccgtttggtctcagaattaaagcgccggttaagtttaaggttggctccgttacaacgtggacgatgaccattacggtggattgcaaaataacagtggataagttaacggcgtcagcaactgtgaagacggaaaattgcgaaacgggcttgagcctgttgtaaaatttgagctagttttgtttatgccttgatgggctttgttcgaattatgttatttttagtttgtttgattcaatatatatttttgaattaaaattgaaatttgctctgttcaaattggaagtttgaattttagttttacatttggaaaagagaaacatattgactgaaatattttgaaatgactaaaattagtagaaaatctaggtgaaattagattcttaataagaaaaaaatcataaaactcggcattaatgcatttcaagtcaattggatatcttaacatttgttgaaatattttaagatatcctaccattcttaaataaaaaattttaaattaaaattttacatttataagttcatttgaattttagttaaatgcacaaaggacaaaatcacattttagtataaattctcggaattaaaatttaaatatattgtagactttaaccgaggagtttaaatatattttaacactccatgactccattaatgatccacaagagaaagcatcagatcataccaaacttctagtgatgtttggacatagaacggccatcaaaatatacatctaagccctaaaaccggagttcttaaacggttttttacctcgagtgcccaacgctacgggttactcttctcgtattagcaccactagttgaagctaaagaagcttgagaagaaccattttcagttgagtctcgctgttgtcttcttcttttggcttttggagctgttgcttgagtctcgctttcctcttcatcattcattgcttcttcagcagcttctgtttttgtaattttactcaagggccatggcttcccgcaaccagagcaacgtttatcatcctacaatttcaatgtgatcagaatgtaaaatactattgaagtcaaactcatataccattattgaggaaaatctaaagaatatgtgtgtagtgtgtaccctttgagataacaattttttgaggcagtacttgtgtatccggacagggcaaccttcggttggacacaaatctgcctgaaaagttggatacgagtgtcagaaaacaaagcatcagatattgaatcagtagcgaataagtttatcatcacaatgtgagttctaatccaatcaggttttttcagaatgcagacctttactccagcttcattgcagacctcacaggaaggaacatcattgtttctgaaccaactgcgaaggtcaagaagagatcttataccaagtccaatgtttctctctcttgtgcggcacagccacttgtcccttacaagttcatcgagagttttttccttttgtgtcattgaaaagttcttgaaagcaggagggacttgctgttgactgctgctggcttcacttgatatctgagatattaacacaagatctgtcaaccgaaacaaagagaatacatttatacagtccatagcaataatagctttaaaattcattaatagtcttcaccacactgatagatgagaatatctgagacatttgagattcgtttattcatattgattcaacaatcataaacggggataaaacacttcatacaaaaaacacaactcagagtgcatgcaattttatccacaagcgcacaagcgacaaagttgattatcgtttgagatcatatctcatacagaacagaatactatactttcaagcgactctgtaaggtagaaccagtattgaagtcaccatgatcagttaattgaacaatggatatggatggattcatttagtcaataaatgaagaggtaaatattagatagacataagtcagagactatgactgacctgattctccaatcgaatattaagagcatcaaagctcgatatgcaaccttgagcagcttcatcctgtgcaattgcttctatctgccagaagttaaagtcatcaatgtcacagaaaagtagcacagatatccatccactgagtgcacacatagcaagaaaagggaatgacaaaggagaaatttatatgttatataaacttgtggcaaagaagagtgaaatccagataatgataactcgtacaaatgaatagaacttgagatatttgatcaacaacagaagaaaagccagagagaaaaagagtccaagagagtgacttacaatgcctttaaaaaatgcaatctggggaacagaatatttagtcccgagtttggattgatcatcagccacattgttaacgactccataacaaacttggccatcatactgatctctacaagccttcaactcaaagtgaacatatgagagttccttgtttatctcaagaaggtacttgtcaaatatttttttaacagttactgcaaccaaaaaaacaaacgaacaatttcatcaatataatgtggttcctttaacaacattcaacatcaaggtacccagtaattcaattcacccttagcatcaggatacaagtctacaataaacctttcaatcagcagcatatgcaataactaaaccagaccagctaaacaatcataggaattcgtaaattacagattttgattcaatagaaattcaatccggaattaacacacaaaagtaagtttgatattcatccgaatcgtattaaataagaggagagcgagacctgggtttctgccggtgacggcggtgaagattgagtgaaattctttctccttgagaggacctcgtgaaatcaaagcctgaattagggtatggtgcttccagcttagcgatgccatccttagagacctccgtaatttcacagtatgaaaaagctagggttttagaatctggtgaaccctgattgtttctgtgaattagggttttgtatttgttggggagacagaaagtgcggtgagagagagacggaatggcgggaagcgttatcgacacgatgacgccataaaattattttgacaggtaattgttttttaatacagctttaattttatcttttctgaaatacgaaaagtccattttgcgtttgttgtttgtggttaagaggcgtggtaattccgtaattgtaaagtagtccaaaattaatgaaaattagcaaacctgacaatgaaatgtattggaattgcaaaaaatgacttaaaaaggacctgccaaaaagcaatatatatttaagagtaatggcatcattatatctttccactagtttgcaggttataagcataatgaaaaaaaaaaaaaagtagattgaaaattatgtttgtcacatcacgttaaatcatttatttattcatttggaattagttaaaatcatgtgttacataatactttatagcttagaaatatataagttggaaaatttaagctatagaaaacaaaagaaaaaaaaattatgagcccatttttttttttttccaatttttggttaaacagtttccacaaattcataatttttttaacagtaagatgtgtattgtctcgtttatgaagaataccatagttaaaaggaccaatctaatcatacaacaacttttagatatttttggtaaatagggtgtgaatagttacggcagttggggcggacacaatcgtcaatggatcagaccactttttatttaccattcatcaattatagtccgcagtggtcgggacaaaaaaaaatagaagaaaaccgcagcggatcatttgcggaccgtttttacatacaaataaacttggttcgcagaggtttattatctgccccaaaaatgagaaggagtaaaccgcagacaaattagaccgctttgtcaactgactcaatttataacgaacaatttggtgtagtctttgtgactagtgagttgaaataggagtatataaagagtaaagaaacttttataaacggataataacgttattttaaaaagaaaataaaagagaaaaagcagaagttaatattatatacatgaaaacgacgacctgcaaaacatttaaaggagcgagagaataacataggaataggaatagaaaaggatacaagatgacaaaaacatccactgcacatctcagaaactcgccctcgttatttcatgctacacaactgcagcatttactattttgtttttatacgtttggtatttgcaggacacagagacattacgtacaaccagttttcttttatcttttgtggtaaatagttttgtaatcttttcactttttcaataactaatttcaaaattcaaaccagtgatcaaatttgaggtgatgacaaaaaaaaaattagtcaaacggtcaaactgagatatttatatctatcaattgtgaaaatgtgattagttcttttaacctatagtatactttagttcttttcaaagttgttgatatttgaagacgttaaacttgcgatttttcttcattttcacttccatgtatataggattgtcactgcatgcctaataataatatatgtgtgaaaccattttgccacaatcacaattgtttattggaacacttgtaatacatatatgttgcaaaaaaaggatatatacatttgctcttaatacaaagataggtacgtaattaagtagtatatcatgttactaatttgttcatatagctctttttgtgtatttgaatatatggatctgattcaagaattaataatcattgcatatcatagttcgtttattgtaacatatagcatgtgttatacagttttatagacttgggtcatgtagccacatcgatgcatcatggcttaaagatattcataaatgaaactaacactttcaagttttaactgatatcatccacaatggttctggtactcatttaagagagttattacctccaaatctatattataccatagagtaattccgctaatgtttttgtaaaactgttagaattcgaacaaaaaattatctggaagaggagaaagatataccagtcatttaatactataataaagaacaacatctttagcaccaaaattgataaagaacgacataaataggaatggtgaagaaaaagatgatcccaaaggtagaaaacagtaagtggagaagaagagcttttttgttactagtatattcaacaactcattcactgttgcaagattctaatttatagatgtgttaacttgaaccagatcataacaaataagatgaataaccggtttaagtacctgaatatttgcactagtaatccaccaaacaatgaaattccatatactatttacttgtaaacgatttgattctatatatactcttaagattccatataacatcgaatcacctaacattattttgtccaaatccaaattgtttctaaattctctaacaataataaaaaaaacgtaacgagagaagtaaattgataagacattgaaacgaaaagaaaggaatatggagcgaaaaaataattaagaaaagaaagaaaacagtgggacctacctataaaacctcttgcgtcttgcgtctgcggctttctttataagcgacacacctatattttagtgaatcaccaaaacaaacaaaccctttcttcttcctctcataatccctctctctcttcttctctctcgctcgctgctctgtttagggtttttctcgttcgtctcttctataagtactaggtttgttttttactcaaaaatcgttcaatgtatgttcgattttgaagctttcatgcatgattcctgttcatttcgtcgattttggtggtttttttctcttttttttagcgatttctgcgctgttagtgttcatctgtatttttcgtcgtcgtcgtttggtgttaaacaagtgatttttgttgtttcatgagtttctctggattttttggtcatggtagtgtttgtttatgttgaatctcactgttttttttctctttgaagctgcgttcgttgttacatgattttcgtcttcttcttcctctgagtaatcgctgtttatttttctactctggattttttgtttttttggtcttctctttgacctctgttaagaaatctggaaaaataaatgttggcgtgtgttttttactaaaaaatttgtttgcattttcccgagaaaaatcttctgggtttcttttgctgctttgtgttctttgtctctaccttcatttttttattcgctttatccaacagatctctctctctctctctccctctcgctttttaggtgaccattttttttttgtcatatatgatcatgtcacgtacatctcttcttcaccattttttttttctgtcatagatcttccttatgcggctttgaagcatgacgcgaatgattttgtttgcttttgagtaatctgagtctagtttgtgatggtgacgaatctgttctttagatctgtagatttcatctctagtacttgttcaagtgtgggttgatcagtgtttttgcgtgaatgcttttgtttatgccatctttctgtttgttcctgaatcatgttttatatgctgtgatttaatggttttaagtaactgtgtgaagatcgctttgcttttatcaagatgacacctgactccatgagtttttctatgtgacgtttgctttgtcctgtgatttaatagttctcagctctactggcttagattttcgggtcagaattattttcatactaaaaatttgtgataaatctggcttcaacaatggtttctttgtagcgtttatgctttcccattgctttaaacagattatattttggtgctgttcttttctgaccttctgatatttgtatcccagagatggattctgatgaaccgaatgggagtggattaccacctccaccacctttcgttccagcaaatcttgtccctgaagtggagcctgtaaaaaagaacattcttctcccaatggctcggcctcgaggcagcggctccaaaggacagaagattcctcttcttactaatcactttggagtcaagttcaacaaaccaagcggttacttctttcattacagtgtatgtatactgtgacctctaataatcctctatttgtatcagtgcgtttcctgttttatctctatgatacatgatggatttgtttctttaaaatttgctacaggttgctatcaattatgaagatggccgtccagtggaggctaaaggtatcggccgaaagattcttgacaaagttcaggagacctatcaaagtgatttgggtgccaaatactttgcttatgatggcgagaagactctcttcactgttggtgctcttcccagcaacaaacttgacttctctgttgttcttgaagaaataccttctagcaggtgtgattatgacttcttttgatttttttttccctgtgaaatttctcgactgtttccttttcttcaaagtctaatatgctttgatatcctctttatctgcagaaatcacgctggaaatgatacaaatgatgctgatagaaaaagatcaaggcgtcccaaccaaactaagaaattcatggttgagataagttatgctgcaaagatccccatgcaggctattgcaagcgctcttcaagggaaggagacagagaatcttcaagacgctctgagagtgctggatattattttgcgccagagtgcagctaggcagtaagttaaatattctgggtatttgtatttcaaataaattctctgcttgatctttaatgtcatgttctcatatctgttcgcagaggttgcctccttgttcgccagtcctttttccacaatgacgtaaagaactttgtacctattggtggaggtgtcagtggttgcagagggttccattcaagtttcagaactactcagggaggcttatccctgaatattggtaattcttttccagatctaatgtgtattagattcttccttgacattcggctgctaaactttgatttttttgctttggcatttcttcagacacttcaactacgatgatagtacaacctggacctgtagttgatttcctgcttgctaaccagaacaagaaagatccatacggaatggactggaacaaggtacatcattttcttttatgttgtactatttcactgatgtattttatctgattttatctcatcaggctcgacgtgtcctcaagaatctgagagttcaaattactctttccaatagagaatacaagataagtggactaagtgaacacagctgcaaagatcaactgtatgtcaaatttctttgatcacaagtttatatgcttttgagtttattctaagatattggtctttgattgatagatttacatggaggaaacctaacgacaagggagaatttgaggaggttgagatcacagtgctcaattactataaagagcgtaacattgaagtgcgttattcaggtgacttcccttgcatcaatgttggtaagccgaagcgtcccacttacttccccattgaggtaaataaaatgaattgttgtttttctgttttccacatatttttttgtaacggattatgacaatcgttttggttttcatgtttgcagttctgtaatcttgtgtctctacagcgatacacaaaatcgcttaccaattttcagagggctgccctagttgaaaagtctaggcagaagccacctgaaaggatggcctcgctaaccaaagtagttcttgtttccatagttcttcttcccattatccttgacgctttttctgtttcttatgttttatgttctgatttatcttgcagggtctgaaggacagcaattacaatgccgacccggtattgcaagatagtggtgttagcattatcaccaattttacccaagttgaaggccgtatcttaccaacaccaatggtgactttcgttgattctcttgctttccttgctgtattttttcctttttgcttgtggatgttttattgttgattatctttgtccttgtttacagctgaaagtgggcaagggagaaaacctttccccaatcaaaggaaaatggaactttatgcgtaaggtgcttagattttctatcttttgccctagtttgaatattgtaacctcgactagtactgattgaattctaatgcagacactcgctgagccaacgacggttactagatgggctgttgtgaacttctctgctcgctgtgatacaaatacacttattcgtgacttgattaaatgtggacgggagaaaggaattgtaagccttctttaggttcattggttactatacaaacgaatcatatgcacaactccttttaattcgtcccttttgtttttcccttttatcccagaatgtagagcctccattcaaggatgtcatcaacgagaatcctcagtttaggaatgcaccagctactgtgagagtagagaatatgtttgagcagataaaatccaaactcccaaagccgcctctgttccttctttgcatactcgctgaaaggaaaaactctgatgtttatggtacatcacatcacactttacattcttgaatatggcctgttttcccccttgaatgtaaatgtttaacttttcatgtgtctgaaattttttaggcccttggaaaaaaaagaatcttgttgatcttggaattgtgactcagtgcattgctcccaccagactgaacgatcagtatctcaccaatgttctcctgaagataaatgccaaggtagctggaggttgtaaattcattcaattcgaatttcaagactgattgtaaagactttacaagcttacaagcttacagctgaaatgatttataattcgtatatgtagcttggtggattgaattcgttgttagctatggagcgctcaccagcaatgccaaaagtaacgcaagttcctaccatcattgttgggatggatgtatcccatggttcccctggccagtctgatataccatcaattgctgctgtaatactgattttgttttgttaatttttcgtgtgatctcatttagtgttgtgtgttcattcttggcaacaactctggtaacttggtgtttgttggaaatcgtaggttgtgagctcaagacaatggccactcatctcaaaatataaggcatgtgtacgcacacaatcacgcaaaatggaaatgattgataatctcttcaaacccgtcaatggcaaagacgaaggaatgttcaggtaaaattcataggcagcgtttttgtcatcttaattctattttagggccttgtgaatggtacaatattcttttatacttgtacaaaaaggtatgtcagcatcagtgtaattagagatttcctactgtttacagggaactcttgttagacttttactacagttcagagaataggaaaccagagcacatcattattttcaggtatacttaaatctattaaggtatcatgtaaaataatatactccaatttgttaactcactgttactaatatacatgtagggatggtgtaagcgagtctcagttcaatcaagttcttaatattgaattggatcagatgatgcaggtatggattatagttctagagcttcagagcttttagtgacacaaagacgttttatttagtatatcttggatatctttgggcctgcctgatctctttttttgttactttattaggcatgcaagtttcttgatgatacgtggcatccgaagtttacagtgatagttgcccagaagaaccaccacacaaagttcttccagtctcgaggccctgataatgttcctccaggtaaaatccatttgacaaatgcatgattttctgttggtcattattttgtgtttaaaatgacctgaaacctggcttttgcctgcaggaacaatcattgacagccagatctgtcacccacgcaactttgatttctatctctgcgcccatgctggcatgattgtaagttatagctcctgcagaaatactttgaccacttagttactatataaatccaacttaacagttttctatattgattttggatgtgttagggaactacaaggccaacacattaccatgttctgtatgacgagattgggtttgccacagacgacctccaagaacttgtgcattctctgtcctatgtgtaagaattatatcacttttaactcttaatctgataggtatctttgtggaattatatcacttttgacaataatcttcaaattgtttgctttgattcttgtagctaccagaggagcaccactgcgatctcagtcggttagtctcacatcttttatgcgttgctgctgatagctacaacattatgtgcaatatctcaattctcaagtttctttatgtttgtttgcagttgcacctgtatgttacgctcatttggcagctgcacagatgggaactgtgatgaagtatgaagagttgtctgagacttcttcgagccatggaggaatcaccacacctggagcagtccctgtgccacctatgccgcagctgcacaataatgtttcaacctccatgttcttctgttgatggaacatggtccagtccacacgatagctgagtttatatgcttttgatggagaaccaacgaacttttgtttactcttctctgggtttggttcctcttttgtttttcgtcgaccctttaacattgaggagatactctttatattctgtcggtttttgtgggcgctgttggttgatactttattatgcttaatcagatttggtattttaaggcattgagttctcttctttttttaacgtcgatctgatgttgtggctgaattacatataggcagtgtgatttgcatcatatagttagatttggaacatatcgatgaactacaacatctgctaggtttaaaagaaaacattttgcccagaaaatttgcaactttaggtacttataaccttcagggtgtgttagttaagtaacccttcaggaatattggtaaaaccgtaaaacccaaatttcgctcttttcgtgagtgttaagcaaattcatggtaatcatcagacttttttttttttgtcggcaatcatcagagttatcaatatctaaaagaaagaatcaggaatatttgtgtaaataagaactctttgaaaaaatattctgcgtaggccaaatatataagatgcaagaagacaaaaatttacaaacaagaaaatgtactatctatataaaattgtcaaataaaacatctcttattgtttctacagatactacaaatcacatcattttttttttgtttttttttcttctaaaattgagtaaattagaaaatgaaatatatacaaaaaagaaaaagattacaacttttagggagagggcgaaactcttgtgtagatgaacgcctcttcagtcaaagctcttgtttgtattgcagagatcatcctgcatccatccaaaatccacaaaaataatcccacaaaagaaaaataccaccaaggaaattatcctttaaaattcagagtgattgcttcacttggttggtcacttcccccagaagaaagagatacacaaaactttaggtcaagatttaaggatcatttgctctgcggcatcaacacatatctctgcttcttcttcacttcacatcctcatcagtgagacttgttttctttttggttggtgattgtttcctttgctcggaaatcgtctatgctacggaattcttccttcagtagtttctctagctcagggtgctttgttatcggttcttctttgcctcgataatggtggaatgccctacacaagagagagatgattaggtcctattcaacacaaccaaccaaacaaacaaactttttctattatcaaaaggagagcattgaggctatgtgaacatcttttaacctagattattactacaagccctttttttttatgtaagttctctagagacattaacgaaaatcacagttccataacaggaattcagtagcaacaatattgtttaaccattatcataataatagagcccttaccaatatttctccaagccatacagatttcccttgtggtagaagtcaagcgatagcttctcaaagtccttgtaaaggtcctcatcaaagtgcttctccagaccataacttaagaagcaaggcagaccaatattagttggattagatttttttacactgagagcttatccgcagtgaaaaagatggaacatataagcaaatctaagacgtatgcattacctataaaacctaaagagacactccagcccataatcgtaattgccagctgcatcctcaagagcaaacttctgaaagtcatcatacatagagagaacaaatgtgtctctgaggaaatacgaccaaaatcggtacaaatggttcatttcctgcaaaaagaacagccagaattcagatacaattccagaaactagggtttctgatctctaactagattaaagtatgagttgagtaatttatatgtaaaaacagatgagttgagcatgtaacagctattgcgggtttcttttgttatacatgatgagaaatcatcgaaaggaggttaacatgaaactgacctcactgcatccgctacctagcttctttctttcgtttaagcagcgcttgcgatacttcaagtacctataggtagatttaaaaggaataagaacagagaccttcaagatacgatcttatcctccaaaaaataatgctccatacaataaccatagactcacttttcttgtttaaacccattctcttccaacagttggtggctcggatgttgaaaaggtggaaatgattttggcaaagagcccacaggtggactgcttccagaaagtgtacattgtggagatgaactcaatttcgaaagcctagggctgttaaaatacaataaaaacagaatattaaggacaagtgataaacaaaaaaataagaaaaagttgggaatataaaggattgctaagatactgacccatgactgtctggtggtgtagaaccaaagaaaaatccaatggagctactaggcggactttctgatatatttccattgttccttatgttactcgagaagaacctccgtgcatgggctgtatgatgtttgtgcgttcccttattttgcttcctccgtgaagtaatgattccatgctcttcccctccatcatttgctgcggaattttcgcccaacttagtgttcaatccttccccagatttgattttcccatctttggtatccaaatgggagttgttcttcctacggccagatcgtttttttttaagctcctgtttcataggtaaagattagaaattggactccaaagaggtaaatcatattatgataggaaaatattccttacctgctcaaagtagtaaagaccatcgttgattgtggaggcaagctccttaggaatattttttgcttccgtcccaccgattccagcgccatcacttttaccactattctgtccagcatataacggaacatgaataattgatttcaccaaacatagagttcaaggaaatatataaaaagttctgtgtaatacctgggtaacaattacaagtttctgaatatcttgatcatcaacagccatatcatcgtcttcatactcaatgctacaaaatgtcaaataaacctaagcatcaactgcagtactttatatatgcagtttaagattcatataaaaaaaagaaggcatattggaaacaaaaggacagaaagcaaatagcaggactaattaagtggtgcacgcactaccttttggacatggacagtccactctttctcgggcttctgtgctccagatctagttcctcgtcaagcaagaaagtgtttgaaaaatcgtttgacaagtcctccacatttcttttttcgtctgctgatgatttcaggttaccacttttataattattggttcttgatgactgagctccctgtaccacacaacggaaaaactatgactggagcaaaaactaaaatttcattggcttggcagtcttacagaatttctctaccaaaagaaatttttttttacctctgaagagaaatcggacacggtaggctttgaagaaccctttgaagggtttccaaaattatccccgcttgttatactttttggggaatctttgtcaccgtctccaattgtctccgcagaggttgactttttagatgcaggaatccagtcagaccacttgtcacgcttgcgtatctggtcaccctgtaaaagtaccagcatttcaaattaggatccaacagataagaagtaccagcattttatactgttttaaaaaacaagtaggccttacacctgtggaaaccaagcatgctctaagttaagttagaataatcaaagaggcttctttaaactattattcagagacaaagttctaacccattcttttggtgatagcctcaccacaatagaaatacacaatacaaccgaagaaaacatagtgttcaaggaaacaattttttaatacaaaagctaatctgaacccaagaattagtaaaaccccattcacaaaagcaagagtttagcatttaaaccagaaaagaaggaaggtggtctgacctgcacttcaacagaattagaaaaccccaacgcatagactataaaatcaacatccatagtcattgctttaacctgcaattcaagagtaaaagaaaacttaaaaaacaacacacttgtgtaaaaacacagatgacagaatagattaatgaaaaagaaagcaagtcaagctcatgttactaattttacccttttgaagccagctataatttttgtgggaacccatccttcttcatccatcaaagaaatgaggtaatgatcattctcaaggttttcatcactgaaaagggaataaataaacggaaggtaatatgaaatttcaagagccacaataaaggataagctgaacataattataatcacaaaaaaattgatgtagagaagcataacttgcctgaaataatactctacttgttttaagactctatcccttaagtcgagtttttctggagatagtattggaggaccctggtttacagggtatggagcaaagcgtggaggataaggacctcttatagctccagggggtggacccggcaagtagtatacaggccctgtgtcaaatgaagaaacaaaaacagcactcatgcatcaaaaaccgacagttatcctttatcctaatgctaaatatattcaagagcaacagaattaaatttttatcaactactctcagccagtccctttaaacacattgacaaagaatcaatatcttaccaggaaagcctggacctggaccaaccaggaacccaggagctggacccataaatggaggtctcccgaaatttcttggtccagcaccttgtggcatgtttctggggtcaaaacccctctgatgcggccaaggctttccaggatccccttgaggagctggcaacacaggtggaagaggggaagcttgaacttgcttctcattgccagactcagtaacaggaggcacaggaaccgggtagggaggataaggtgcatatggaaaatctggaccagcagcatgtggcagaggcaccataggtggaaaaggaggtggatgatacggtacagcatgcacgagataaggaggaggaggaggaccattctggttgctcctcggacctggttttgaatgacggccagatggattcttgtgtccaggattagcctttccaccacccttagatttcgcttgaccagttacggcctaaacaacaaaacaaaagagcttttatgagcaaagctaaggctacaaattcaatgctaaacaaaagactttccaatcacactataaacctttcaagccaagtaaaagaaaatcacgacaaataaataaacgtcataatcatcatgcatcaaattcgatcaaagattcaatatcaccaacttaaaccaatcacgaacacaactgatatccagtatcagataactctcagctctaccaagtaccacgcaccattacaatcggaaaattaatactcaattaaagcataatcaaacaacattgacaaatcaacggaaagaagtcggttgtttgactaaccggagtagggattgggatagacgtcggaatgtttttagacggcggagcaggtgcaggcgccggaggattcttaggacgcggttgttgggcagcgtcggcgagtgcaggccacgaatgagctcccattacaggagcgtcaatagtctcaacaggagaagtcgttgttttccacggagacttagtcccaataccaccttcacgggtgatcaattctcgatcatcggccactgatccttcagtctccgccatcattagaaacttggaaagataaacagaatcaaaacaaggaagcgattcaattggatcaaaaacagaacgaggattgaaggatcagatggagaagacgcaatgtgaggaagagaggttgaagaaggaggcaagtgtgtgtgtgtgttttggtggcgacactctttaagggaggaataagcgaggatgaaacaaacagtgaaacgtataaccccaaaaaccctagttactttcctctttttttatatgtatatgtttattttatatagcaatttcctatttttcctatttgaaatttgacaaaaaataagaataatattcatgatttgtttaattactagtattacaaatatcctctaatctggtctttatccttcgtaattaaaaacattcaatttatttctttttaatttttgttttgagaaaacatcatttatgtagggttttaaaaaaatttaaattaactttataaacttattttcgttagacctatttataacgcgtttatttattaaccttagtttatgtccttaaatagatgtgttagaatttgtgtagcaattctaagttattttgtacttttaatgtgatctaacaaacttttgttacaactaaggattagtagttggtaaaagagaacgaagataactagttatcgctcttataatctctttattgttttattgtttaattcgtttaagttatttaattataatatttagtcttttaaaaatacgtgaaaaattatctgaattgttaatatacatataataatttttatatatatgatggatattaacgatgatttctgaggtgaaaactattatcttaattttttttttgggtgaggctattatcttaattcttcaatatgtgaacctacgaagaataaagtaattgatgaagatttgaatgaatttttgtctctgaaaatgacatttgaaggtgtctgtggaagatttagtgtccactagataagatttctaaacaaaaggtcaatatattgatgaaaattgaagtgattgaaatcaagtttttccaatgatagtacactcgtttgaagaaaatatgaggttgaatcaaaaccttagttcaaagtaaatgataaagcaaaagctgaaatcttacaatttgaaagtgaccaatatacaatgcgagaaagcaaaagaaaaaacaatgactcaacctataaggaaagtgcatgacaatcactcatggcttagtgaatagtgaccatcgccttttacaagtttacattggctttgaaaccctccaaacttttcgaaacaatctttcgaccaataactagtttacgggactaaccaatacaaatcttggaaaatgatgattctttgaccatctctattctaaccccacctattggagtttaaggccttttcatcgtcacgatacgcatactatgatcactggctctagcaagatgttaaggcacacaaatcggtggcaaggaggtgactggcccttgtgtcattatccttctcaaaggcattgaaccaactttttattcacatttgtttattatatactaaaagaaataaacaaaaaaaaagtggataattataaacttttggacgccaagtcactcgtttatccatttggtacggattttaatgatatctctctctcaagagccccttttatgcaaaatctctttttcgctaccaatggcattattcgtaattaacttctaacttgaggggcgtttcattatctcctcctcgtcgtcctccctccatttttcttcacgtctggttttctctctcttttcctctatctctctcctctctttgtctctctcgcttctgtgatttgggctttttcagatgggaaatgcgaacggcaaagacgaagacgccgccgccggtagcggtggtgcagatgttacctcgtcctcggcgagatctaatggcggcgatccttctgcacgcagtcgtcaccgtcgtccttcttcagactctatgagcagttctcctcccggaagtcctgctcgatctccatctcctttcttattcgctcctcaggttccctctctcgaatatctctctctgtttaatcgttgaatttgatttctggttttgaattgaatcgattgaaacattcgcccaaagagataatagtaagagaatctttttgatttgtttcgttgagtaagagaatgttcgttcacttgacttttcatttgtttcactaattgtgagacactttcttcatttagataggatccaagtacaaaatctccagccttttttttatgagtgaactctacttgttcacttgatttgtgttatcctgttggttcttgagaatttgtaatgtagattcttgttcttaaagcttttttctgagttgggtttagagattctgtactagagaatctcttttatttttgtgttatcttggttcaggtatcttgaaataatgcataatgtggaaaagtttctacctttctttaagatgttgttttggtttcctagctattttttctttattttccagccggtctctagtcatttactggtcgctcatgattcttgatgtcccttagtgagtctttgtgtaatttatctttgtttcattgtgaagagggcaactttgcagactaagtacgtttgtgaatgaaatcttttgtataaaggaattagacttgacttggttttgtttggttcttgagaagtcaaaaactctggtaaatgacaaggtagctagttactcttccttagttttggtggagagagagagagaggcttagatcaccttattgctatgtcttttccttttggtgagttaaaatcttgttaatcatactagagaatctgctttagagaaggtcttatttgtcttctgattatgcctccatgcctggtgtggaaaagcgtatggcagtcaaataggatgattattgtctctctaggtttttatgctgattttgactttcctgctgctctctggtcatttaccagttactgatactgttctgttgatttgcatgtcgcattgtgagtcttttgtgtaatgtcttttgctttcatttttaagaggagggagggcaagcttgttcttttcttcgccctttttgaatttaaacacgcagagcttttacttgaacgaattacagattttggatgtttcgtcattcttctcattgttcttaatatgtgaataattcataagataagtgaaggacaaccttctaaaattgaccttgttatcaggtttttgtgggaatagtgaaatatcttttgctaataaggtcttgtctgtactctgtatgcgagtaaatttctgagtctactgttgctatattcattttcgactccttttcttttcagcccacattgttattccacgttacatcttacaacatttgctcacctatgcgtcacctcttccattgtttaggcttaacatgtgtacctaatggctgcatttcgtgtcggatggtagatataatgttttgacattcgcaaattcttcttgcacattggtttgtaagatctcacggctcagtgtttatgtggatattctcaggttcccgtggctccattgcagagagcaaacgcccctcctcctaataacatccaatggaaccaatcacagagagtttttgataatcccccagagcaaggaatccctaccatcattacatggaaccaaggaggtaatgatgtggcggtggaaggatcatgggacaattggagatcaaggtataattgactttgtttctcgtggaccctctctcgagatttcgtgatatatgttaaaaacaatatgtttacattcaccaggaagaagctgcagaaatcagggaaagaccactcgattctctttgtccttccatctggcatataccactacaaggtgattgtggacggtgaatccaaatacatcccagatttaccctttgtagcagacgaagttggcaatgtctgtaacattctcgatgttcatgtaagttactttcccacctctttttttctcatgttaaatctatcaatcagcttaacagtatctgcaatcattatgcatgcagaactttgtgccagaaaacccagaaagcatagtggagtttgaggcgccaccatcacctgatcatagctacggtcaaaccctaccagccgcagaagattacgcgaaagagccactggcggtgccacctcagcttcatctaacacttcttggcactactgaagagacagccatagccacaaagcctcaacatgtggtgcttaaccatgtgttcatagagcaaggatggactcctcaatccatagtagctttgggtttaacccacaggttcgagtctaagtacataactgttgtcctctacaaaccgctcacacggtaaccctaaaaattcagtgccacattgttctctctctttctttctttttcatctctcaattatgtgaaaacatgttctttgttcatagtgactagtgagtgcccaacatttgagtttattaacctctttcttacctggtttgtggtgcttgtgtacaaagcttctctcattgtaacgattgttgttttattttctgcaaaaactgtaaaatacattcgctaataatggctataacaagcttatctgctagcaaccaaacacataaatcctgttttttttcttcttctgacaaaacgtttgcgaaagtgacaaatttttgaaaataatctttctttttggtattggaaaaggctaaccagtttgaaagtgtactcataataaatccacgtcgtctatttgattgaaaattttaatttggataagaaaaagataaaagagaaataaggtgagaaaaagtgagccacacgatggagtatggcggaagaagcatcgaccgagtaattgagacgctctgtttccaattactactctctcgagctcctccgctctgcattgtcgccgagagttcctttcttgtccgacaaactacttcttctccttcgataagccaattctgcgccatagatttttgaaatctactgccggaaaggctgcatgcgatttcaactcccttttcccgggacaattcgcaggtgtgtattcctgaagctccgttgtactatactactattccatgtttcacttcgaacgaagaatcaatcattcggtaaattggataatttggtcacttgttcatgacctgtacataatcaaatgtgtaggaggacgatgatgaatttgtagcatgaactatcgacgtcatgattctagaaatttatgttggaattaaagggcccaatgagaaacatacccaacaatttatgctgttgctgaaaagctttgccatcgcattgtggatttcagctgtttttgccttgtctttatcacatttgacgccatagtactatttgtgtgtattctcgtattttacagtttctttgtcccttttgcattagtttctgtgaattgagaaaagaaacactctgttgcctgcactgttgggttctttggagatagaattctaacattgacattacattttcatgaaacagcttgtgaagaagatcaagaggtgaactctgagtgatgagtgagccaaaggtcaggcgttgggttggcaaatatgaggttggaagattgatcggtgaatgtaattttgggaaactgcggagtgctgttgacacagagacaggagaccctgtggctttgatgatccttgataaagacaaggttctgaagcataagatggctgaacaagtaattcgctttcctaatcggcatttagttttttcatgcctcctttcttgtccattgatatgcccatgttacatttcttgaagtaaaacgtggtttctaaaagcgagattcacagatagatccgtcttctgtccagaagtatgatgtgggtctttcccgtttgcttttacagataaagagagaaatttctattatgaagctgatcaaccatccaaatgtagtgcagctttatgaggtctaattccatgccccaattttttttctacgtgtctctattttcctttgattaactagaaattaacagctccctggagtctaagcaaatatgttgaaaactaacatttaatgaaatgattgatatcattccaggttttggcgagcaaggcgaagatatatattgtcctagagttcatcagtggtggaagctt

SEQ ID NO: 1459 - DNA, 93672 bp, Arabidopsis thaliana
aagcttgaaatccaagattatgggagcttctgctgtgccagatagtttttccgctgttaataacgccacgactagagatattgagtctgagatcaaggtgagccaagaaggcaaagtaagggaaattgtcatggataatgttaactccagattaaaggtgtcttcccgtcagtttaaacgctgtgaatatcaaattagactagataatcacaatgcatctcttatttttctcctttgtattctggatattaaatcctcaggttgaaggaaaagccgaccgcattatcacaacccttaaatccgaaaaagaagaagtggaggcatcactcaacaaggaaaagatacaaactctccaactaaaggaagagttagcagagatagacacacgaaatacagagttatacaaggtaaccgtactatttaccttcatgaatctgtcttgcctttgatctcgcttttaccagaacgaatagccaacagaacacaatcatgtagttggttttctgaaaattggttcttgttcagtcttgaaatttagtattttggaaaaattcaataaaccgtggaaatgactaataagcaagacaaatgagttgagaatttcttggagattcttttgttgtatcaacatttttggtattccatctataggaacttcaatctgtgcggaaccaacttgcagcggaacaatcaaggtgtttcaaactagaggtaggtatttacaccttttactaagaaagtcattttgtttcacttttatagtaagtctgggttgatatttgaatctcgatggtgaaacattcctctccgatgttgaccaaatcctaacaaaactcggtctaagtgcccgcaggttgaagttgcagagctaagacaaaagcttcagacaatggaaacacttcaaaaggaactcgaactcctccaacgtcaaagagccgttgcgtctgaacaagccgccaccatgaacgccaaacgacaaagctctggtggcgtctggggttggctcgctggaactcctccgcctaaaacatgagtgcccatgaaactttttttcgggtaactcttttttgtcattaccaatatcagtatttacttttagaaagaaagaaaaagagagaaatacagtatagacaatttttagcgtctccgcattgttactagtgaaaataaggtctatagttgtttctactacagtatgattgatgagttgccatttgaagattcagtttctatataagctctaccgatttgtgtgtaattatgttacactacaagctatattgtattggtaatttttctaccatttagtaccattacatgtgataagcaccatacttcatcaactaacaacgaaattttcaatcatgaaggaaccaaaaattatcttccaagtatagcgaacacgatttaaaattgtctaagggatccaaagagatggcaacaaaagagaccgagtatcttacgactcttgaacgatttcctcagtgacatcgataagatcctcaaactcaacttctttggcttcatattcatcttcttccacatcacttacttcaccatcccgaaggttttgcctcacgagtttctcctcttcatgcagagacttccactgcattacccatttctcccattcttccttcaatgcctttctcttctctctgtcttgttcactcaacagcaacgacacgtcctgatcctctgcctcatacttcttgctgtacttcttcagggtctttgctatctcttcttccttctctgcagtcaagaatgatggaggtcttggacgccaagccaactgtgtaaccaaccatacacaaatattttattagacatcggaatggacgatgctcgtttaagaccgagtttttcttgttacatacctggaagaaatgatccttcaatatccggtaaagcataatcccgttgaaagaccatatggtgaacccattctccatctcatggactgatgtcactgcggttgcaacgtacctttgaaaataaaaaagtgcaaacaacatcagcaattggaacaaatagaaacaaccaaaggactggtttagttaagacagtaggaccttccagtcgggtcccattcgatatccgtggccatgaagtgttcagctgtggccattgtctcgagctcatccacgttgaaaaattcaagctggccattgaaaccttttaacccagcaagaattatgtacttgcctgtgggcgaccagaagagggcattagcttgtttggccttcaaagttgcgagctttgaaacccttccagtgttttgtgcggtcttcattgagtagaaactgacatctggtcttggttggtcaccatgaatcacagcaaacctgtgacccttgggctcccatgcaaaagcaatgatcttgtcgttcttgttgtccagctcaagaacctcgatgggaatatccctttctttgatacggaaaagttcaaatccagagtatgtgctcttcttagtttttgtgtatcgatcaaccttgacagcaagatactctccactactctgccagtacatcttgcagtcgctcacactgaagagattcttctgcctcagctccaccttgctcgggatttggactagggcaacctgaagaagggatatcaacatgtaatttcaaaacaccaggcagagaaacagaagcaaattaaggattcagagcttttcatgtacatcagaaataatagaaacataccttcgcaggttggtttccaccaccttgttcaggaacaaacaatgaaaggatggaatcagtaggagaccagcagatatccacaacattatctaccttcatggatttcttgtctattaggctgaaagtctcagtctcatagacagagatagtgtttttgctaagcttggcaaagtatttatcatcttttccaccagcccatctgtagaaaaagtttacaagatatcaacatatgtccataatagtggagaagatgataatattggctgtttatttttaggacattgacatgcagttgaaagaattacctgaaaacaggccaagaggcaccagcaacaccaccaggtcctccaattgaaaactcatcagcactacccttgaaatctctcatcatcctcccggttctcacatcaaaaaccttaatctcaactttctgaaagtttgacagaattcagcgtcacaaatagtaaaagttgaaaagaacagaagaaaagatgcactcacacttgcatctcgcgggttgcttggttcttggctatggtaagttacaagatatttctcacctggcgagaaatcaactagttttacctaaaacataatcaacaaaagatgcaattttcaggccaacagaggaaaaacggaagtaatatgtagcaattgaaaggaaattcaaaccatagaatgctgataacgcatgagacgcgtgaatgtatcagcaccaccccaaacagctgccccctgcttgtggagtgtcacaaggtatgtacctaaaggagaccactgcacataactctctgtccaatactgcataggaagagaacatcattaattcaaatgaaggtaacataacatataaaagtgctctaaacagtcaagtaaacaaataagggatattaattcaaatgaaggtaacataacatatacattgctctaaacagtcaagtaaacaaaagggatatacacacaggaagtaacttacaggacgcttatgaacaggttcaggcgccttctgcctagtatcattccagaaaacttcagtatcagggccagaacgaatgactagctggtctcgggctttttcatcagtaagccatttttgcaaattttcctgaaaaaacaaacaccatataagtaacgacaattagcaccacaaaaggctgcaatgaattaaaatatatacatgaaacaagagttatgaaattatagttattagttagtatacatcaattacgtaaaaagatcctaaccctaacgcagcaggcaaacacaaaataaatcagcgaattaccaaaataaagaagtgattacacagacacaatggaagttattcaaagaaaattattcaaggtacagggagtaacatgatgaaaactacacataccccagggacgtagggcctggcctgaggaggctcccactcctccttcacattcatcaacctgtcaaaatcatcgaacatgtttacagcaaagatgtgagacttgtccaacttgtagccatgagacttttccttagcgttttgtgcttcctgcaaagagccccagacattgagagaaactcttaggaaatactcaaccattaagaacaacctagtttgggctcctttctaacaagagaaataaagtattgaaacatatgacgccgacattattgcttcagaatccaacaaaacagagattaagctaatcaagtagataaataacctgaggagtgttgaactcaataaaacagtagcccaatgtcatcttggtatcgggatcaacaggcatccacagtccattttccttaatcacacctaactggttgtaaattttcttgacaacaccttcaagtttctcaaacttctccttgggaacaacagggaggtgatcgaccacgataatgttaccgaatccagtgtcgaattcagactggtcatcctggtaaacagcttcatcatcactacaaccatcacagaaaaaaaaagtgtataacgaatcagttccatttttcatacgttcatagataaaatgtataaatataataagctttgcaccatcaaggaaagagataaaccaattcgaaatacacaaaattttcatacatacaatagcaaaacctagaataaaatcatcccatcgtataaacacaagaagattagaaatagaagtgaccgtatatgaacaaccagagatctaaaggaaaatctcacctctcgatcccaaagtcttctccaggaggaagttggatggaatcaaaattaacctgagaccaatcaatccctaacttagcagctcgggcatcaatatcaacgacctccatgatttcaaaccttatatcaaaaatctgccaaagaaagccatatagagagagctatcagtctttaacacattccaactttaagtcgataaataaatgtgaaaaatctgagtctttagatctaaaagtaggttttttgttaaccctaaacaagtattaaaacaacaaactaccatggccaaatgttcaaagactaaaactttgaatcatcactcccactataatgtaaatctaaaaccatgcctatagaaattattaactatactctagttttatttaatctagaacccaacaacaggtgaaatggagaaaaatggcaaaattttcctgaaggctctcttatatctattgcatcgttctggatcctgtctcatagctacataagaaaagacaaaaaaaacaaatgaacactgaaatcgagataagaaacgtacccaatacagagatcagccgagagcaaaaaacaaagaagaagacggcgcttgaaggtgaggaagaaggagcgattgttttcaggtctttttggatcatacgacgtcggttccttaaacgggcttataaatatttatatgggccgggtaagcccaattcaatagtaatcagtagatctaatttattgtctttctctcgattagcttttttttttttttaacaataatccgtctctttcatttggtgtcctcgagaaccaaattcggataatctctcatcggaggatcgttgttgttgttgctagggttcttatcgatttgtaatgtacaaaactaaattaatcccggtgatgaacgaggatgctgtgattgttcaacaaacggattcgattcaggatcctaaggtaactccagatgatactgtagttgattcgagcggggatgttcacgaagccattgatgatgatgttgaagcttcttcacctatggagctagattcggcggttacaaatgacgctagggttctcgaaagtgagagatcggagaaagatggtgtcgtagggagtgaggaggaagatgagattaaaagcgaggatgttttaattgataaggatgatgagagttctgaggttaaagaagaagaagaagaagaagatggctctgatgatcaatctagtgagcttggttctgaagctgatgagaaggaattagatttgggtttgaaggaagagaaaaaaggagtttcggattataaatctcttttatctgagtttgatgattatgttgcaagtgagaaaatgggttctggagtttcgagggcattgagttatgggtttgaagttggagatttggtttggggaaaggtaaagtctcatccttggtggcctggtcatatattcaatgaagcttttgcgtctccttctgttcgtcgtatgaggaggattgatcatgttcttgttgcgtttttcggtgatagtagttatggttggtttgatcctgctgagcttattcctttcgaaccgaatttagaggagaaatcacagcagacggtttcgaagcattttgtgagagctgtggaggaagccaaggatgaggcgagtagaaggtcagctcttggtttgacttgtaaatgtcggaatccttataactttaggcctagtaatgtggaagattactttgctgttgatgtgcctgattacgagcttcaagccgtttactctgttgatcagattaagaattctagggataagtttttacccgctgaaaccatttcgtttgtgaagcaattggcgttagcacctcaagagtgtgatccagacagtttaaagtttatgaagaagaaagcagtggtttttgctttccgcaagtcagtgtttgaggagtttgatgaaacttatgcacaggcctttgggacaaaatcaccccgcagttcagtgagtacgctggaacctcataatagagcaccgcctcgaggtattagccacttttcagaaaatcatgttattgtttgtatatgggttttttcgttgtagacttgaaacagctttcatatgtgttacatagatattagatactgtaacttggttttagggttttacttttagatcctctgtgctcatgattttaggatttatatctttgtagttgaattctttacatagcatgcttgaaagaatagtgaagtctcattgatgctaaactgtgcattcgaaaacgtggcctgataacaattctgcgcctctttctactatggagagtcccgcatacatttaccttgtttgctttattgttcattttcttggtgggtgatgtgttgtttcaatttctcttatttccagctcccttgagtggcccactggtcatagcagaaacgctaggtgaccttaagagctctaaaaaacccacaaaggttaaggtctctaaaaaaaaagacaagtatcttctcaaacgaagggatgaagctggtgataagtctgttcagtttggcgaaattgaagcaagttcagaagcttctcatatccagggaattgatggatctttggatggggattttgggctgcagagaagagctccgacgcttcaaactccaatgaaagatgagaagtctgggatcgtcagcatggattttgcctcttcaaatacagctattcctggtaaagaattttcagcttcaaagccctctcttgatgaagaaaagggtctagctgaaaaatcaaaggagagaatggaagaaagagctgctgtacttccagagcatgggaaatctgaagctatggcgagtcttaaacctaaagaagaagctggaacagatcttggatcagctggaagttctctccagcctctgcttgagtctcatacctcagcatctgaggggaaaagttccacagggtctgtaatcaagaaagtcaaagttgctaaacgatcttcaagtgaaatgagctcggagaatcctccttcagagccaaaaaagaaaaagaaaaagaagaaagagcctgattctgaccatccagtgaagagaaaaaatttgtattctggggaagctggggccaagaaattgtcccagcttggttcagcgcatttacaaacctatatggaagccgatgtgccgcagctgttgagccatctgcaagatctctctcttgaccctttccacggtttatccgttgcttcttttggaactgctaggaaattttttctccgtttccgttcacttaattaccagaaaagcttgtctgtatcttcctctgatgctactgtcgaaaatgccagagacacaaaaccctcaaaacctgtcaagacagtgaagagaaccgaagacccatcaaaagctggaaaaaaacggctctcttctgatcgtcaagatgaaatcccatcagctaagaagctgaagaaaactaatcagttgaaatcaatggcttctgaaaagaagatcattcgagaagcaaaggatagtataaaaccaataagagagccaagcagggtggtacaagcaaaaccagccagaggtcaaaccgggaagaaaacagctccatcagttaaggtggttgagccaacaatgctggtcatgaaattcccacctggcacatctctcccttcagccgcattgctaaaggcgaggtttggtcgcttcgggctgttagatcaatccgccattagggttttctggaaatcatcgacctgccgtgttgtctttctgtacaaagccgatgcccagactgcttttcgatatgcaacaggaaacaacactctatttggaaacgtgaatgtaaagtactttctccgtgatgtggatgctcctaaagccgagcctcgtgagccagaaaacaccaaggaagatgatgaaccacagagccagtggttggaccaagcaccaccgcttcaccaaccaacattaccgccaccaaacgtcaacctcaaatcctgtttgaagaaaccagttgatgacccgagcagtagtagcaacaatggaaacggtaaccgcgcagccgtaagagtcaaattcatgttaggtggtgaagaaaactcgagtaaagcaaacaccgagccaccacaggtcacaatgaccttgaatagaaacagtggaccttcttcatcatcatcatctgttccaatggaatttgttagtaagaagtttcaaaacgttgttcatcatcaacagcttcctccttctacattgcctccaattcttcctctccctccacaatacacaaaaccacaacaacttcccattaaaccagtagaccacgtcgaaccaccaatgccaccttcaagaaacttccgtggcccgatcccagcggttagcgctggggacatctctcaccagatgctcaaccttttgtcaaaatgcaacgaagtagtggctaacgtcacgggcttattgggctacgtcccttatcatcccttgtaacaaaacgaagcccgttgagagaaaatgtgagtgtttgtttggtttttggtgataatattgtatgttaggtattagtttggttcgttaactttaaatcatgtattacaatttataatgatgaatctctctccctctccctctcccaggcttgttttatatttcgtgtattattttttgaagttgtatgcttttgatatttgatgcactatgcggaaccaattccattgttgtgttacgttatatattctcatttggtcttaatctacttggtgtaaatttaggcctgcccaaaatggctgagcaaagttgaaaattaaagctataggaagaaattgtgattacagtaaaaaaaatataaaattttgatcttattcaaaaaaaaggtaatttttattacctctctttaagttcaatacaacaacatcgacatggatattggattgtgaaggcgaaagagagagagagaaagagatggcacgacttggtaccaaatacgagtcgaactcttgtcctgaagtgtagaggcctaaaccagtacacaaccaactggacaaggttagatttggtggaaagcctgcctgttggtattactttattcgcaaaaaacgaacattaattttaaatgaatataatttgctacgtctcactttttagttccgttataaagtggtcgagaaaggaaccatgagaccaaaaatgaaaccaaaataaagaaattcaaatgaagctaaaatcctatttcaacacatttggttgaatatcgtgaagtttccattacaaaactgtctcagtcgtcgtctcgtctcacatgtctggattagcctcctcaggaatgacttctagtgtgaccctttctttatttgatctttccacaactacttgcatcctcttcccaactctgtcgtccattatctctatcacctgcaattaaaattcattcacacacgaacactaagaagacaaagagagtgtgagaaaaagagagtgtgagaaaaagagagagggagagagacgacacatgcctctttgatggtctcgaccggcttcccatcaaatctcacaacaacatctcctggtttgaagccagctcgatcagccggtgatcccggaatcacctgccaaacaatgatcatgcaactatataagtgaatatgcaaaagtttgacaaaacttggattatacattttttctttggatcttcttgatcgatgggtactcaccgtaggaacaagaacgcctctttcgacatcaggaaacattgggtctcgttcttttagctgagcaacgatcaagttattgagttcgaccattttgagcccaatccatggccgaataactctactgcaacaataaccttttgtttaactcctcccaacctttaagatgtgatacatgatgaaactatactgagattactagcatacccactcttcttgaaatgctcgatgattttagataccgagtcaattggcacggaaaatccaagaccatctgcagctaaaactttcatgatattaacaccaatcacttccccatccaaatttacaagaggcccaccagagtttccctgacacacatatagcacaaggatctcaaaaacacaaaatctgcaagtcaatatgtaatgactttcccattcatagagacagaaagatgtaagttaccgcattgatcgagcagtctgtttggagatactctctatgtttgcctcctaaacccaaatcactgcttttgcgatcaacacaactagcaccaagaaaaagcaaaaccggaaagaaaaaaatcaacaattctgactataagaacttatcaaatatatagaataaatcttttgcaagtacatgtgtttattttacctgacaataccagcagttactgtgttctggagagacagaggacaacctaccgctattacccagtctccaggacgaagcttactcgaaaaaccaagtttagcagttggcaatggcgtctttgactttatcttcactaatgcaatgtcggattgtaaatcagcgttcaccaccacaccctcaaacgtcctaccatcttgcaacgtcacatctacctataattcaacaactctaaacttcagatatgttctaaacagattccatcaaagataaatccgtagaagaaaccaatcttataattaaccatatgtattccaaagacaaaagttattccaagatcctttgcaagattgtatgagtaaacatatttgatgttttagtcataccctccctttagaagaatgacgaatgttctgaaaatcaactacaacatgagcgcaagtcagtatcgtgccatcagcatcaatgatcgttccagaaccgatacttttccccatagatatcccatggaaacctacaacattcacaagatcaccaaaccaccactgtgaattctaaagtgaaatcaaaagaaagataaaaacaagaaagaagctaaccctgaggaaccgaaagattgacaaccgctggtccaattctagcagccgcattggctatagtatctctccctaagtagccattacttggtttcgaactactatccgaagcttcaacagaaactcccttctcatcatttataggtgcttctgatttcggactaactctcgaagaaaacacgaaatttcctatatcatatacacagaaacagacattccaaagttgcaacttgcacctctagagtaaatttggcattgatcatattcagatatcagaaaattttgctacgaaccgaataagctttgctcaggacgatgaatcaaacccggtgaaatctgccaaggcagtaacgacaaagattctcgaacagattcaggtatagcaagcgatactcgagttcctagaatacatatcacattaaaccacaacaccaagagagacaaatacaacgcataatgaagaagatggttcttggtaatagtaacttacttgcatctggattagtactagcatataaaattccagaagtagcagtagcaacagaaatgatgcgaataagctcgcttcttttagaagatgatacagctcttctctaaacccagaaaaaaacaaatgagtcagtgaaattttaaccaaattaaacaagaaattgaacaatcgcagagaagaatcgaaccagaaaattcatcatcgcaaatccaagattgaaaccaaacaatttgattctacaagaacgaaattcgaaatcgcgtcttgtttaaattctaaaccccaccggaaaaccaaaaccccttttccagaatctcgtagatgaaccaagaacataaattctaacgggcctatcaactaagcccaaacaaagcccaatttgaacaatcattttcttaattaatgtcatgtttttcgtgattattatctactttaattaatgtcattaactgtactgaatctttccatgtgtataccaaaaccatttcaattaatccacctaaattgtttaaatcaacaagtacgaaacccagaaattaattagacagatgaagttactaatcccagaacttaattattttccattacaaattgcgttaacaaacataatcatcttcccatggtttttacataagacaaaccaaaacaaagagaagaagatttcagatacctacacaaatcctctaaaacaaaaaacaagttgtttcttcttcttcttcttcttcatctaagatccgaatataaccaaaaagcaacatcgatactattctttatcaagccttcttaggagatttggtagcagaagctttctccgcttgagaagaagaagctgttgatttcttaggaagaagaactggattaatgtttggaagaacaccaccactagcaatagtaactccatgaagcaatctccccaattcctcatcgttccttatcgctaaacatagatgcctagggtttatcctgttcttcttattatctctcgctgcgttcccagctagctcaagtacctaaaccaaaccggttcaattcattagaacttcaaaattaaacagatctaatagatacacaaaataaatcgattcaaaatgcaacgagatctgagattgaatatacctcggcggctaggtattcgagaacggcggcgaggtaaaccggagcaccggaaccgtatcggagagcgtaccgacctttcttcaagtaacgagcgatacgaccaacgggaaattgaagaccagctttaacagatttactaacactcttcttcctatctccacctttccttcctcctgctcctctcgttggcttcgtcgttgcttgtgatgactccattgttcaaaagctccaaaagaaaatacaaatgaatctaaagggaaagcacaattagtgtttttttcggttttgtggcggtttacgatttgcttaaaatgaggaaagaacgacgtgtatgtatataccacgtattgccacgttggcgatccgtgtagtaatttatcttagccgttaagattggatcttgttggctttgatctaacggtcgtaatgacttctttgtatgacattacacgtgggtgttgtaaaaggaaggtggaaaagaacacttgagtgatatcagccgttagattcattccccacacgttctacaagataatcagctttatgtctttttcttatcttattttgacagcagattattactattatttaaaatatccagagaattagagtagaaaattagcggataattcggaaaattaaggaaacaaaaattattacccaaactctggttttaattagtgtaataagtacaaaaaatgtgattaagaaagagagtttaagatattcaactgtaatcttctaagctccatgacaaatgaagaagcatcattaatggctgcacgagatgaaaccaaagcttcatggagctcggtgttaacgagataataagaacatatctctttgagaatcacatcatgacgttcttgaagccttgttacgttctcttccgccgttaccaaagcctcgtttacaagcctcagcttctcgatggcgcggtatctatgcctcaagatgggactcagagcaaagaaggagcctgatatagcaattgtagaaagaagtattatgcttccataaagatccatgaatggaataatgggtttggtaaaagaatataaagtggattcattacttaaagagggttgagattcttattctttgcttctccatggatgtaacttcgtcgaagaacgtcctcgtgttcgtttttttcggggtttcctttctcttcgaggctttctttctcttctctctaaccgctggcgccggatctctggatctgcccatccttttccccattcagagaatccactgtatgttctatcttgtttcaacgaaagtagcatgtcggcttctggataaacatagagtggtttgtcatcttggaaatctagttgtttcttccctttttctgttggttgtatgaatttaatctcaactcgacgatcctgcaacacagatcagtaacatggttttaaccgaatatgtgatcgtagctttacgcctttaccgataaatggatcataagaaaggttggttttttggttactagtgtaccttgttatccatctctttgatgtatccttcggcttccatgatacgggcaagacctttccaccaaagacaatctgtttccttgaatttttcacactacactaaccaaaggcatcacattaatatcatcaagaacataatgcactatgtaatttgttgaaacagaagatttacctgttccctgagtttactgatgaagaacagaagatttggcttgtgggataatttattttgtttgctgttgccgagtccataatcttcatatggtgcatgctcagagtcattgtctacctgcaactaatatactagcggcttaagtttcagaaagaaaggttatacagtagtagacgaaatctcaaatactaaatagaaatatgtttgattgtatatcactcatacgaaacaagcaaacttttaaatgaagttctgggattaatcaaatggcttacatgaaaagcagtgattacttgaaacaaaagattagcttcctctcgtacatctactagctccggaggcccttcagtgcaaacatcacatctgtttcatagattggaaaggttttacaactatttggtagtttgacttgatgggttttagataaaaggataggacttacgagttacactttttggaactaaattcctccccaaagtactccacaagtattttggcccgacattgtgaagtgttcattccatatctgcataagaaaggagaatgaatataaaagaatatagaacgataagtgaatatgcactcccacgtatctgactagtatagagacctgaaacagtcagatagcatcttgtatgcttgctctgtctgttctttgctcctacggcttggcaaaagcgttggtgctctcgatagatcagcatagagcactgtaaatatcagatagttacttccatcagccatgacaaacaagagtacatttacacagccaaatcattaatcaactcaccacactcagccaattcgccatctcttccagctcgaccagcttcttggtagtatgcttccaagctctgtaaaatttcattatttcagtattagagagctcaacaaatttgaatagcacgtaattctaggagatgtgaaatgttaaatatagaaatcttataagagcttcgagagacctgcagccaaccataatgtatgattttccgaacatttttcttgtcaattcccattccaaacgcaattgtggcaacaacaacctgcagaggcgtaaaacaacgttagtgatcttccacgtagtattccaataaaaagaagcaggaatagcgaagtggataacagagtagatcactaagtttgagccataacacatatagaacattaaggttttcttttctatgtatatacctgcagcttattatcgtgaaagtcctggtgcacttgtctgagatgtttttttggcaactgtgaaacgtaacaaactgttcatacatccataccaatatttaaaaagaacagctcttaatttggaatacaaaatttttccatcagaaattggaaacaaaatttctacaaccaagttaacaaaggttgacaaatttcattcctaaaaaacagtgcaaagggcttcttatagcaggaaaaagtaagaagatttatcagtccataccgatgcattataagctgcagctttcagtccaaccccacaaagatacttagcaatgttgacactctcctttcttgtaggaacgtatatgattgtcagtccttctaaatccttttgcttttcagaagggacaggtatttccaggagttcacaagaaggcattgcgcaaaactcgccacaagccactgcaatgattaaatttgatctgaatcaccatttctcaacagcaatgatatattaaaaaactaatagaaaaaaccgaagacttttaattctgttgtctgcatatatcatttactttaaataagtgacgttgacccttttcgaccatttgatttgcacaggaggtgacaacttacttaaccaaggggataatggccagttgccaaatatatttattttagtaacgctattttcaatttagtatgcactcacctattttctaatcaaaggttatgtaattttatcaacagttttagatcactctctgtttccaaacaaaagtgaaaaggagcttaccatcccaatcatcaacactctggaaaatgtcagtttcatcttccagatacgcttctgacaattctttcccatttgaactgtttttctttgccagggagttttcttgatcctcttcatcctcatcataatccgtctcatggatgttttcagaatcgtgagaaccaaaatcagtctgctcctctgactctcgtgagattactgctagctttttcccggtagagtttttcttttcagagtataagtcaactaagttttggaagtcctttgcatatgaagatgcaaacttggttcgactatgtttaacctgtaaataacagtgaattatcagctttatgctgtacatctcacgatacacacatcagcagcaattagaaaaatacagattcatctgctaatcttttacaaatgcagaaagagttccatatatgaaaagagaaattaactctacgctggaaactcacagaaaattgtagatttggcctgaaaaatgaagtaagtacaatttttgtttcctttgacaggtgaagtgactcaagaatatcttcctgaacgttaacagtggctgttgcagtcaatgccattatcggtacatcatattctaagaattccaaattgctggcacagaaattttcccgcaacaccgataatttcctgaagatccggcagtgggaaatctatttgtttagaaactaagtttacccacaacagaacttgagaaataacaataacaagtcttgactcttaaaatcatacctgtagtgcggacggaaatcatgtccccactttgatacgcaatgcgcttcatcaattgcaaaaagagcaattccatgagtctttgcaagcttctggagtggtttaatcagtctgcgatcaagttttcatctttctttaagcaaggaaaataaacaaacaaatgcacttgagaaaattttagaaaggttgtgttgtgtaccggaccactgtctcagggcaaacatatatgatctgatacattccctgcattgccttctcttctatgcaattatcaagttggcctgaaccaagaaaacaagcagagactttgtgccttgatagcttgaggcattgatcatgcatcaagcttatcaaaggcgaaattacgacaacaacttttcccgttaataatgcaggaatctggaagcaaagagatttccctgcgtgataaaaacatagaaaacacaattagaatattgttaacatcatgtaagaatgacgacgacatcagcgacgaaaacagaaactaccagatcccgttgcagctagaacaagacagtccttgtgcgcaacccatgttgacaaagcctctctttggaaacttctcagggatgaaataccaaaccggtttcgtagtatagaattaactcttttctcccacgatgatgaagcctctgagcaaccattcaacaattgtccttcaggaaaacaactagactccataaacactggagctaaagactttctcacctcttctgaatgctcagacaccgtttctaactgagagtccacttctacagtcccaaaggtgtcgccttttttcttgttctggttcacagatctaaaatggtcaagcaaactagactgacgctttgactccgaagaagaaaacgaagatggcatagctcttttaccaagaatcttattactccctgaagaacatagcaaactagccggcttgaacccaccagttctatgatttcccttcaaaatatactcaacagcatcatcacatgacttaccacctacagcttttacagcctccaaagcatccaacttttcaaaacccatttcaacaatcttcatcacgagttgatcagaagacaaatccatcgaattcacactgttcaggcgactaaaaacagtcctttatatggatcctacaacaagttgattctagtaaatcataatgcaagttccagaaaccattaattgatcttaatgaaacccaaacaaaggaggaaactgtaatgactcgtacataactactggttaatcccaaattccagaactccaaaccctagtgatttttttatttgaattagcgacgaacgctccaccaccaatttctcgccaaaaacacagaccttttgaagttaatgagtaacctagaacgacaatttttctgggaaaatcgcaagagagtgggggaatcacaaataagaacggatcaaattctcaggaacgatttaagaaccctacggcgccaaaaatgaggcattttaaccgaacctaaatcgaccaaaccaaaccataatttacattttaaaccattcggttatggttttgctcaacctaaatggttcggctcggtaaccaaagagcgaaaaatagaaatcagaaaccagaaaccattagagacaaccattggagatacttactataaaggtggacaaaataattaccccaactggacggaaacgtaattaggtatgattcggttcagtttaggttggttacagttaaagtagttcagtttcagtttttttgggttttcaaatttttaatatcatttgtttggttaagttttttttttctttttggtttttataagctacataaataaaaactctcaatctaatgttattttttgaaaaaccaaaaagtgtttgagaagagaaaataaaattctctaaaagatgatagaattcataataatatcaggttggacatttaattgataaaatattgatactctatatttggagtatcactattcaatactttaaatttgaagttacatcttttttatttgcatttaagtccctaaaattatatatttcataaataatcttacaaattatttgtttatcattatagtccttaaattattatatattcaaagcatttcacatatatcttataaatttaattgttacatataaaatttaatatatagacctttcaaataaattcaaaatattaatatttaaaatataacatagaattaaaaacaaatattacaaacaaactattatattaaaaatttaatacaaattcaagcaacacaatgataataaaattacatggaaataaaattatatgaacacaaaaataatacacaaattaaaatattacaacaatactaatattcaggtaaatttatgtattttttatttttatttatatgtattttatttataaacgtattgttttgttaattaagattatgtgtaatattttaatgtatgttttagagttatttataaaagttagattgttttaaaattattatgaataatataaggactataatgcaaaatacacattttaaaaccttcatatttgaagtatactcttggagaagaaactactcatactttatatttgaaatttacatactctatatacgaagtatctcttggagatgctttcaattagtatatctctaaaagttatttacttgtcatgtagcaatagtgattatctgtgaaaatgatttacatgtaaaatgatatgttttcaggtatccaataaaattatatatttaacctcgtataattgtaaaatttaaatctgtttataaatcttagggggtgaacccaagtatttttcataaaattatgtctctcatacatacaattttaaatttctacttcacatttattttgttgaaaattatatttatttaataaacttaaacaaaatcaattcatattatgttcgtacttttttatttcaaattacaaatttaacttgttctttgatcaaagaaaccatcatatgattttccagctattttaaattacaaatttagtttgttttttgtaccgactcatagaaataattttagatattggtttcttaatcacagaacaagttatatttgtaaagtaaaataaaaactacacaagattttttttttaagatatggaagttttgaagttcacaaggaagagaaaagttaaaacctttcttacaaaaaaaatcatggtatttaaacctatttttaacatgatatatgaatgataaatatatagatgcatgcattatgcataacataactatgcaaaacatgagcaaaacatatgcatatgaaaaaacttttatatgcaaatcacatcacctaaaacatgtttagcattgtgaacatcatggaattcattcattatgtagagaaataaagaaaaaagcttattagagattatacatattttaaggatatcaactagtctattagaacataatattactgccatgaatggatggaagtaaggcatattcactccaaattgctgcatttccctatgtcgctagaatcaaccatatggaaaacttttccacacttttccacatttgttttaacaagcgtgtcaaatgagattctcaactaaaacaaagactgattattcaaactcaccacaaaggtaaagagatgatgtgcttagattgtgattgtaacgaggcagcacaaaattcacacgaacaaggttctcatggccaatgaatgattgaacaaaagttaatgttgtgaaggcgattgccgtcataaccaaaaccttaactacatacacaacaacaattataaaaggatcttttgagctattggtcatactcatattctttgattaaagaaaccgttatataattttccagctgttttaaattacaaatttagtttgttttttgttccgactcatagaaataattttagttattggtttcttaatcacagaacaagttaaacttgtaaattaaaataaaaactacacaagatttctttaaaaaaaaaaaaagatatggaagttttgaagttcacaaggaagaaagaaggtaaatcttttttacaaaaaaaaacatggtttaaagtttaaaatatgttggaatgtattcatggtttcacatagtctaaattaaaatgatacaatatagaggaattgttagaaatgcttcttttatatttctctttttaaaaatacttttttctagctattcttttagtttatatttttcgatgaccaaaggttataaattttacaagtttttctaaaaaaaatagaagtgtaaaagttttgctaagttttgacggtcttaagtgattttagttttgggcttttgtatataaaagagtaaaatataaaaatcaaaaatcaatattatacaattacaatttaattacattagctaactaaactgtataaacattcattatctatacaatagtatctctttttttaaattatatatatatatatatatatattgcttcaatataagtatctgaaactttaatacacattattacataatatcattatgtacttttgttatcatcaatatgttttcaactatacacctcctaaatttaaatcacaacctagagatgttgtggtgggtaaaaaagcccagcccgacctgaacccgaaataaacccgcccaccaaaaacccaactttagaaaactcagatgggttttttatttagtgggtaaaccccgaaaaaacccgattgttccgaaatatattttgcttataaatatattttaaattatatttattttctgtattacatatatatttgatgggaaaaaggttgaaatgttaaattgcgttttttggcggaaaaatgttaaattgtgtttttggcgggaaaaatgtcaaatccttttcttggccggaaatgttgaatgtcatttttggccgaaaaatattgaatatcttttttggtgtgaaaatgttaaattccgtttttgatcggaaaatgtgaaatcttcttggcgggaaattgttgaatgtcttttttggcgggaaaatgttaaattgcgtttttggcgggaaaatatgaaatcatttttggcggaaaatgttgaatcgcgttttggcgggaaaatgttgaattgcgtttttgacgggaaaatgttgaatatcgtttttggcgcgaaaatgttgaatgtcttttttggcgggaaaatgttgaatgttttttttggcggtaaactgttaaatcgcggtttaggggaaaaaatgtgaaatctttttttacaagaaaatgttgattcacttgaaaaaggacttaaaaaaacccgtgggtacccataacccaatgagataaacccatatgagttttatttatttggatacccagtgggttttaacccatcattaacatctctatcacagcctttttttctttttataaaatatattgcactgtgataattttaaaatacgtctgttataaaagatacaaacacacatacaaatacacttcatataaatactaaaaaaaaaaaaatcctcagtgtagcgagagtccgatcctagttacaattattagactactgaaatgctatgatattatattgttaccaaacttcgaatatccactttaataacagttataaaaattgtattatcgtaatgtgttatcaatacttatattttttatagtgtaagaatagtgtaggaaaatacttgtttatattggaagtcaaaattaaataaaaatgacataaacgatactatgagaagaaatcaaactgagtaaaatgggcataatccaactattttgtgagccgatacatatgacaattttcgatcgctgaatcatggtttggaaatatgtttgattactactctctctttctcggtcaaattaacatccgtaagagagagaaaattattcaaacccctaggtttatggtgtacttcgaacctagctagactgggtattttgacaatttcagtgtcctaaaatatcttctaatagtaagaaaatgaaaatgatggcaaagaaaaatcgaaaatttcatgttttgacaaaaaagaaaaaaaaaaaaactctttttaatcctaactaagtaaatattaatgttttgagaactgagcattttataatcttttccaaaaaggcaactattagagaatattatctgctgaagaagtcccacaaaaaaaaaaaagatatagaagccatgacttcgttactatattacacatgaaagttgcatcaattccctctccctcttcttcatcttcctctttctctccattatggatttaggaacagagataaaatcagacacaagacaagaagaacagagacatgttttcgaagattaccctgaacctcttagatacaccgtaagtatcacttttacatagtaatcaatttcttcttcatatataactatcatcttcttttctcaatacatatatttcttcgtcttctttttattgtagacatgggttttgcgagtttctatccattgtgaaggatgcaagagaaaaatcaagaaaatattgagcaaaatcgatggtaatatataaactaaatctaacgttttattctttttcgatattgattaactaattatgagtatttatatgattttattttaggtgtatatacaacaaatatcgacgtgaagcaacaaaaagtaacggtgatcggaaacgtagagccggagattttaatcaagaagatcatgaaagccggtagacacgccgagctatggccaacgtcaatggagaacaacattaacaacgattgtaactatcagaagaaaccaaagaaagataacgaagaaactagtggagatgaagacgacgacgaaaacaacaacaacaacaacggcggaggtgacgtcggtggtggaggtggtggtggaggaggaaactttgatcaggttaaacaagttgttacgtttgtaaacggtcaacttcaaccacaaggagatggagctccgaagaagaagaagaaaaagaaaaagaagaagaaaagcttagggaacacgacggtggtaatggaaggaggcggcggcggcggtggcggtggtggtcctccgcaaaacgatggaccgccagagacagtgatatactcagctccacaagatcatcacattatacacggaccacctcctcatctacatcatcatcagcagcagaatcatccgtatccaacggttcacagtcctccacgtcatcatccacaacaaatgtacgggccgggtccgggactgcctcctccttcgttttatcatactcagcctcaaacggcgccgtcttatacggtgagttacaacacggtgcatgggccaattaataacggtgggaatgagacggcgtcgtattacacggctcctccttctcatccgacgtcatattattcttatgagtacgtggacactggctacgaatctccaccgcccgaattttattcgtatagatctcaaccgtcggaatcgtttgagtcactaagcgaaggcaatccaaactcttgttgcgttatgtgattttggaagtttttttttactgcttttaagaatcaaattgacataattggccttggaatggcatcttgtaagtgttattagaggggtatttcgtaaacaatcaacaaagaacgatattagtaagtaatttaatccaacataaaaatttatgtatttcgtaatttagctatcttttggtaaatgaaatgcgaaaatgtacttctttaatggaaaattcagctattcatgggcttattctttctttttcttataatggtgatttttataattattttttattttcgtctattagattcgtataatataagcggtttatattatacaaatctaatacgcgataataaaaaataattataaaaatcaacattataagaaaaaaaaaagcataatgattaggaaatataaattgttaacatatattgatagatttaaaatgacatgattgcaacaacaaaaaaattgtagtatgatttaagtatacattatgatctacgaaatttgtaatacctaagaaaacatacggttttcatataaaccaataccctatacggaagtgacgtggtgaagtagtgtactattttcgaatatcattttttgggtgcaaaatttagaataacatttgaggagaataattggacttggagaggaataaatctttttccgagagaaataaaaagagagatttttggtgaaagggaataagaataatttgaaaaggaagataaatatgaagagaaggcatatttagaaagcatatttaatgacaaagaatatgtaaatagtgtccacagggaatcgaattgttaaattggtcttacatgttttaatgttatacaaactatattatatattgtactttttccctaataaacaactaacgtgtgaaactaaaaccgttaattacctatatatacacatgatgtaaacatgtcattgatactttaattcttgaatggttaaaagagaaccgaccaagattgagaatctgattctagttagtaaaaccaatccacgataacacatatagatgtgaaaagaaaaaagtttaaaattatgacattatgtcatcacttaaagttatcgtgtgatggcataaggctggaaaaaattgtatgactatgatggcataaacacaaactagattacattatagattatggtataaattgttcgtgtttcaaagaatagttatcgttgttataatcaatattcatttaatcacatgcattgaatacttgcacatatataacggtcaatttttgtagtttttttttaagtttatctaaccacatttagttagtgtccgtaaactaaactataagtaaatttctaatccccaatgtttttcagtagtgatactatttagtgtccgtaaactaaattgtatattgtttgatgcaacatattaatgttggcatgtctcttcagagattctttttagtagaagtttcatgtttctttcgtagtaaaagattgacattttttgacctagatttattgactgttataattgtgtttgaccaaagtgtggaaagacaaacaaaagatttggagttgatgttgatgttgtatatgtgatgttaaacattaggaggctgagaccaagcaggggaaatgttaatatttactagcattagttaacgggagttcagtacccatttgcgggttaggatcgagttttcggatttagagatatagaaatcgtttgggtaattctagattttgcgtttggatagggttcggattcgaattactcgaagttcccaaatatcgttttttataaccaaatatatccaaactactcgaaagtacaaaaatatctaaaaaccttgaatatttttatccaaattaaatacccaaaaacatcttaaatatccgaaaatcctaatattctgacactaagattattacaaatataaatataaataatatatgattactatgtatttaaattgtgaattgttcggttatccgttcgaatcgggatggttcggatttttgagtttggaaggattttgggttcggtttcagatcggatattatgccccacccctactgttgacccatatgaggtattgggttttgtaacacttgtaatttttctttctatattattattaagttttggtacatttgtgtttgcccaaacaaaaagtagtacatacgtttcagtaattgtatagtgttcaaaaggtaaagaagaagaaaaaaaggtgtattgtaatttgtaaatatgaattaaagtatcttcccaaaatgataattaagggggtaataacgcttattcattccgattcgaactctaaagactaacacctcagaatgataaaaaggtcgagaaactggagatactatatcgaactggtgaaaaattagaagacatggtgcacaaaagcatttaagttaagttccacgacccaaagccaaaatcattacttcagtatgaggcaatctttcggaaaaaaaaaaacaagattcgacaaaaaacaagacagattaagctcttagtttttgtttggcttcaaccttcttcttctgccacaacctgtcgacaccactgtcagcgtctccctgcaatcgtgtacatcaatagttaattaacctatgaagataagtagaaattcaaagggttggttgttcaactcttcttatgatacacacaaaacaaatcaactctcttctgactcaattatggacaaagcattgagaaattgttacaaacctgagcacggacaaaaccgcagagagcaaaggttgtgaactgtccggtgtacaagccattagcatctaaatgaccaatgttgagctgaacagaggcatgatccttggatgtgatcaaccggttagtagcagaactgccaatattcagtcaaaacaaacaaacaagaaccaatcttctcttagttaatgagagaacacaaaacagagaccaaaacaaaagaagaagaaatgattctcattaccatttcctaggaatgtaaagctcagtgacctgaccctcttcgttttgcatcttgaaagcttagctttgaaagagtaaacgagtcctatatatccaaacaatgcaaaaagaaagaaaaaacagaactatcttatattagacaagaaccaacaacagtgacatacactgagatcgaaaatgactgtaagtgaaagtaacatcagagaaggattcaagacaacaaaggaataatcgaattcgttgagtaacaaacagatctaacagaacaataatacgaatttgaagatctagggttacaaaaactacagattcaatactatttatccatcatggttcttctaccctaaaccatcggctatattggcaaaagtccatatatttctgataaatcgagacgaagagaagattaagtaaaagtacgattatcctacctgagtagagagcgagagaggagaagcgaagcaggtgcggcaaccggagaaagagatgatgaagaaagcgagagttttatatttggggaaaccctaaggttttttagtgggtttggattaaaaattataccatttgaaggcccatgtgctatcttcaggcccatcgaagatcacacaatgtccagtaccataatcataatgtctcgaatgggttatttactttcggagagaaagttttgttggttcctaatttacaaaaaaaaataatgatttcaatcaaattctataaagtaaataaatgaaacatacactattgttagagagttttttataatatgttgattagttttttataatcttgtaaaaaatttcaaacagtttttttattttggtaatacttttcattactttatatgacttattttgtgaagaaaaatatagaaaatcatgaaccaataacataataatttaaatcatgaacaattagagattttttttttaattgaataactcaaaacttttactgactttataagaatatgaatctaatacacaacgtcgttaactgttggccgaatcgagtcgaaggattcttagctcgttgtgttttgcaggcaacggtacattccatatggcgagaacgaagtgagcgtaaacacgacggtctcccaaatcctgcagcccgactagttaagtggattgataagcacatttggaatcatatatcagctattaatattagtgaagacagaagatatgatcgaggtctccaattttggtttcaaactagagagcttgggtaaacaaggccttcttcttggtttttaacaaatgtatctcataagcttatgttcttcaaaaacgttgcacaagttgtaaacacatatacttttcttttttgaaactaatttaacattatttcaaaaaaaaaaatatatatgaatttaataaccccaaatttaagaagattttagattactttttacaaatcttaaatgaataacacaaaacattaacatatttttaaaaaatcttgattaaataacaacagattctgcatggcactttgagacactaaaactcttttgaaatcataaaccaataacatatagattttgaagttgcttttaaatttttatgttttattggtttttcactttttaacgatgaaaattccataaaaattctcatattcttaacgctctaagtaaatccgtcattctaatagacaaccatttagtttgaaagttaagaacatagacttttcattattgtcttccatagttttattgtttttctttattgctacatattagtgtgatttgattgtttaccaaggttgattcctatttaaaggagacctttgagtttaatagaaatcatccattaaaagatcaaaagtggagttgtcgttttcttgaataaacgaaatacgtaggagattggtcggtcgaagtacttgcaaactatctcgataggatcctatatagggttctatcaacattctcgctcaaactcttctcaactcttctcaactctttgttactactaatatgtcattcacttggaattgtgaaaactgacgttcattatcgcatcaatcacataattaggacgagacaacaacacacaaccgtctaataaagaatagaaagacaataataataatttatcgccacaagaatactttaccaagtgtcaaatttgcaaaattcaaggctatagttcaaagtggtgtccttaattatgttcattctctcactttgaacatcgcttctctaatgtacaaaccaatcaatcttggcgccatggattataatgtttgttagttgaccctcttacataaatattattgaccccaccaaatttatatttaagtatatcccaattgttatatttgacactaaaacatgttatctcatcacaaataaatataaaacagaaaaaggctcattaaattaagttaaacctaattatcatttgtcgatgttacaaaaaattattattttttttaacacaaaacctttaattgtagttatatatgtttcatttgtttatctttatttttcatcttcttcctctttttcccctaatctatattgcttttctagctaacttcaatggaaatttagccatagttcaggatgtgctattgcgcttagagtgtggtcactagagaattattcttcctggacagagagtctgactgacgcaaaaccatttattgaaagaactgatgttgagcaatttgttgtctacttccaatgggcagcttcatgtggcgagaagttaatcttcttaccataaaggaactgatgcttaaaagttccaaagctttcaacgggtattacagttgaaagatttcgggtcaaaataacccatattgaacattcaatgtttgtgtggaaccataccgagagctttgtgctcttgttagatatagactttttgtcttgaggatagaagggatgaggctaaaatgatggagatagagaaacaaagttgtcgctattttgtaattttttgtttatcgacttttgaaatcatagtttgaacttattcattacgtctccaacaattgaaagttgtttttaatttctaaaatgaatgaatacagtcaagtataatcgtattggtgatccattttgtagtgattattaaattgttttacgtaaaaacaagtctttgatacaacacgaaactgtgatttatttttaaaataaataagtgcatgtataatatatcattaagacttgtgattatttaaaacaaaattgatgtatttttaacaaaatattatgacctccatgacaaattattctgatattgtccgtagtcaaaacttcaatctttattcgcatgggttggctgaattttcagtcatatactagttgcaatcttaatatttcaccctaaattttttgtctctgaaaaaaccacgaataaaaacttttaatctcaataaaattatatgtactttcggatttgttcttaaactatgcctccaattgaaccgatcagttaaccgattatatttaatccggtttgacttatccataatgttgaccaaaattaatcgattttgactctattttaatccaattttgacgcaaaaagaaaacagatgtcttctctacaaaaaatattatttatttattattgataaacaaaaaataatatatagaatagaccataaaaaaaattattataaaatttggtgtatacttttggcaatataacaaaatataccacaaaatagatcacaaattcatttttttagtgctatattttgttataaatttttggtaatataacagtatatacctttttcatttggtaatcatttctttttttcttttttgctaagaatcttttgactttacacgcattctcaaactcgaactagggaggagactcacataattacgtctccactaatgcatatatcgtctactttggtaaaagtcctatctcttggtctgcaaagaaacaaaatggtgttgcaagatcatccacagaagccgaatacagagcggttgcaaacacatcatcagaaattcgttggatttgtagcctactcactgaatttggaatcatactaccagtgtcaccagtcatctattgcgacaatgtcagatctacgtttctttgtgctaatcttgtgtttcaatctcgaatgaaacatattgccatcgactatcacttcatccggggtcaagttcaaaacggtcttctccgcgtctctcatgtcaacacgaaagatcagcttgcatatgcacttacaaagccattaccacgcagtcggtttctcgagctaagaaacaagattggtgtgaccatagtccctccatcttgagggggcgtgtcaaggatatgatatgatcatatcatcattccctgtatatcttatttccttttctatctctctttctataagagacttaacctagagttttctactgattcatgtatatatatgcttgtaatctcctttggaaatatatgcaatacacattacttacactcctccgatgacacttggaccctatagaataaaaaatgtatcgccttgcaaacaaatccatccaaacccagtcgtgtggtctgacgccttccatgatccatcaaactgacatccaatgttcaagaacataagttatgaggttgtggagtcattttgtttcctcaagagcctctaattgtgtctcctccctttataattgttaactttgagcataatttataatattagtgggttcctcgtagagtctcttaaacactttatcattccatgctttccacataaaccataaagtccatagaaacaaaattgaatattgtgatttgtgaaatggcaatgtataagtgatgtgggatgttaaaattgatggatgatcaagatcgtcgtttgatggaagtggcccaactatttcttaacgggcttcttaatgggttttaaggttgcccacaaattgtgtgccacaatgtttgtcgttgtcgctaattaatggcttcgttaattaaacacttctaataattctccaatggagtttacgtgactctacagtctctcttctccattctccaatttctacaaagataatgtggattcaccaaaaattcagaggaaggacacgacaatggtgaattcgtacgttcctcttcgtttcaccattttcatctccttctccatcgcagcagcttcatccttcaaactccactccgcttctcattctccgtcgtcatttccgaaagccaccggcgacgatctactctccgttctcggacctccctccgccgcgtcgtgcctcaacccaatcgtctctcgagagatcaaatcgtgtcttaaattcctcgtcccattcaaatcggataaacctaaacccgaatttggacgatgctcgcctcgtactggactctgttccggaaaaattgacgccgttgagagacggagcaagtttgaagaggagaattctctaatctggtggccaccggaatcggttctagagcttgctcgtctcgctgttgactccggtggtgatcccggttcaattcagcgaactctcaatccgaaaatgatcccggttcgtcttcaatttaatggtttgatttggtttattgttcgttagattgaattggttaaaatttggttttataggttcctgatgttgaacgatcaagaaaagataaatgtcaacttactagaactccttatggtcgtcattttatagcagaggtaaaaaaagaagctattttgtgaactgtttgatcttatggtgtagtgatctgattgatgatgttaatgaacaggaagtgaactcatatttcgagttcttgtttcatctaattgaatctaggggacctagtgttggattgaatgtttcattgagtagatatgatttgttccatggccatttattccttgcctcagaatctggacgccttggaatattgtaagtctcctttgtctcctcaacacacactaggactcttgaaatagtaatgatgatcatgttctgttactgacttcgttgtgtaagaatcgagacgctttgataggcactagaatagtagatataagggggtctagaccatttggttaattgggagcatttaggctttgagagtgaagagaactctctagggtttgttcttgtgttcttgaatgtaaccaacagttatcaataaaggaagaatggtttctgattcttaacacaattgttgcagtgtttttagaaaggttgaacgtaagtaatgagttttggggaatatttatagaaagttacatggttgagctaggttttgagtactgttgttgactagtatctgattggtgatggtaggtttcatgctaaagagtatccagcctatgacaagaaagtgtttccttacaacatgggatattgccagagaggtaatatgggttcttgtccgtgtgactgtgagttttcttgcaatctcttgaaacatagaaatggtcacagaaatcccttaaatcttcagtattatgattgtatctcctttttgttaggatctgacgtgaaatacaatgattcaatgaacttgaggaatatcctttggcttgcaccattacctagcaactcttctccagattgggttgctccaggtataatatctgttttcatctctgagagtaatagaaaagatctaaacacttcatagtttcaagatgatcttgtctttcattagtatcgtggaaaacaattgtagtgttacgtttgacatcttcctttcctttgattgatctgtaggtgtacttgtggttcttgatgcgcatccggatggaatcatataccgagatctcatccctgactatgttaagtttgtaagaacaatatacgaaggtttgaacaactctataccttctctcatctcactcatcaatttgcttcattgtagatcacatttgattacacatacatacactcaaagtctcttaaagatttatgctctattgaaactttatgtcttatccttctccaccagatgatttgggaacaaccgcagttgatgtcaattacttgaatgtcggagctcacgaacctgactatcagcttttcatgtgctgaaacaaaccagttacagattcacaattacacagttgtgtgtaattgaaactttgattaagatttagttactggagctggtcgaggttcaataacgttcgagttggttgataatttagagaggtctgaagtattgtcggttacaaaatagctttaacaatcacattgctgaggctttaagcttaattgtaaaagtttaggattagatttgacatatcacttggctttgtttgattcacacagttcgccttagtgatgtaaattaattaatttcgagagcatcaataacatattaatgattagttattttccaccaggtaaccattgccaacggctacaaatacactttggtgtagacaaagtatacgaaaaattaaaacaaaaagctccgatgccgggaatcgaacccgggtctcctgggtgaaagccagatatcctaaccgctggacgacatcggattagttggctagattgatatgtttaacaatatatactaaaacagataatattataaagttaagggactcgagtgcaaaactcaaaaaagttcccattgacctaaaactaaaagaccaccgattcattagaaatccatccctctcactgtcaaaacccgagaagcagaaaaaagcaaaaaacagatttcgaagtttcgacgcctctctattcttcgatctctttcatatttgaatcgttcaccttcttgccgatcttcggagtatattacaaggtttctcccttttctctcagattttttttagtagctgaattagggtttttgttccgttttcgctattgcttcttccgcatcttataaagggtttaatgttatacttctctgatgtcatcaggttcttaacggatctctaaatcttctgatttaagaagatggtaagttactagacaaacttagggtttttttccttctttcttgtttgcgttaaagtttcaatttttattaactgaaagctgttgttttgattttatagcttcctctatcgctgcttaaaactgctcaagggcatcctatggtgagtaaaatttcgacccttgattacaattttgttatatatgaagtgaagctgagtttaagtgagcattgcattagggatctaaaggaacttccttttactgtaattttgaatcttgttttgttttggtagctcgtggagcttaagaatggagagacatacaatgggcatttggtgaattgtgatacttggatgaacatccatctgcgtgaagtcatatgtacatcaaaggttatcttatgttttcatatgttgatacaaatatactttgtttagacttcgtgatgaaattttgtgtagctgacactcatatattttgctgcttgattactctaggacggagatagattttggaggatgccggaatgttatatccgtggtaacacaatcaagtaccttcgagttccggatgaggtaatttttttttgtgtgtgtgtgtatatatctcttgcttgatctagttttttctttgttcccctctctctggaatgatgatgcttagccaaatcagatatgtgctccaagaggcatttttctgtggaaccttgttcagcagatggtgtgcctcttgttgtagtgcgtcttagacgatatcacagggaatggttattgctgaccagaatgttgacccacttttatggactttgctgtgttgtgtttctgatgcgatttttctctattgtttctactttatttcattccctctaaaatcaaattatattcacataccataaacgatatcttcatctagaaggacagtcatatgctgtttctatttatgttcttactgctgcaacctagattgagttaactgacttaaattgatttcttctctcttcaggtgattgataaagtacaggaggagaagacacgcacaggtatagtattactcatgtctatattgtacctttactgagatatgcttcgagttttctgaggtgttaatattttgccagagtagacattgagaatacttcaggtgttaataacgatggttgaatatgtgcagatagaaaaccaccaggtgttggacgtggaagaggacgtggtgtggatgatggaggagccagaggcagaggcagaggaacttcaatggggaagatgggtggcaacagaggtaaaaaatacacaaacaaagcttgtcacaaaactctgattttactagaatacttcaaatatctgtgtcttgccacaatgggatttaagctaaaactctaatatgttatgaaaaacaggagcaggtcgcggccgtggttgatgcaacaagttttaaagactcgctgccaaatctgctaacttcccattgtggagaaaaccaaaagttacataagaagttggtctgttgttggttttctattaagtatgtaagggatagggagtgtgtttttcgattctccttgtgatcttttcgaaaaatgaaatttgtcttttgcctttttgtggtatatgtgaaattccaattgttttcatttgcgcttaaaaatgaatctttcaggtcttgaatttatataattgttagagaatttatacaattaaccaacgacagggtttttataagatctttggtccatcttacccttttattatttttctttttttcctatctattctttttttcctctttcaccggattttctccatcactcgtcggcatgacatataagattagatatgatttaaaaaacgcatgtatttcaaagacaaaacatgctcttaagtctttacattgacttgtaaatttttgtcaagctatctaacaaaatctcatattttttttttggaacagattcatatttttgtcaagatttcatgttatataaacaaattacatgtcttttatccaatatatcattagtatttcataaaataactatgttttaatgtaataattatacatatctgtcaatatttcacgttatgtaaggagtcatatgtatttcttcaaatatcatgaaaattacatatttttcttcactgtatttttacaattgaattttcctcttctcaaatctatcggaagtcttattgtaatattagaaattgataaagatattttcgtcaatatacaccgtctaacgtgtgaatccatagttcttttctaacaaaaactaaacttatgattaatatctttatttaatctcagaatttggctatctagtaataacaacctaattattatctgagtaaatccctagaaaaaactagtagtaatggaatttgcatgagaatatgagtattttggtcatttattttatttttctcaatgtaaacttaaatatttatgggtaaacaaaaaataaaatcatagaagatgatataattaaagatttgcgaacgaaaatctcataatcaaatctctctcttctgacacacgaaataatgacgataataaccctatcccgacacaatctctgacataaaatcaaagcatttaatgctcaaaatctctataaaaaaattcatgcatcagaatagttagcagataacgtattatcaggataacatgataacaaatatctcggtaatatttattaggttaacatgataacaaatatttatatcaataagtttataattatgtcatggtaagtcattttgtatcgcgataagttataattgatgtgatatatatagatatttaccatcttaactcatttattatatcataataaaaaattaacgagttactataacgtacaaaatatgaatttcatccaataacattattattatcactacctctagataaagttttagttaactaggtaatttaattgttaaccaatttgaatctgaacaaaaactaccattgcgtaatcttcaaccaccacatctccgccgtattcttctcaccccatcatttcagaaccatttttttcctctaccgcaaacccacaccctaatcgatttagaactagatctttaaacgattgagagaaactgccggtaattcgcgaaacttatttggatttatcgaccagaaccacagagctttgaacggagactggaactgaatatcggaaaaaagaaaaacagagttaagttgaatcgaatctatatgagagatattatgtctctcgtctctgacacacgttactgtgtatcttatatattactttagactggatagactgtgtaggggcttataggtcatattttgtgtacaaaaaccatataaacaatgtcgaaaatatgtcagttaattaacgggtcttctttggtcatcttgtgtaaaaacccaatatttattaaacaattacgttaagaatttattttatctttcatctgcttccttcatcatctctctctctccatcgcgtacaacagtaacacaaaccatttttttttaaatctttctctctcttctctcaatcgaactttcagagaaaaaaaatataatctttgccgagtggaaaatttccggtgaagccgtcccgagtgactcgggctcttgcccggtatctttcagcttcaatagtggagataaccggttttatgtcgagcaaatccagcttccataagtggtgttgactggtttttatcttttttccagtcaatcggattattatcgattgctttacttcttttccatgttttctttcaataatttctaaaaatctgagttggtaattagttttaagtgctagctatttaaaattaatgtctctggcttttggttttagaaacctcgatttgcaagaaatcgttcaaacgattacatctgggtttgaaagattgaaggataatccgatgcttattaggattctcttaagccgtctatttctttgggagctccatccatatctattctggtggtaaacaaagattattcgtacgttttattcggcgatgttttcctccaccggatttggtgctcgtcgacggtggaggctgatgtccgtacacttccgatgactcatttacatgtgctgtagttataatctcatgtcaacacgtgtctttggatagagtcaaatgttgaagatcttttggctgttgatattaatctggtggatctgttgttggacctttcttttatttcagcataatcgttgtaggcttttacgccttatacccctttggtggttaatgaaatttacttcgattaaaaaaaaaaaagaattttttcttcgtggaggtaaaaacaaaagaaaatacagaaaaagaaaaatccactacaatttaagcataagcaaacgaatggtgtgttcttctcgaagtagaagaagaagagagagtcagcttccaaagaattgatagtaaaatggcggaaatcaaagtggagaggagtcacgatcaacatctccttgaacctaaagaagatacttcttcttcttatacacggaggagcctcgccggaaacagaccaagacttgcttctctcgacatattccgcggcctcactgtcgccgtacgtatctctttcttctctctctctctacttgtgcgaaatttcgaactctaaagctttttaaattactcataatagttgatgattctcgttgatgacgctggaggagactggccaatgattgctcatgctccgtggaacggttgcaatttggctgatttcgttatgcctttctttttgttcatcgttggtgtctccattgctctctccttaaaggtcaatttcgaacttgaaatctctcagaattgcgatgttgttgcatataaatcgttttttgcctttgaatattcagaggatttcgaataaatttgaagcttgtaagaaggttggttttagaacctgcaagctcctcttctggggtcttctacttcaaggtaatttataattttcctgtgtaaacttgtagcctctttcctttgacattcatgtatttggactcttttgctatgaaggtggattttctcatgctcctgacgaattaacatacggagttgatgtgactatgatgaggttttgtgggattcttcaggtgtggtctcagtctcaagatttatcttttatgtatttatgtcctctagtgttacctagtgaaggttcatgtttgtcatctgttttcaatgtagagaatagctttatcctatttggtagtagcattggtcgagatcttcacaaaggactcacatgaggagaatctgtcaactgggaggttttcaatattcaagtcatattattggcattggtaaaacatgacatttgagttagttggtcagaactaaatttcatgaaaactagatagatattttcggattgatcttgttttttagtacattcacaggattgtggccgcatcagttctcgtgatttatctggctacactctatggaacgtacgttcctgactgggaatttgttgtctatgataaagatagcgttctgtacgggaaaatcctatcggtgagtctttcgatgttttaatgttatgagaccattactaagtaagtgttgtgtacacttcaatgaaaaattctctgaattcttcctaggtatcatgtggagtgagaggaaagctgaaccctccttgcaatgctgttggatatgttgacagacaagttttagggatcaatcatatgtatcaccatcctgcgtggagacgatccaaggtacaagacgtaatttccggttgtgcttgccgctagaatgaccatgttggcaatttctgactgtgaaatggtttatgtcaatccttatgcctttttgagttttatgtcatagaagataaaaggaagggtttatagattagtgatatatttttcatgtcaagggactcaatcataatgtgttcttttgagttttaggcttgcaccgatgattccccctatgagggagctatacgccaagatgcaccttcatggtgccgtgctccgtttgagcctgaaggaatcttaaggtctaatcttgtcaccctaatcactaactgagcattagcattatcttcaagtttataacactcagaaacttgtgttatgcagctccatatctgctattctttctacaatcatcggagtccattttggacatattattttacacttgaaggtcaacaaactgaataaaacataagcttcaagctcctacaaactatcaccgttttgtcctttcaatctcatcattaccatatttttgcagggacattcagcgcggctaaaacattggatctccaccggtcttgttctcctcgctctcggacttactctgcatttcacccactgtgagaaacaccttgctttttggtccaactcaaaatagtctctcttctcttaccatatattacaaactcaaaaatgttttgcagtgatgcctctgaacaaacaactctacagtttcagctacatatgcgtgacctccggtgcagcagcgctcgtcttctcttcgttgtattctctggtgattcttaagccaccacattgacattgacaacaaccaagacgtatgacaaactttggacaaatttgttgtttattatttcgagtgtttgcaggtcgatatattggagtggaaacacatgtttctgcctctaaaatggataggcatgaacgcaatgttggtgtacgtgatgggagctgaaggcattttggctgctttcttcaatggttggtactatcgccacccgcacaatacactggtaaaaaatcagttacttactctgaaatcttaaataggcctgaatggcttatcatactgacagtatcatgatacctgctttagataaattggattcgggagcatgtttttatccgagtttggcattcaagaagagttggtgtgctaatgtatgtcattttcgcggagattctcttctggggtttggtcactggtgtgtttcacagattcaagatctattggaaactctaagtagaccgtgaaaatacctaactctatgttgaagttgttatagtttaggatatataaaatcaaattcatggtaagtaatgtagtcaaattcatgataagttatgtatatttttcgtaaaccttggtcagaatatcctttgttgatgttgatgatataggcctgtatatgcatttcaggccaatttcaccgatctaccgtattggaacttaaatatccgaatgatctgtatcctactgtttcccacatttttttacgtattcttccgatagtaatattcgatatcctcagaatggagacggaaccgcaccgcactttatccgcaggtgaaccgcatgtctccattcgatccgcaattgctaatttacaatctcctaaatacccttacccgatctgcaattgctattatccacgaaccggtatgctaccaccgatagtaattgctaatatccgaatgatctgtatcctactgtttcccacatttttaatgtattcttccgatagtaatatttgatatccttagaatggagatgaaaccgtaccgcactttattcgcatgtctccattcgatctgcaattgctaatttacaatttcgtaaatacccttatcggatctgcgattgctattatccacgaacgggtatgctaccaccgatctacccctactggaacttaaatatctgaatgatccgtagaatgctttttcccacacttttttgcgcacacttcggatagtatatttcgatatcctaaataccattatccgatccgcaattggtatcatccgacgaaccggtatgttgactctaagcaaaagagagggtttggtcctatgacctgacgtgggaatgtgtaagcgaaagaaaaatagctaaagacgtctcacacaaaaaagctgctagaggaagaagacgattcacttctttcccgccactttcactatcttctccggtggtgagcaaagatgttgtgggtcgacaagtacaggccgaaatcactcgacaaggtcatagttcatgaagatatcgcccaaaaactcaagaaattggtacgcctttttgttcaaaccctaggtaattttttggaggggttttcgatgaattggaagctaattttcgattctcctcttaggtttccgagcaagattgtccacatttgctcttttatgggccgtcaggttctggtaagaaaaccctaattatggctcttctcaagcagatatatggggccagtgcagagaaggtaatccttctttcttataccctaatatcgttctgattactaaaagatgaagactttgaaccctaatgttctttagcaaagcaacattaggaagttattctcactagcacatactctttattttctcttagattgatgtttatcttcttattgctactttcttttgtatgtggcaactgagaaactgcttgatttacttgacttcaggtgaaagtggagaacagggcatggaaagttgatgtgagttgcattgctttaattttgaagttctcgctgcttgatatccatagtcgtcttgtgtccttgttggatcagtaaatgtggttaagattgtatcatcctacttgtgaaacacagagatgtgaattgtgtttgctgtcaatttctttagtgggtggtcctcctaggcggattcttcttttatacatgacaacattgtgatacattacgcaggctgggagtagaactattgatctggagctcactacattatcaagcaccaatcatgtggaacttactccaagtgatgcaggctttcaggacagatatattgttcaggagataattaaagaaatggccaagaacagaccaattgacacgaaaggaaagaagggatataagggtaagaattactgttccccttgttctatataatagtatcattagtgtagacaatttggattacaatggcttatagtagttatttgaagcatctatgaagagtgaggcttttataagggcatttgatgccatcttcaatccgtatactgctgtggtagactgggtctacattttatggttcgtaatatagttttcgtttactttttcatgttcaattagatggttgcctcgtatatctagttttaagagttcttgttcagctgagtgcttctttatacatttagatggttctctgtttttgattatcaacttatcactggtctctaacatccctttatgacctgccaaagtagttcaacttcttttcacatatggatgttggaagatgtctgatacatgcagattttttttttttgtttcggcagtgttggtattaaatgaggttgacaagctctcacgagaagctcaacattctctgcggagaacaatggagaaatacagctcatcttgccgtctcatcttatgctgcaacagctcttcgaaggttaccgaagccattaagtctcgttgtctcaatgtgcgcataaatgcaccttcgcaggaagaggtacataaaatcaccctatgtttttgtaaaatattgtttatacaataaaggaggctttgtgtttagttcggtgttgagaaaccacatcttgttttgtggcttttagtggctatcttagagcaaactcatatcaaatcctgtcttaaaaatgcgcatcctatgggagatgagatctcgaaattgcatttcgtatttttcctttaaatcaactcgatgtagaaatcgatttgtacgtattcttgtgtacatttcactagtttggcaagaaaaaacaagttaaattgtctttatatatctgcttttatccttactgagaaatttttcatgactgtcggcgttcttgtgattattctattgttcatgtgatttaaaaatatactattaagaatctgtagttgctatcagaaatattacctaagattcagtgtttgcttcatttggcctttgtaaactttcttgcgaaaaccagtatgcaagattattgttaactaaaatgtagctctctggtaccagatagtgaaagtgttggagttcgttgcaaagaaagaaagtctgcaactgccccagggttttgctgctcgtattgctgaaaaatcaaatcgcagtctaagaagagctattttgtcacttgaaacttgtcgtgtccaaaagtaaggatcagaaactttatatatgcagataatcaatgagtttgattcttttgttgtttcatgtttagaaaatttaactttacattactttcaacttgatattcattttttctttgtagctatccgttcacaggtaaccaagtgatatctcccatggattgggaagagtatgttgctgaaatagcaactgacatgatgaaagaacaaagccctaaaaagtcagactctagtgaatcatttacttttacaaaatagaacttcaaagataactttgactttatcatctcttgtgtgcttcttcaggttatttcaggtgcgtggaaaggtgtacgaattactagttaattgtattccaccagaagtcattctaaaggtcttaaacataaccttattcacttatatataattatgtatttgggtccctttctctttcattttactcatagtttatgctttcccagagactccttcatgaattgctgaagaaactggactcagagctaaagcttgaagtctgccactgggctgcatattatgtaagagtatttttaaacggctcttagtcttagattgcgaatttgatttctcctcaccattatctcaacttctgtgtgctcatttgagactgagttaccattcttctgttttggtggcttgcttgatgatatgtctttggcccttcttacaggaacatcggatgcgattaggtcagaaagccatatttcacatagaaggtatataaactctttcagttattgcatatggccgatataggctacataaaaaatatcatcttcttactttgagttggtgttacactgcagcatttgtggccaagtttatgagcatatacaaaaacttcctcatttcaacgtttgggtagagaagagaggcttcaaatcgaggaaaagaagatagacttgcacttgtactgtttattttatgcgtgatccgaggttctgaagttaaggtttctgtttagtgggtcgtcttaacttttgatgtttgaatttgtttccctcaacttgactgtcttaattttaataaactatggaagcggtttggcctatcagtctgcaacaaaagacttgccgaaacaacgccaaaaagtggctattcaatttgcaactctatgggtttgacgagggctaagagctagaagatactgaaattttgttgtagtaacattagtttttttttaacaaaaaacattagatatttgcggtaggcttctaccgaacataggcaaaatcttccgtagctaacaaattataatgattaaatttatagtgatatatatttataccgtccagtattaatatattgtatatatttataatatattttttttttttgtaaaattcaatttataatttacaaaacttcataagttttaaaattataaatattttttaaaaatttaaagctaaactttataaaaagtttgtaaaattataatatttaaaaagctataaactttgtaaagtttatatttttaaaaataaagaatccgagtaaaccggataaccactttaattttaattttggacgtctgataaatcaagcttcctgcttattcgtaactggactcattttggtcattttttagtatgactttgaactaatgtccaattttttaagcgatgtgggacattgtacacatattatttcttcattgattgaataatacatgtcgattttaaaaatttgaattacatcatatacaaaaaaatatatattttattaactatttatattttatataaattcaaaataatttaaatataagattaaataaatttgaaaaaagaattatatatttatgtttatagtaggtaaagatgttttagaaaattagttaagataaataacaaatatggttagtttagaaatattaaatatatattaaatttggtaattaaattaatttcgtttttaattaaatttttatagaaaagagtaataaaaactaattatgaaaaattcgattgaagattttcgggtcaaaaatcaaataaaaagtctgatccaattggattttttaaaatgtacttcaaaaatattgagtagatagataatatttgttttttattttgcaaaaaaaaaagataatatatttttaagaattgcgttttcgaaattgcgtttaagaacgaataatggcagccattttgatttcgaaacgcaaattggaataggaaccgcttcgagtactgctataaatactaaatgaagggtttgagttaaaatgatcgatactagctttaccacttagcctctgacgccagaactccggtcgataattcgccggagaatcaaatccacggtgagtctttttctcgaatacgtacctgattttaatcgattcataactcaacgcctaggatttaatcaagttacattgttgttgtatgttcatgctcttagggttttgtgtctcgtgatgcctgggttcgatagaattagcgaattaccggaatctctgattactcaaatactcttatgccttccgactaaagattcggtgaagacgagtgttttatcgactaggtggaagaatctatggctaaatgttcccggacttgacttaacttgcagtgatttcccttttgaagatgaagaatatgaacaagtgttcattaacttcatcgacaggtttctagagtttaatcctgagtcacgcctgcaaacattcgaggtagattacaaaaggcgtgagatacgcgggttcaaggatcggatcggtacagcgattaaccgcggaattcgacttctagatgctgtgagtagtaccatgtattgggaggaggaatgcattatgtatccttatttggagttcatgcctctgaatctctttacaagcaagacgttggttactttaaagctccgggattcggctcttaacgatccgggtttgctttctatgccttgtcttaagttcatgattcttcgtgaagttcgatggtctggtaccatgagtcttgagaagcttgtctctggatgtcctgttcttgaagacctgaccttggtaaggaccttgatatgtcatattgatgacgatgaattgccggttactcgtgtgagatctcggagtctgaagacgttttatgttccgctcgcgtatggagtaggttgtaggtcaagagtcccagacaaagtacttgagattgatgctccaggactagagaatatgactctcaaagaagaccatttcgatggaatcgtggtaaagaacctgacttctttgttcatgattgaacttaatatcaagtttgctgtcgattaccgcaggagttttgatccagaggacttatcgaagagaaatgaaattggtgattttctcactgggatatctcgtgcaagacatatgatcatctctcagaaaacagtgaaggtatatatttcatcactctgacaactattcctggtatttgcctaactggaaaactcttacatgtatccttttttctctcttcttgttgcaggctcttgaaagttactcaaaagttggatcgattcccaaattcaataacttgtcacatttaaaagctgtgttcccgagccccttgttaccgttcttgccagcctttcttgagagtttcccgaatctgaaaaacctaatcttggtaaaaccttttgtgattttggcataacaacattaattttggttttgtggatgtgtattattgaaaatttggtgtttgcagaagattgcttttgcaaaggatgatgagacggaggagctgaatctcataaacgtgcctcggtgtatcgtatcgactctcgagtgtgttgagataaaaggattgtttgaatgggaggaagaggagatgaaaatagcgaggtactttcttgaaaacgcagcagtcctcaagaaacttactatgagttttatagactaccctcgatatgcttcaaattcagatgtctacgaggaccttgataaactcacaaaacgttctcaacaatgtcgaattatcgttgatgatgagtgatgaagattgatccgcaaccatgaataagcccatgagcatatttcagtgtaggagtctgtttttgtcacaaacttaagctttagcattttttttaaagatgatcttgttgttcttcttagttctacttggatttcttagccatagatgttgcaacttgtttgaatttcggtttggtttcataaaattaaattttgatggctttggaatcaatttagcgttgaaaaaaagtcaaaaattagcgaatgttgaaagaccaattttttacactttattaagacacgtcagcaaaatgaagcgcaagttaggaaattggcttttacttcttccttgagaagtttccgactcggccgctttaaaaccaacgcccgacgctcatttcttctctccatttttttttgctcatcttcttcaacaatggcggaaccaaagacaaaagttgcagaaatcagggaatggatcatcgaacataagcttcgtaccgttggtaatctcactcttcctcctcttattccctctttgttcatcctcgaactaattttctcataggttgttttggcgtaacaataatacacgaatcgagtttcgtattggttcatcgttattatagatcttgtttataccgtatttttctgaataattcctcagatccgaagtttttttcgatctgaataatctcaattttgataattttaggtttaatttcttacacaaaatcgaagttcctctttgcttcacaattttgaggatgcatgtatgagttttgtgttttgttctgataaaatttgttggttctgaattggactcttgataggttgcttatggctaagtggtatctctggttcaattgcttataattggtctaaacctgccatgaaaaccagtgtcagaatcatccacgctaggtaaattttcttatcttaatgctccttaatgttttttagattgaagaatctgctccttaatgtttctttgattgtagaagttatcagtggcttaagctattgaagaatctggttcttatctccgtgtaatggacatcaaagttacttacctatgtgttctcatatattgcataaacaattacgtttaagaacactaatgcttgagaaagcatgatcttcagttatggatactctaaaatcacttgttcgtgtctttcttcattttagaattcttatctttcaatctttactatgagctgctttgtctcccattggttctgtattgctagacaaatttagtgttaacaacatctagtctcttcaatattctatcatatatatgcttgctcgtatgcagttttgtacctaaaaacatgtacttgtgatgtttggtacataacataaatgtgaccataacagttttagttttttcatagattggttctttaccatgtttggcgtttgatcttttacacatttctggattggattatattattatgtcaggttgcatgctcaggcgctgacattagccgctctggctggagcagctgcagtggagtactatgatcacaaatctggagccactgatcgaatcccgaaatttctgaagcctgataacttaaataaggactagaaatctccgtaccatggctctgcctattctgttatttgtaggcatcttcgtatccaatgaagacttcatgttttgtaagttcttttggtatttgaaatggctgatacctattctgttatcttaggcatattatagccttgcagattatctgcaacattcgggatgcgaaattgtaagagagattcgtacagaaactaaatgaataaattatatgtattcgatttattaagcatggtcattttgttattagcataaatcctgataatatctatctcctatcccaaaacctggtcattgtgtcccttattgtagattcagtatccacagtatcagtatcttgaaaatgtttttacagtttcctggtcatggtgtcccttaggcaaataaaccgaaccgaatctaccgaaccggaaatcgaaaactaaccgaatgaatattaaattctacaaccaaaataaccgaaaccgaatagatataaaccgaagtaattggataaccgaaaatatccgaatataattatattttcaaaaatattagttatttctagactaaataacaaaaaatacttgagaatatatataaaatagtaaaaatacttgaaaataaccaaaaactatccgaaaatatccggaaatattcaaaaataaccaaaatatccagaattatttaaagcaaaataaccgaatggatactaaattttaaaaccgaaaaaaccgaaaaaaccgaaaccaaaccgaaaccgaaccaaactttcaaaataaccgaatggatactaaactttaaaaccaaaaaaccgataaccgaataggtataaccgaaaccgaatggataactataagggactcccttatgtctgtttgtaaaaaacgtgtttatcgtcgtttcaagcacttgattgggcctaaaacatccagcacgatgtgttgatattcaaaagtcccacatcggttaatacccaaagcatgggttggtgaagcagtagtatatataaagaagcggactgttcaagcaaattacttacctggacggggtcaactcgcgatcaataagacgagtggcctaggctagtgaccgcattgcacataccgttggggtgctatgcctaaggtcttcccttgaggaagagcctgcgttattatttgtggcagagggggtttgcgttcgcgcagcccctaccagtcattgttagtctgaagttttcatatttcaattacttatccgatatggtactctagaatccaatagctaatacttaaccgaactaaccaaatcgaaaccatatgcacaaaaagtcccacatcggaagtatattatagcttcataggttctgcttggctataaatgaagaggctctccttctataaaaacttatctttgcgcttggggcaatgacgcagctaatgaggtattaaccgaggcgcgtctattgctggttgaaaactatttccaaaccccctcctaggcctaagcttgtcttgggcctctgagaatttctggaagagctccctttggggtaaagctccacaattcttagttcaatagatatcttttatgattacgcttcataaatatgtttctatttaatgtaatatgtttcctcctttcatgtacctaaataggtttatgttatgcatcagctttcttcatgttttctcaatttgaagtgagaaaaatatgtcatgctaatagtctgcttctgctttctgcattgatctgttacatagcagccactttcttatgtaactgagattggtttcggtataactatcatatgagaggtaacattgatgaatttttcaaccctttactagcactaaataattttacacgttgctaaagtttggtaggggttagaatgtagtaacaataacagagcatgtcggcacgcgtagtacgctcaggtatccctcatgtcttctcttttctggttgtatctttacatgcttcttcttcttccttttcgtgattctctctctctctctcttttcattagataatgtgatagagatctaggaacatgtaaagagagaaattagaggtcttgagacaaaccttaaactcttttcgtttctagtggaggtttatgggtaagagccacacataaaatgtacccatgactcattaaagttaagttagtaggcttctagttggtttgaaccggtgtgtcatatgtcgaaaacctcacaagtaagtggcgtttcaaaagcatggtaatctgaacttcatcgctgcaagaagataacaaatcgtaagtaagagattcattcaagtttaataaatgcattcaagagacaaagcttttgctgtttaaagtaaagctctttgtgtagtaacatagatgtattgtagctaatgtaaactaattagaagctggacatagtcctccacaaaataatgaaataataataatatgtatatatgttagaccagttcagagaagacattttcatgagtcaatgacgcattgtcaacacatgtttagagaaaaatgatgcggtccgttgaacagacaaaagaaatatatataaatcatatgtccatggcaacaatccgcgtgatctgacttcgtttctcagaaaattcttgagttcatttctctctatatataccgatttacatatcgaacatcatagttttaaggtttttaaaaatgtgtaacatcgtggttttcttgctaactttgaccttgttcttgttctctggattgtcgaacacagcatttgcccgagtgcaatatgaacctttaaagccaagtaagtttttattacgattttaccaaaaaaaaaaaaaaaaagtttttattacgatcaaattttatatatccaagtcgatttggttttgttgtagtttaattttttttcccgggttctaaaatagaatgataaatggctgttattcaatttgctttgatacacttttttagtctcgatcctatgtttagcaattaatataatttaatatatttattgttatttgattttacggtctcttttgcatatcaagaagaagaaaaaaaaactgaataattttcattctactctcttttagtttttgtattgctttttcgatatggatcttattcgatctgaataattgtttcaactaatgaaatttttgtcacttaagtttaaagatataaaagattgattgagcactgattgttgtttaatttgttgggacagaattcggagcaagggtatgggatcaaaagatgataaaaaatatcaagattgaagtagatggtagctgttcaaggcgtgcacctggaagaagaagaccaccaaatagaccaccaaaaccatgtactaaaccctagtgacaatcctttatgtatgtacatatatatgtataattttataaaaatgacatcaagtactatattagattcacataaatgatcatatttttattgattctttgtatctaacatcatcacataatgcaagaagaaaattaattatcaaaagtataataaaataaaaatcatattgcttacgcttgggcattcggattttggattggatttggttcagattattttggattcggataattcggatgagaagtttattatccgttaagataatatgactattaggatcggtttcgattcggatggtgttggattcagatcggtttcaaatcagtttttcagaaaaaataaaataaaaaattattcaattttaataaaaaaaatcgtttaattttactaaaatttggtttagttttgcaaaacattgtataattatgacaaatataactaaaaaaaattcggatatcaaggttttggatatttttgagtaaaaattataactaaatataactaatatttttagatatatatttttattttggattagcggatatcagttcggtttttggtatggatcgaattcggtttgggtaattcgtgtaggagaattcattatctgttcggattttgtgattattcggtacgatttggattttttgaatcggtttcggatgatttttggattttgaattttatgtccaaccattattacttaataactgaatctaggaattgttttgaagagtggaaaaaaaaaaggaattgttttgaagattctaattaggttcagttgttttcatattgtttgcaaaaacaaatgtggggcaacacactccgcaagtttctcggcccattagtagatcctttgtaaaaatttcacttacccattacaaatatttgggcttgaaaaacaaatctgaaagttatcggggctaatttcgaataaagaaaataaatgaggatcacttctgttatttatcatcataaaatgacacgagcaccttaaaagccaaaaaaaacctaataacatcttcttcttcgtcttcaaagatcaaaaaacgccgctcctcttcacacagttccatcttcttcaacttcaggtgacaccattatcgtccttcgttgaaatctttcatagaatcggttcctattgttgttgaactcttagctctctatcgttaagttttcgttttcctggaaatgtaatcaacgaacattagattcagattcgaaatttcttagtattgttgttgagatttatgaatggtgaatttgtttttgcagaggtgaaaaatgagtcgtggtaacgcagcagcagctaagggaaagaagaagggagtttccttcactatcgattgttctaaacctgtggatgataagattatggagattgcttctttagagaagtttcttcaggagaggattaaggttggtggtaaagctggtgctcttggtgattctgtttctatcactcgtgagaagagcaagatcactgtcactgctgatggtcaattctccaagaggtatcttaaaacttaaaacctaattctctgatattgcctttacttgtgtctagatttgtggctttgatatttaggtatagttttgggaatggttctgtttatcttgttggtaacgtttgaatatagaatcttgaaaccgttgtgtttgtaatgtttttgtttatcttgttggttggtggttggtacaatgttgaataatagatcatcttgttggttggtacagtgttgaatttatcttatagagttacttataggtatgttgtttgattctgattttagagtgtctctgagtgtaattctttgttgcttatgttaatcttgttggttgatacaatgttgaatgttgaatcttgaatagtttttggtaatgcttatgatgatcttgttggttaatacagtgttgaatgtggaatcttgagtagttttagtaatgtttttgtttattttgttggttgttacaatgttgaatgtggaatcttcttgagtttatcttgttgagttaagtataggatgttgtttgattctgttgttagactgtttttgagtgtgattctttgtttatgtctgtgacaggtatcttaagtacttgacaaagaagtacttgaagaagcacaacgtgagggattggcttagagtgattgcggcgaacaaggaccgtaacctctatgagttgaggtacttcaacattgccgagaacgaagctgaggaagaagattaaaaccggttttggtctagtgctatatcctctgttcctctatttctgttggtttggttttgattcttcagttttgtgttagatattattatgtagtttgattgaagtaatactctttgcttttgttgttgcgtacttgagattttctatggagtctatttcttccaaacagtaatgatgtgaaattggactaatatgatttagggtttgattaagttattcattggaggataaaattatgacaaattcgtatagttaactttgggtttggttattgtttttgtccaatacagtatttggattatcactcgcgttagaagagatctatattaatcctgatgaataatacgggccttatatggtatttttgttaaccagtgtaatctaactgtaagcatatttacaaatagctttgtttcaatgtatcatgggtactctaaaatgcaagcacttgctgactccgttcttgtagttgcaaagaacattatgaagaacatctagcactagagattgaaaataacagagccttctcagtgtctccatccattcgtctttgtaccaatttgattaggtactctaagaaagctgaatcaaacggtaatgtaattggtccaccggttgggaggcgaaagtcttcttcagctatcttcaagagctctttgctcaggtagcttgttgcaaaacaaagcgtgtgttatccgccgtgtaaaccacaaaacaacccttctctacaggagtagtacttgatctttggaatgagattcttttcctgtgaagagctgctctctgttgccatttcctgaacatcttgattagcatctttgtgttcatcattattctctaggaaagcaaaaaaaaatattacttgaaagttgtgttgcagaaatctttgtattagtgcgagctgtgattgatgaagaatgttacaagctttgttgtattatatagaagaagatcttaatagatttagacagacttttgaacttgttgactattaagcacgagtcaacacatccttatgtttctactctgtgtgatcagaactcataggggtcctaagttggtaatcaatcatgtctgcaaattaacttgtggactatacaacttcgtttgagaacttagaaggacatgctcatgtgggtatcaaaattttatatggacatttatatgacaagagttaggtactaatacattgataaagaatgcaagaggcagttgctacattatatgagtagttgataacttgtcaaacagaacaaagagtagccaaagaccaaactcatgtttgcttaagggtcccatgatgtttgttagtagttccatcagctaaatcaaatgtgggtaacacaaataatagatcaagtaattaaattattcagggaacatcaaatctggttataatcaatgatagatcaatacaatgaaacattttaaaatcaagctgagtactactatgttcttgaagttgcatagagaattgtgaggaacatacaaaaatacagagagacttgccattaagcttactgagcaagttaatcatgtgtactatattagtagtgttcttgtgtctgcaaataaagttgtaaaccgcatctagcactaatgattgacattataagatggttatatgtgtctccattcgttggatcaattgtccaagaaaacagaatcgtaatggcaaggtgattgatccaccagtcaggaggctaaactctttcttcagagataaagatttgtaagctaaactttacaaaaaacagaaatttgcgaaactctaaaacacaagcaactgttgagtagcactacaatgttgttgtggttgcaaagagcatctagcacttgagattgaccataacagagccttttctgtatcttcatccattcgtctttggatcagtttgatgagatactctaaaaagaccgaatcgaatggcaatgtgattggtccttccgtcgggagaccgaactcttcttcagatattttcaagagctcttggacaatagtgttgcttaggtaacttaagggaaatgaaaaacggatcttatcagccgtgtaaaccacgaaacaacccttttctacagttgtttggctgctagtagtagtaatacttgatctctgaaatgaaattcttttcctcttgagggctgctctttgttgccatgtcttagccaacttcatgagcgtctttgcgtttatcatcattttcagggagagttaaagcttgagattggaaagcaaggtggagaaggaaagagataagattggtgagttctgtttgtagatctctttctggttgatgaggaacaaccaataagctttgtttcattatatagaaggagaaactattaggtttagacaagctcctgagcaatccaaccagacacaacatatgtttcaacaacatatattttgtttagtcattatcgatccagacatgttccatataaccatgtcccataaaactaaacatcattttctaattttcttataaaattcaaatactataaatatttgaaacttcaaaaataataattaatattgatctaaactttataattgtattttgattgttatatctaagatttcacatgtacaatatcatcccgtatatcgacccaaatccgtcttaccatataaccccgtcctatgaaatttaaaatcattttgtcatagttttataaacttcaaatatttataataatagaacttcaaaaaaaaaattatttcgatccaaacttcatttgattgttatatttagaattttgcatgtggtatatcgtcccatattaatatcttttttaagtatgtataatgtttgattttataatatttaaactttttataacgtttaaatacttataatatttatatcttcataaaaaatataaaattataaatatttaaaacgttttataaagctaaacttttaaaaagttaagtatttataatattttgaaactttttaaagtttcaatccttacaaaaacaaattaccgtagtaaatcggttaacattcttaattttggatgcctgataaatcaaaatttctactcattcgtattaagaatcattttgatcctttttatagtatgactttgaaccactgcctaattttttaagcaatgtgggaccttgtacacatattttgttttcttcatcgattgagtaatgtatgtcagttttttaaaatttgaattacatcatatccaaaaaaatctaacatgtattaactgtatgtatttttatataaaatcaaaataaattagaaatgagaacaaataaaagtgaaagaagaatttatatatttatatttaatgtaggtaaagagagtttaggaaattagcaattaatcgaatgtagtgcaataaagataaaatttaattaaggatataaatttaagataatatattcttagaatagattttgtagggactaaaaactcaatagtatttacttttggacaaaaattttgctgggggatattttgtgcaataactcaattgtaattattcacaaattggatgttaagaaagcaaagtatttatgtaagtgtttaatgttgattgacgatttgtaagttttgtactttaaaatattttgtttacagattttttgtagggattaaaaactaaatagtatttacataaaggatttttacaaaagcttcaccaaaaatgtataagtagattaagattacctcaattctctaacccaaaggcatgattctctgtgttagacacatccccaccgacgaccgttggatcaaactctgaaaactctttctcatgacttacagagcttatcaacttcaaattaacgcatactcctaatttccgaaagcatctgtctaagtttcttcagttccagggtgaaatcattacgattatcaaccttcagaagctttgtcaacttattgacatctcgacgaaagaagctttgtctcaacaatgtcaacgcgtctttcctctcatctggttcaggcgcaaagcaggtcatgagaaagagttttgcatcgcaaggaagattaggcggaaacaatggctcgtaacacttcatgagatcttctagttcatagttagtatgccaccatggtctcttcccagtgtacatctccaacacaacacatcccaacgaccataagtcaagtcctttccctatctccccgtgagagatagactccggcgacatatagatccgtgttcccgcatacgatttaagaggatgccaccacttagtgtctccatctcttttcgacaacccgaaatcagaaatcttcaatttgtaagaatatctccacgcgccctccttgtagacagaaccagggaaaacaagtatgttctcgggtttgatatcgtagtgaacatagccgtatctgtgaattgtggccaaaccctcgagaagcatacgagtaaactttctgatcatcggatcaggcaattttctgtcgttgaatcggtccatgaaattgttcaagcttcctccggttgcatactccataggaatcatgtactctacgtaacccttgtcgttaaatctctgttttactccgttaccgtagcattggacgattctcggacagcccttgaatttagacaggatctgaaactcttcgtagagagacttagcatcatcagaggttttcacagtggcgtagagagtctcaccgtcgcatcgtcttttgtaactgaaaagtctcaccgatccaaacgaacctttcccaaatacctttcgaactccaaatccaacgccaccattgcaaatagaacgattgattcttttgatagcttttggcaacaaaaccctaattgactgaaatatctgagaatttgtaatagcttgggaataaagtctcaaacaaatatataagccgagaactaaccgacttcattcataatttccttttttattttctgtttttaatttatttacatcgaaatagataaaaagattttccttttttttcggattataagaaagactcatatataagaaagactcatgataactcataatcattttgtgctcgaattcaatattatccatttctatttctatatttgatgaaaggataatacacatctccattaacaaagtgatccctcaagcgaggaagccagccaagttacttaggaatacttcaagagagaaccgtgtcagaatatagggcaaggtttgaagttctttgtctgaattcagtgaacttaccgggacaaaacttagaggagatattcttacaaagattaaagcctaatttacaagctgtagtgatgcaattccaacctaacgggattgtagacatgatggatttggcacagtggcttgagaaagctagtgaaaatgatcatggaacaagaggagatacaagagcaccagtttcagggtttagaggtggtaatgaagagttaatgtgtctgaccattgtgcaaggtaatcaagaggtccttagtataggcggattgatgaaaaacaataagctaagattttttggttctatctcggagcatcaagtgtctgtgcgtatcgcctccggagccacaaacaacttcatgtctaaggatttggcaatttaccttaagctgccaataaaggagaataatcatgtttgagttgtattggggcatggacggcacaacgagagtttaggcaatgttctgggaataagattgttagtccaaggagttgagatccttgaggattttctcgtactagacgtggacaaagctgaagcggaagtgatattgggctatagttggctctcaaaactaggagagacataaattaattggcaagagcattcattctcattcatccacaaccaagagtggatcaccttcagtgataaagatcggaagctaagcactacaaaagtaaagatgaggagtgaaaatgagcttaaagaagattgtggaactgccgcttactactaccttgaggacaaggtagctttaaaaggagagagtaaggctaggggtagaggaatagcccatgatatagagtagaagcagaataagattagtgaaagacaaaagattccaagagcaactggtaaagtccaaaacaaagatgttcaaatggaagattcttggtttccacctatttggaccatggctgatcactatgagtggtaagaataccgattcaaaatcttttccaaaatttgtaattgtcgagagcgagccggaacagtcacaacaacaagaaactcataaaagcatccttgtggatattcagaccaaccaaattgaggctgccttcttggttgagaaacattatggagagactgatgagtacctacacttatgggttaagatgagtgacagtcaagctgggcttgaggctggaactcctacaaggataccgaataaggtccctaggtactacacgatttcggagggtaacttctcgaaactggtttcaccaatcaaggagcaaatgctgagatcacaagctgagaagaaaagtgagggatacggtggaaggttactctagaagagtcttggttaatcatcgctggtaagaatattacagaggcaagatcagaagaagctaagtcattctaccgtggagttcactttctaccaccatgaggacaaggtgattctcattggagggagtattgataggattgcttcatgggcttcatgggcctcatgggcctcgtatgggtattggtttaagcctgtctttccttagttggtattgctatttaatgttgtcttgagtctttgtaaacacttatcaagaactaagaatgtttatcttcatctcatctcttcttcttcctttccttctctgattcttctacttctcatctctatttcttctgttttctcatcaccttctgttacttcttttaataagtgattctgaccttatcagaaatacacaatgcttatgttttgatgtgttggtctttgaggaccttactccctagctggagtgttccaaaatctttgtcacattagtgtctcttctctatgcttcatatcaaccattgtctcctttcccttgcctttatgtatctctcatcacttgttgagcttgattcttgataacaaagatcgacaaaattggaatataaggactgttgttggaacaaaatcaaatgacttcgaacacaattattggatcgtaaaaggctttgacagaggaaggttgcaactaggcgtcgacattcgggtacccatacccgatccgttcttttttcgggtatcgggtctattcgggtagagggttgagaaccgttcgggtattctaaaaattcggtttcgtttcggttcggattcgggtcggttcggtttttagtagaaaaacaaaaatacccaaaaataaccaaaaatatccaaaatattttcgggttcgggtcgggttcagttttttactcatatatactcaaagataactgaaatacccaattatccaaaaatacattggttacttttactcaaatataactgaatgtaacaaaatacttaaattaccttatagaaaactataacattggatacttttatcccaaatatatccaaatgtatatgaatgactaaacaaaatttagtatattcggatttataattttaattttgggtatttgaggtattataagtatatatagaactcatatttgtaggtatacatttgtattcgggtacccacgggtattagattcagttcgggttttttcggatagtgagatctaggacccattcaggtaattctaaaaatcgggttcggttagaatatttttagttttttttgttcaagtattcagttccgggtattatgtccaggtctagttggagcattttttacacagaggaaatgcttgtcgcaataataagaataaggattctatgtatgttgtttaggaccatagcaaaagctcattataagataagattacacttttgagacaattgtcttgtatacaattttcttcaatgcaaaaaaagggatacaaatattcgaaatacatgtaagaaataatcaattggatcgtaaaaggaacaatcgtcgactatattaacccacactctttttcgtgagagtgttaaagatgttgaaaggtcgaaaataacttattttctttattagaaatcgcctaaacaatctatgagatatgtttaatcagatttacacgatgttgaacacaatttgtcactcaccaattcctaatatacccaaactcacaacataacaacaacaatgtttctctctctattcactcacgaggaaccataattagcttctagcctgtacttgtgattcaccgagatgtgagataaaacggccacctaaacctaaagtttaacttccgattatataggtaacaacacaagtgtcattaacctattttcctaatcctaagatatcttcaaatcttctttactttattttcttatatcttgaataacttgaatacttgcatatcacgttgtggaactccaacgaccaatcgcagctcgccacgtcatcatcatttaagtttcgctgcttctcgcgtacagctccttcttgtgcttcacagaatcgccttgtactcagacctccatatgtcttcacttcgttcccttgatctcaagctattgtcgactgaatggtctcgacctctttaggacgccaccatgacttctaaacagagagcaatccttctccatctttggaatatgtcattcttacattccatttcatcgatttcaccatcttctcaatttctcctatagtttccatgtcatctcttactatgaaagttccttgtggtctacgaatccggtctacttcagccatcacgcccaccaagttgcacttaaagagattttgtttatacatagccatcagagtttgcaatcaagaattatagagatagacaaaggagatgaataaatgtgtatattcttcaatgtaactaactaactacttcgtaaaacagtaaaaaatatattagtcaaaagatattggcgtcgggttttatacataaaacctatgtcagatacaaagatgaatgtgatgcccatgaagcacgaagataagtcatccaactcattccaaataggtttgacccattcatgttgcagaatcaaaaggataaaatatcaaaatttaatgacgaagaggttaagacattttggttcaggaatgtaatgactatgaaagaagaaatgtaactatttcatactgtttttactctaaatttcattagctttacttttcattcatcttttgtgttctagctcacatagtttcaataataagacactttccaaaaaaaagtatcaactcgttgattcttagttcgatttagtggttttactgttttaatatatacaaaaacttcgactacgagatttcaaaatcacctcaactgattctaatacgtaactagaatcaatcggtatagtattctggtggtaaaaaattttgtaccctcataattttaggatcaattatgggattgacacaataaactccgtgtctttgtgaatttagaaacatctcaaattactcaccaaattaggtaattctacgttctacgttctgactattttacccttaattttcctaaacccaacccaacattaaattcatatgagcctctgtatttcttattttctatcatatacaaacggaaatgaattcatgaagatgaatttcaaatttccagaatttatttcctcatcactgcaaatccggaaagaaaatcaccgctaccatatttgcatctttatttcgattttggaaatcaaaagggagaagggaagccacaaagggtctagtctctatcatcaccaatctcaaacatgtaaattttcaatttgattttgaattaaagaggttgattcaattgaattaaacatgtagaattctatcatcaaaaatcgagtttaagttaaacatgtaatcgaagaggttgattcgatttaattccccaaacatgtaattgatttaatatgtgtttaaaattggaaatcttgggttccctatacaccatcttaggatttagatttcctttaccaaaatatatgtaattggatctattgggttcaaaagttaaaagaaaatcaatgatgaacgaacattatggaaaaagcaaaaaaaaaaacagatcgacgaagaatgaaaaagaaaggaagagtgagggtaaaactgtcactttaccaactaaaatatgctcaatttcataagcctaatgaaatgtgttctttctctaaattttgggttaaatatgcccaaatctgtaaaagcccccataattttatggtggtaaagaagtcatagatgtttttctaatatcaatttttaaaattcttatcatcataaaataaaataaaaagtgcttatcattgtttaacatgtatactatgttttaacatatattttagtttttgatactatttagcttagtatacgacaaactaaccgtgaataccgtatcccataactaagaatttgtaatgattttgtgaaggggaaattaggggtaggttctccgaataaatcaaacatgattaagacttaagaattgaacgggacttttatatgaacaaaaagggttaatctcggtgcggtatttttaaatctcaatgagcatacaatgctagagttttctaatatgaattgaatgaatctttctcttcttcttatctcggtacttaaaccactagtttttgcttctggtccgtttcccccggctcgtggcgtaccggtttcttcagatctcgcctcaagtaatcctcttctaatatttcgccagttgaatcttttcagggatctctaactcgatcatctttgatctcaaagtttgttccagatgcacaatcgagccgccattatacggcctttcacttttactttcttgcctaatcagtcataaataccaagctagcgagctttgttaatggaccattttgtgtcaaagcctagtaccaacactaactgaactgaaactgaacaaaaattctaaaatacttgaatgaattataaactcgaaaatcaaaataaccataaccgaacaaaaatatgttaggtatccaaaaatatcgaaagtacctataatcagtatgtattcaaaagatattattatttttagaccgaataacaaaaaatatcgagaatacaaaaaaaaacctataaaaaaatacttaaatattcaaacatatattaaaaacccaacctatcccgaaaatatcttacaaaacacccaaaaacatccaaaaatatttataaataataaatattaaatggattatgaactccataactacaacaaaaacgtcattttacatcatttgttataaatattgacattagttataaatgatgttaaataattttgcatcatttaaataagtgacttaataattggtgatgcaaataatttacatcagtttattactaattgatgttaatatttaaaatatttacatcgattactataattgatatcaatatgtatcaattgctaaaaagtgatgttaacttttacttcaatttatttaagtgatgttaatatttgtttcggttaaaataagtgattttaaaaataataatatatttaccgaataataatttttagaataataaataattattttaaaaaatatattttccaattattcttttatttgtttcatttttaatatataataaatcatggtagatattttgtcccaaaatcactcgttgcaatatctacaaaaatcttttcaagattttataaaatattttcaagattttataaaatattttcaagattttataaaatataatttttaagaataataaattcttataacaaaaataataataattgggtgttcttcgtgtttaaacacattctttcagtttcatacttcttccttccagtaattgtttgttcttcttggatcttctatttcttttttttttatatatatcatctcttttccatttgtggaatcaagattatgctgacttgagatcccttgaatcattatcccacttaagttttttctctacaaaatgaaaaagagattaattgtttggaaatttataaaatttttaggtcggaattagaataagcatttgtaattgaattgaacataaaacaatggaatgcctttactttatgcttctccaatatgtgtaggaaacacagttctaatgattagcaatgcatatttgtattaattatgcagtgttcttctgtgtttttgacagatttataaaaatagaagaaaagaaaaaacctgagtgatggttaggacttaggagagaaagatagaacgatagagaattaaaaagtacagatgtgtgaaggtgaagaatggtatgaggattatgagatttcaaaaactgatttacagatattataagaacgtcttttggagatgacataacaaaaaagatcgtgaacgtaaaaataggatcgtgattaaagaaataaatttatttaatttcgctgattttgaggagaaaaagaaattaagaataatgataaatctaataatagtatttatttatggaaataacaattccgtgttatttataacaataaattatttaataatgttagttttttctaataataagttcttagcatcactttctattgatctatattttgtatcatttttaaaaatgatgttaataaaaataagggaatacatcggttatcttaattgatgtaaatacatatttttgtatccattttccgaagtgatgaaaactaatacaaatttgtatcaatttgattaaactgacactaaacaaactaattaacaaatcacttattagaactgatgttgaattatttattttgtgtcatttacttataagtaatttaaactagtatcatttatacttctgattctaattaattgatgtaatccatcactttttttgtagttaaccgaaacgaatttttttggtacctataaaaatcataaactctagaaacaaaagaaacacccaaacaaaatgagaccgaagcggaaccgatcattcctaattttcaattttcatcacaatacttacgaatataggaatattgaaatggcgtcataatgtgtgagtaaaaaagaaaatgtatggtaaaaatatcgaaacgagagagagagtgttaaaagcaacgacgtcagaggggaaatccaaacccataaaacatgggggaacgattcacttccacttcgtcagaactaagtgacagtgaacttcacttttttttttttttcttaaaatgaaatctcttttactaatacatcttttctattactttgtgcgacactttctttttcacatatcatgaaaaatctatcatctaagattcgatgctcatacttttaaacatgtaacaatcaaacttgaatttaccaattaccaacgtaaaacatgatttttctttactgaaatttactttaacaataatttgcattgctttcattttaagcaacgaataaagataattatagctatattcaaattagtataagtatacaaactcatagcacatttttattgatataacaatggtccatatagatatataattgttacccatgtcgaccaatgggaattatcctatcataactgctaacttttaaattaaaaaagaagttatatattattgcgtcacattgactatatagtctacaaatatatgaatgttataagatacatagatcacaaagatttgttttagtaacaaatgggcaaaaaggggaataataaatgattaaacagagagaagaattgcatcggaactctgcaatacacaaagtctctgtctctctatctttggtgatgagatcttttttttttttttctcttctgagggtaaaaaaaaaaaagagagagaggaagaaactcgcgaggaacacgcaacccattcctttctgtgtcactgtctccatcaactcatcatcatctttcatttctcttcaccattcttcttcttttttcttttctaaaacactttctatttcatttcttaccctttcaaaatcaaataatgcggttttgtatttgaggaagtaaaaaaaatacataagtacatatgtttataaactttgctaaacataataaatcatttgggaggtttagtgcctaacctaataatcggatggagattagtcggtatattctttccgtataattgtgtttttatattaaattgatgtaagaattataaatacattttagacgtaatatttagtattttcagtttaagtgtaattttctatattataccacacatatatatttatttatataagtattatgcatatatttcaacaattcatatgtaaaagcggattttaaaataaaaataaaaatccggatatgaagatgaaaactttgaataacttgctttatgaatcggatcgtatttttgatcatgaatattttcctcaccatgtagataaaataaccaaattaccgatttgttttcgaagataactgtccggactgatttgttgtgaagataattgttcggaacaatcaattaaaacaatttgagttctgttggtaccacattttaacgcttcttattttggtgacctagaaacaaacgttcacataatggaatttccaatatctatgataaacaaatgattgtaaatatgcacggaaacgttcttaagcactacttggttgataaaatatgtttgatgttctttttagcgcatttacatatacgcatggtgacatcacaatgaggtaaaaagttgggataaaatagtgagacttgaacttggattcggcggcaggaagtagacataaactgacccaaactcatcacctatctttactgtctgtctctattacatacattgcgtagtaaactgtttcattatttatatggaatgttttattaaaatattataactactcttacaagctacccaattgtaaattaataatctgatccttctgtcatgttcaaaggtcaattttgtttctttatgcataaacaatttttaattatctaccaacaaataattagttggtctatttcactatttctataacccaattacgtcgtgagggttggaattattgagaaatatataaattatttcattaactgcaaggtctagctatgtacacatgcgtcttgtatctactacatctccaaaaaatatttgttttaaaaaagagaatcatttaaagtaatggaaagacttggtgatatgattgccattttacttcttatctacatttaaagaaatcccacttcaagactcaatcactttaataccactcccatctatcttcaagctaatactttttgtattttcgtgattttattttaaatactaagatttttgcctcattttatcaaacacttgaaacccacactatatatgtacgtgaatgagcaagcagaagttattgcctcctcactctctaacttgaatattttattcttaattctcttcttcctctctacacacccaaatctcttctccctcactctctgtctctctatgtataaaatataatatgtgtgtgtaagtagctacatatacgtggccatggagattatttggagtttgatgatgcaagagagaaagtaatgggtgagtaacacttgatggagaagcagggcacgtgcgaacacaaatgaaatcgatcggtacttgttgatcatattttcgcacgtgttctactactccaacacgtgtctctccccctccccgaggatgcaatcgtcaatggatagaacagaatgtaaataaatttagcgttctaagtttttactttattagactacatcatgcgtattagggtgtatatatgagacatgaagttaacattgattgttactccactttttgtgttacattacttttttttttttctttcggtaaaaggttatgtgttacattacttgagtaggcagtggtacgtaataataatgcatacgagtataataaagtcatgtgatatagacatacacagtagtaagcattgatatagtcatttctcataatattaatatgatagaaatgtttcttagagttatttttatgtaatatagatatcattgaactgaaccaaatgaatttccgtcgagagtattgaaattgcgacaagacagctttataaaaatctttctctctaattactgttacggttttactagaactacttgtttctgttatgtttagtaaaattgttttactttacatgaatgatatattgatatcggaatattcaagtttcaagactgttgttaactctgacagacactatctgttttatttatttatttacttttaagtaatacattcaaaatttgagatgtataaatggataagaaaccttgatatatgtttcaaaaagcaaattgaggagagtgtaatagtaataatgtaaaacaaaaagttgaataaacgattttggctcacgtcattgttattaaaaatgtatgcatgcgtgaaaaataagtgtagggtaaaaagaagaaagtttgttgaggcaaagttgccttagaaagcgggggaatttctctctttcactcactgacattatgtctttgtgtactcactctcagtaccagtttattaaagtataaataaaatgatattgatgaagagaaacaatatatattacacgaagataaaaagataaattacgtaagtaatatactaatattgtcatatatttatggagacataaaaaaccaaaaaaaaaagatcttgaggtgatgaaaacgaactttttgcaagcgtcgttgttgtaggcattgcggatgacttaaaaataatcaaataaacaaagagaatgatacgttttattaaatcatacatatgtcttaagttatattttaaaattttaaatcatagcctcaacgaagtttgaaaagggatttcaattaatttttgcaaaaagttaatagcaaataagttcagagagatagaaaataaatgtatcatccaaatagaagaaatataaataaagaagaaaaaattgatgttaaaaaaaaaagttaaggaataacccgacccgaacaacccggtttagccaaaatctcaggactagaaaataatcaaatatgctggcaaggccaattcggtcccattaataacttatacattgaatatcataacattttttgtttttttctttcacaaattataggaaaaatgggtaaaaaaccatcaccaaatattgtgtaaatattttactaaattgcataacaatttataagttctttataatatacaccattcaccacttagtttattctaattatctacatatacatttttgcagccactttgtaaaataaatcctggagttgggatttatttacagtggctgccactgacatttaataattattttagataattagaaagaaaatcttctaattaaatatttgacatttaacaatcttcttaaaatctttctaccttaactacacgattaattactaaaataaaactttcaaaatatttaatatcatttaattactacaaaattatcatttttgatgttgcttttctgcatgattataatcatcaaatcgcagagatatttgatagcatgtaattactacaaaattacaaaatatttagacaataattcataaacatatcataaataaggtcaacattaataaaataaatgagttttctttacaggacaggttggcgggacgggtttggcaggacgttacgtaataataattataaactataaaataaaaatattttataaatagatacaatttacaatatatatattaatttaaaaaataaattgttcccccgatataccgcgagtttaaatatagttttatatacattttgctagactgcgatcttgtaatcttctgataacatcacaagttggatacaattttttttttctcatcatgtctcttctaaattttattcttttttcgttaacattttatccttcaacttaccaccctcgttatacttttttttttcatttaagaaatgtagtttagttttacatgcctttacttatgaagtttttaaactttacgatgggtattgtaattttgctaacctatttttaatatatatataaaatcaagagatttaaaaactgatttcttaaagaattatctatatggtaaatagttcatgattaatttaccagtcaacaaccgagattcaatgtctccagcaagggaaataatcacaaaaatattttgaaacaaatctttgactaccttttaataccatatcttattaatcatcacaatatttgaaaattatatatattattaaataattatattagttgcatcatgtttaaataacattaccagattgatatttattgatgatttttgctgttaaaaactaaatttgctagctaaacattttatcctattttattgttttgatgttaccactctataaatatttggactatagttctacatatgtcaatcagtagtgataatacatgtagtaaataagaaaaacggttataatctctatcttcaatccattcagattttttttataatgttcatgcattaaagcttgatttggaagtttatattttcttgtattaaaataaagataccctatataacaaatatttgtaccttctcagtactacataatactacacattaacaatctcaaaatatacaaaaaaacattttaatgacgagaaataaaatgaaacttgctttcatttccaacgattcttcaagaaaagcaactttcaaaaaagaaagaaggggttgatgaagaaagtacatgaactctcaactctatgtggcatcacatcgtgtgcgatcatctacagtccgtatgataccagtcatgaagtgtggccatcaaattctggtgtgcaaagagtggtttccgaatttaggacactcccggaaatggatcaacacaaaaagatggtagatcaagaaggttttctcaaacaaaggatcgcgaaaccgacagagaatttgaggagacaaagaaaggacaataaggagctcgagatgactgaagtcatgtttcgatgcttaattggaaacatggagatgcttaaatcagaatcacaatcagaatcaacaacaatggtttatgaaaatgatgaaccatcttgagcaaatgaagtatccaggagagcaaatggcgtttcaattcatggatgatagccaacacaaccacatccaccgtcatcaacaagagcaccaacatcatatccctggagaatcttccatcgctcttgatgtcggcaactcaagcgatatcgtacatagttcttgttctaagtatttccaataataaatggtttcgttaggattttatttaatgtggtattacaataatttcgagaatggattgataagtgaatttataattagctttcagtttttttgtcatgtaatagattgcatcacaatttatgtttttattgttatcagtttgatgatggtgatatttttcattctattttcacaatgatatgttgtttttaaatttagagatttgtgatactcttatttttattgtttcatttttccgtttatgtgttgtttttcaacatatgtcttacctttattaattctttaataacattttgagcagattagatttaaggtttcttttcaattttagaactgttgagattttatattttttctttcaaatataaaatatgacagctcacattttaaaaaagaaaatattttcgtttaaagtgttaagtacaaatattatataatatataatcaataatatacactgaaatgttaatgtacctaacatattgtaaaccatttaaaattcttttaaaaactcttgtaaaccctttaatattatgtgaaccattttaaaagtcttgtgaacctacaactcaatttactgttttattgtcttttaggttcatctactttgtctagcttaatattagtcatcataagtttattgtgttaacaacgagagcttagtggaatttgacccttaagtgctaacaacgatctcttatttgtgggagtaagcataaggcaatttgagctatatcaactccgaagcaaaacaaactacattacaaaaacattttaatcatgactatcaaaaaacaaaatccttttaagtattttatcaacacacacttgaactttaaaatcataataaatttatttttaacaccatcaataatattttttaacaccttctgacatatcaaatcaacttgatctagtagagattatataaaacaaaaaattatcatgcagtatactattacttaatgacaatcatgcataaattatttgcaaacttttatataaaatacataatcatattaaaatcacaaattttagaaaacaaatcatcccatggtgtaacatatcaatacctagttaatgctacaaatttcaagcccagacaaagatatacatttatcccacaagtgatgaaatatgaaaaccattaatggtataaaatcaaatagaatatgaatggatattcattagcaatttagcactaatatttttcatttagtcaatgtattcattctcatttatgggaatgagtggattttgattttatattttattatttctttaaaagtttaaaactcaaccatgtggagcataaattgttatgctttttaggtttttatttaaagtacaaacatatatatatatatatatatatatatatatatatatatatattatctgattcacaagtcacaaacaaccatagtagggaaactgatagaaatgttagatttgtctaattaccggaggagctcctccagttgattgtcgtctgattgttttccgttgtcaaactcaaacatctcaatagcatttccacatcttagcgctactttgttttcgacgtgacaaggaccaatcatttcccaagccgccttttcattcactttaatctcatcctccatagcgagaccctactacacggccatgtattgttttttgaaactctatccatgatcgtgtagtagagtctcattagggggatgtgattgaagtggatgagaggtcgccttgggaaaagattgttgtttgttgaaaaaggaggagcgccaagatgtgcaaatactttagaaatgtttgagttcatctgatagccaaagagtattgtcatggtactgttttgattatcattggactgtttttacaatatttttttagttgatgtcagatgcaagacaacaatttaaaaaaaaattaacttctgtaagaggggaaaaatgaatcccatgggaaatgatgagaaaagagacaatgaatcccatgaattctataaatattataaatctaacattatataaccaaatttgtaagtattttagtggttttttacttaattttgtgctatgtcaactcataagatagtttacaatcaccaaatacataaacattacatttcaaaaataatatatattaactttaaaaacaaatcgtctcgcagtgtaccgcgggtaaaaacgtcaattacataatctattattcaaatatacgaaataccctaaatatataatttaaaaaaaaaaaaactggccccgcggtacaccagggatcaatatctagtaaggatactaaaattgaaattattgtttagacattttagagattaagataacattgtaccctgttgaaaaaattaactaaataaatttatcgcactaaaagaaaagaaaaattaacacatgtaaaaaaaaattagaacgccacttgacagctttttagagcatgagtttgggaaaacctaactttattatataagatggttatccgaacaatgcctcattagtgatcaatttacattttatttcaaaatatttttaatagatttgtgttaaaaccaaaaaagaatcacattcatgagaagaaatcatagtaatcttagaggaaagttatagggaaagtatgaaataaagaatagttaagtttataaattaataatattttaaaaaatatgaatttatatttttgaaaattataatttttggagtatctacaaagaaaaaaagaaaaattaagtcgtcttgttttgcaactttaccctatctccgaaaaatacagatcaatcattcgaattcaaaaataatttgtaatataaattatttttataatcaatttataaaagtttcgcgaagaaaaacccaaatatacttttagaattttaaaagtatcagtaatatacatagcctttaaaatgtttagaagacactgataaaaattatattaaatattatttttaactttatatatggttatgcatggaaagtaaaattctaaaaatgctagttattgatttcttcttttgcagaaaatccttttatattggctcttttttcctactacatattaattaaaatatgactgtttaattggttttttcaatctgaaaaaaaatatttacattaaaaaatcagtataacttggttgtggaaatgacggaaaaaaaaacttggttgtggaagtcagaactaaacaattagtcttaaaactgaatttaccaacaatcaatcaaataatacagagagaaattggagaacatatctcggaacaagtcaatatcatctaaaaatattggagaaaacgagttatttaattgttttgggcttttggcccattagaagatattttgtaaatgttttaaacttacccattagacatcattgcgggatttttgaaacaaatctgaaagtttttggggtttatttcgaataaacaaacaaataaaggtcacttatgttatttattattatcagaaaatgacctgaatcacaaagccaaaaaaaaaacctaaacgcatcttcttcttctcactttcaaggatcaagagatcgcttcttacagttccatcttccaacattttactcagcagcttcaggtacgccattatcttccacagaatgagttttttttctggttgttaaacttttggatttaatccgttgagagttgaaaatgaagaggttttagttttatcttctctgattggcttaatcttcgttttcctggaaatgtaattgaagaacttagatacaatcgattctagcttgatatgaagattctctggtatttgagtgtatgtttgtggtttaatcacaaattgatgtccaccaggtgtttgctgaaatgtctgaaagaagtaaaatgctgcttggttttgatttaggatcttgattcctattggtttggttttattaaaccaggagtgtgagtgtcacattgctaataagggtttctctgaaactacttactcgcaaagatttggctttagatgggatggtcatttctcgatataatgttatattgaccattggaggtgtctctgcttatgtgttctttctgtattcaacgttgcataattcaattctgattacatcatttactgattccaagtttgaatatttcctcatgggctgttgttgatgcgtagtgtaagttgagtttttttcttagttctgtgaaagccatgtacatgttttaaaagggtgttatgctttgtttctcagatggtgattccaccagcagtgagaccaccacgtctcttcgactacctaaaaccttacgtgctgaaaatgcatttcacaaacaagtttgtccacgcacaagtcatccactcaccaacagccacagtggcttgctcagcgagctcgcaagagaaagcattgagagaaacaatggacatcacacgcgacgtcgctgctgcttcaaagattggtaaaattcttggagaaagactcttgatgaaagatattcccgctgttactattcagatgaagaaagaacagaggtatcatggtaaagtcaaggctgttatcgattctgtaagagaagctggtgtcaagttgctctgaagattattcaataatctgaatcagtttggcaatgtcgtttctttttccggttaatcggacaaattgagataagattggtgccacatttttaaagccctgcttttaaaatccatgttacaagataatgaatgttataagctttgactatggaagtaaaatagattacataaatttaatgtctttaatactattctgcgattaatggtgttttcttcacgagattaatcaataaagtgagattctttttgttctaaaaccataattgacggagtctatgcaattgggtaatcgggtcgacccgtaatactattcttcctctcgggtaagacttgtaaatgttgaacctttagtcacgagtactcgtctttgtcttttgtcattttttgcttcgagctaagatcagtgaagagaaaagatgggaagatgtttaacgaagaaggtgtttttgattcagagtccgatcttgtttcttcatctcctgatctctttatcgtccggttagtattaaatcttagggttcttcttttgttgtcacatttgatctgttggttagatttcagaaatgggtaccgaagatattgaattttataatcgaaagtttcaatcttttttgtttttgtcatttggatcatcttgactcgtttgatgcaaagcaacttgtttaggaattggattttgtgttgttcctcagctatcttagttttgggattgttaagagatgggactttggtgaagtgttcattttgagtgaagtgttcggttttggtggttgtgtttgcttaagaatggttgtagaacaatgttttcaggtgcagtgaaaccggatttgaaaggagtatgtgtttctaaaggagggaggtttccgccatatgagttggaagggaagcctcctaagtctgttggtaggggatccaaggatcttactctgtgccgggtgtttcgtaaaaagacttgttgttcttctgttcagactaacccggctttcgtagctgttagaaacctggctacttatggagaagctagtcaagaatgcttggagttgtttgagttattggagtgttcaatctgtaacccaaatgttggaattcaaccgggtcctcctcgtatatgcgcctcgttctgtgacagagtctttgaagcctgcaaagatgcatactttgccagtaatgcacttaaacgggtaagaaaaaatctcggtgtttggaggattttgataaacaaatggtaggataggactttttctttctgtagatttttggaagctaatggtttcagtatctgcttaggtgattggcccttgtggagtaaacgacgacataatctgcattaaggcctcaaattgggaatccaatggcacatcattctgtgaagcagctggttttgctgttcaaaggaatgatgattctagagaaaaaccgtgctacggaagcaaagcaagtctagaatcagtagtggaatcatggtcaagagactctcgaaaggagacgcctttaaaaactgagactttgtcatgttttaaagatcttctccaatgggttcgcgaaatgacaacgattcagaaaatttctttgggaatgtcgtttcttatagcaggaatgttcttgatcaggtctcacctttctctcttctctctttaagtaacctccaagtaacaacaccatactaacacttgctttaggtactacaggcaatctaataaccgtaatcagaagcagcgactagctgcgattcagaggaccgctagaagattgagagggaacgggaacggggattcatacagtgcagctataaatagaagaacaagctctgattaagcttatggaatgaatattttacagtagtttgtaaaagccatgaatttaactgttatcaatagtaaaggcttgtctcatgtgaaattttgccaaatgcgacaagaagtgtgttgtactgttctgtctttttatactgataaaattagggacaagtaaaatataactttggcaatggacaaatgaagaaaatgtggaatcttgacgatatgcaaaagggtttgtacaacaaggaaaaaaataaccgagaaaaaaaaatctaagtggtactatattaaactaaaagggctaaaagaagaaagaaaagagagactaataaggagataaaatctccagaagcagaagacagatcattttctgcatctatacaaagaaaacaaagtgtgtttttgttttctcactttttttgtttttttacagaagttgtttgatgactaagtaagtaccctttgggttcttcattgcattcaacccataattggagacacagacacagttgtaatgacactcagaatcttgagcctagcttgagctgtggaaccgtgatattgacatagagaggactagatattcaagacttccccatcttcggtacctgataaagagaaatgtagagaaaataggtgttatcgtgtgcggaaacataaggagcgttaactctttgtggcctaaccaaattgcaatagtgctcccactgcttaagattgtacactttgaagtccatgctaagcactcaaattataacctaaggttctgttgtgaaagtcctataaggtttttcagaaggtttcaagtttcagtttgttcttacagaagaattgtgttataagatgggcttaaatctatatatctttggtagaaactaaccttcttgagaggatgactgcttgaagctggggctggtttcataatctcaaaggaacatacaagagactcgtcaacgcttaataacgcaccagcgttgtcaaactccccaccatagtttggagctgagaatatcgtgactaatctccgttttgcgaaaaactcatacccgtcttctactacctgcatcacaaaaccattacacatgtccgatatggtaagaattcaaaaagtctctagctttatggacaaacgctaatcaaaccatcaagaacaatttcacaggtttcgaggaggtcttgtttgttttacctgatggcctcggcaaatgaggtcaagatcattcttatccaagaactcagcgactttatcagctccaaaagtgcaagagatacctcgatcactatcagcccaaccttcaatcttctgatcaggatctgaccaaagtaaatcacaaagaagaccactgtctggaatctcaataggcctttgaatctctcgaatctgattcaaattatccaaatctggtgacaaaccaccgtgcatacacagtatcttctcatcaataagtgcagctacaggtaaacagttgaagcaatcagtaaacaccttccagagtcgtacattgaatctccgtttgcactcgtcataaaacccgtaaatcctgttgatcttagcatcctcatggttccctctcaacagatatatcttcgatgggtaccgtatcttgtaagcaagaagcaaacatatggtctcaagactttgtttgcctctgtcaacgtaatcaccaaggaatagatagtttgctgaaggaggataacctccgtattcaaacaacctcaaaagatcttgatattgaccatgaatatcacctgagagaatccacaacataactttcaatacccaaatgctcaaattcataaataaaaaaaaccctaactttgcaatttcacccccaaaatgctcaaattcataagaaaccctagtttttcaaatttcaccctaattaatgattcgatcatgagaatttaccgcagatgcgaattggggcatggagatcaaggagattaggttgagagaggaagatttgacgagcgttaaagcagagttgacgaatctcgctctcggaaagctgaacctgtttgcctcctttaccttctaacaatcttcttataatatcatccaatactcctttctccaccatcccttccatactcgtcatcatcgtgttctttctcttcagatccctaaaatattttctcaccaaaatcaaaacttgctacaagggtttgcgccagaaacaggagaggaataatgggtcgttgttggttttccgatcaatgaagagacgatcggagaaagtagacgaattttttccagagaaaatgtgggtcaaacaaagagaagaagaaatctattttgtcttaaaaattcagaggaggaaagttatcaaaatggaagagataagaaaagaacaaatccgaaagaataaattataaaatggggaaatttaataagaaatccaaaacttttgaaagtatttcagaaatctacattgatttatataagtgcaaatacacccaatcatatattttttattggtccacttggcatttcattttattttgttaaattttaatagtataaatctcatatatgtatacattaatcttacttattactgttttgtataattgaaatttattttttccaagtggggaaacgtttagtattagaagaaggtcaacacataatttattaggtcaattaatagaaataaattgaagtgggccattaattttataattactcctaatttatgtttatggtttttttttacaagtgagatgcacaaaccttgaagaccaaacatgaacttctagaaaactacaaaattaatacattacattttgtttcattataaatagtaaatatatttttgttatatacacattaagatatcaccacacacaaaccaattaacattcttaaatttttacctcattttgtgctcacaattctcagcatgtaatgagtttttccaatcttttatatggtataatttttaaattttcagaagtgggatgatgtacacatttggggtcaagaagattctacaatggagaagtaaaaagttgcatcatagattcatagtatagaaaaagaatggtaatctaatactacagtgtgttatttttgtaggtttggaagtaagtaaggatttcaatccatttttgtcataggtaactatgtttattaaaggttcaattggtacacatgatggtaagattaagtgtattgataattcatacgtctcaatcttttttatatatatcatttttgtacttcaaattctaatagtaaagatttcgatggctacaaaacattttctagatttgttgataaagtttcaaaagtaaacaattctaatttccacaaaataaacaaatggaactcccatctttattttttcgttactgatatatggttattttcttacattttgtgaaaatgattttcatatatacttgaatatatatataacaatataattttttctaagatttgtttttcaaatatatgtgccttacctctttttcctatgtatttttaatataagcatagtaatcatatttatttttttgtaatccaacataaatattattaaattatttttacagatttttggtcaagatttttatttttccaggaaaataaatttaataaaaacggttagataattagcaattcaaatttgaactcaaaatcatataaatgttaacattaaaatagatttatccctctcactcaaattgtgtgaaatatgtaaaaaaaaaaaggttaaatgtaagaaaaaaaaaattggataaaaaaaaaaagaacaaaagaatttatgctctttgctaattaagatattactaagattcaaatttcgatgatagaacttttgcgtaattgtgtagttacaacaatgcatgtgctatagcctttattatttcatatctcttaatccacttcaacagttggcttcaaatatcttatgcagaatttaattattgtttaattattgtatgtatatcacatgtttgaaagtcgtaaaatatttaagtgaagtacaattaagatcatatgtatttcactattttgttcttgaaatttatgatccactgagaaactgtgttcgctagtattttttacgaaaaaattactttcatcaaataaaattttatgtcacatatctatatatacatttttgcagccattttaataaataaatcttggagttggacttatttacaatcctatgtcattagcattaaatctttttttcaaaataattaattttactttaaattcttaatttaaattgtcaatcacattatcaatcaaatttaatccaaacaaacttcacatcaatcacttaaaattagcataaaaagtattttgttaacaatatttttaaacaaagttttttgtttaaataaatattgttcttactaaacgttttttgtttaaataaacaaatcatgtatttgaacttatttacaatgtcatgctactgatattaattatttaggcatgaaaatatttaattaaagatttaaatcttctaaattcttgcttttagagttattatatcattacctaaaaggcaaaaaatattaattttttaattattattatttatagatttaaaattcataaaacattattaatatttaaatttataaaaagtttaatatataaaaaaaaaataacatcattatataatatatagagtttaaaacatctcaaaaacaaattcatcatattttgtgattcgaaattttaagaatgaacatatattaactaattggcgaaaaatgcgtgggttcaacgtcccgcaacgaataaaatattttgacaatgattcataaacatattataaataagatcaacattaataaaataaataatttttttttgtggatggatttggcgggacgggtttggcaggacgttacttaataacaattgtaaactataaaataatttacaaattttatatatattaatttaaaaaatgaattgtctacgcggtgtaccgcatgttaaaatttagtttctatatattttagaaacaactttgaatttatactttaatattgaataaacaacaccaaacccccattgtccaattttgtctgcatctcacattatttttgtccaatatcttaaaatagttccaactttctagaagattaccctcattcatcaaatgacctagattctcatcactcaaaatatttttattattcatgttatccattttttgaaataacagaaaaatagaaaataatcataagaaaccaaacaaaatatacacaacaaaaaatcaaatcataaagctttaaatacatataagtgaaagatcaaatcataaaactataaagacatgaagtacctaaaacataatatatgctaaaaagaaattcaaaatacaaaatcttctacgtatttgaataattcatccaaacctaaaactgtatatctgttcacatatttgaatgaaaaatcaaataagcaaatcaagcaagaaatattaatgatgtctatgtgatttttttttttgtcaaactgatgtctatgtgatcaaaatgcataaatacaaaattgtaaaagctaagtataaattatggaagtaagaacatataacttatgatatgttcaaaataattggcaccattatattatatctactggtcaattccatgtcgaacacataacgttgaatgttggttggatcaggcaatggcaaatgatcaatagcgtgctttgttccctgcatctgaagtcatctacttggaaatgatagaatctgatcatcgtcctgcagtcataaagatcaaacgatccactgaacaaggtataaggccatttcaattcgatacacgtttatgcaaaattccagaatttgaagacgttgttcgtcgaagttggaataatagtatgggggctgttaatctgtctcttcaagaacggatatgaatgtgcagaagagagatctcatcttggaaaagaagtcataacactaattcggcgaaccgaattaaagagttaacataggcgcttgataccgcaaacacagactgctacacacccctggctcaaattcacagcctcaaaagggatttgttaaatgcttacagggacgaggaaacatattaaaaattgaagagtaagaatcagtggctagatgagagatcgcgataccgggttttttcacgctgcaacaaaaaacaggattacaaggaatacattaacgtctatacaagatgtgaatggaatggatgtacatggtaacagaaatattgctacagaagcaataagatactttactgaacttttctctaccaattcccctactacaatatccaaagctctgcgtaacatacatccagtggttactcctacaatgaatgatcaattactgaaggatgtgtctgaagatgagatacgagatgcgctattctccattggaggttcacgggcacctggaccggatgggtttaatgcggtttattaccaaacctattgggatattgtgggctcatccattgttgctgaagtcaaaacgttcttcaatactggaacaatggataaggtgtagaatcatactaatctgtgcttaataccaaagattgagaagcccgtaacgatgaaagactttcgcccaataagtctctacaatgtcacatacaagatcatttcaaaaataatggttaaaaggttaaagaaagtactctcttctgttgtctctgataatcaagcggcttttatcccgggcaggttcatcacagacaatgtcctaatagcccatgaggtgctacactctttaagagttcgtaagcgatgtgctacctcgtatatggcggtgaaaacgaatattagtaaggcatatgaccgaattgaatggagattcttggaagaggtactaaaaaaaggcttcgacaatagctggataaactggatcatggaatgtgttcgtacagtctcattctcggtcctaatcaatggtagcccatatggtcagttcgagccaacccggggactgagacaaggagatcccctgtctccgtctctgtttatactatgtgtcgatgttctgagcacactgatgacccaggagacattagaggggaaaatacaagccatccgaataagtaatggaggaccagcagtgtcacaccttttgtttgctgatgactctctctttttcttaaaagcacatcagaagaatagtactaatcttctacagatttttgacgaatataaggaaacatcgggaccactcatcaactttgctaaatcatctattacttttggaagtcgtgtgtttcaacacacgagggagggaatcatgaaaacgctcaagataccaaataattgtggaggagggaagtacttggggctaccagaacaatttggaggaagaaagaaagaaatgctccaatacattcatgatcaagttaggaaaaggataaaaggttggcaaagaagatgccggtttactcaatgaattgttttcaactaccaaaagaactatgttctgaaattgatagtttgatagcaagattttggtggggatcaactcaggaaaaaaagaaaatatcttggatagcctggagaaagatggtgacatcaaagaagaatgggggacttggatttagagaccttcacctcttcaacaaagcattattggctaatcaggcttggacgatcatacaaagaccaaactgccatctctatcgaatgtcaaaagcaagatacttcagggacgacaattttttcacggctacaagaggaacaaaaccgtcatatggctggaattcattgagatttgggagggaactactagagactggcgtacagagaagtattggtgacggacaaaaaacagccttaaagagaaccttggttacctacaacaccaccgagagcacctaaactactatatttgatagacccgaatactaaggtggctgaactcctcacaggacctccacaacaatgggatgatcaataggtacatcaatacattgattcgtcggaccattatcccattcacaaaattttcattccttatgatctcaaagatgactcatatatctggaattacatgaaagatggtaatttcaccgtcaaatcttgattggagggctcttaacctcagtcttgaagaagacacatcacaagctctgcttacagttaacacagatatcccccaaaaatatggcgtctccaaattgttcaaaaacttaagcatttcttgtggagattttttcatccaaagcaattgggatctctgaaaatttaagacgacgaaacattaatgtcaacccatattgtccacgatgctgcaatgaggtagaaacaaataatcatgcaatgttcacatgtccacaggtgaaacaaatatggagagcttcaggaattcccacacatgtactttgagcccagacgagacaatgaagaataaagtccgctatttattaacgttgcatgaggatacaaaggttgagacaaccggacgacttttaccattttggctaatgtggcgtatttggaagagccgaaatgatttagtcttcaacaaaagagcaaaggatacaactgatatagtcaaacaagcgtccctcgacacaaaggaatggctagataacatgcgacccccagaaagaaatacccgagaccaactatcatctacatcgagaaaggctaattggcaaaagcctccagtaggatgggtcaagtgtaactacgatgtctctcactatgaaggaaagataaccgcgggtcttggctggatcatcaggaattcacacggcacatgtatggactgcggaatggggaaatttcaaggacgccaaacaattgaagaaggagaatgtactgcactcatttgggctatacaatgcgcatagggacttggttataggaaggtaatattcgagggtgacagcgtcactgttactagtatcatcaatagcatagagcccaatccaagattacgacattatcttgatttcatacatcaatggcgtaaagcttttaacttcatcgagttcaaattccgacatcaagaaaacaacgtctatgctgatgtcttggtcaagacagctaccaagagtaatacaaactttgagttatatcgaatatgtcctaggtttttatagccgtttgtatacaatgatgtaaaacatttgcattgataataatattggaaggaaaaagaaaaaaatctaaacgaaataaaaaatattaattctatatttctaagtaaactcttattcattatgtttaatattttgttactacatttatactctaaaacttcaaaaagtatttaagttaattatcttatgcttttgctgataaaacaaaaagtaagaaaataattctataggattttgtttactcacaagtgtaaaataattctttatgttttgtagtcaattttaacaaactttaattacaatgaagtaactaacgtcattacatacacatcttgtacaaaaaagaaatatcaaatcatctctctcttaactttattggatgaaagttcacatcaacaaaacaaacaataattattaataatttgtatgtagtaaaatcttataaatacaaaactgtaaagcaaactaaaaattatggaagtaagaacatatcaattattatgtcatgttaaaaccgattgcaccattttattgtatctatgaacatcatctattagttttttttagctggcaaacaagatcctaatttttgtataaaactttagcaataatgcattacaaaaaccttctgattgtcataaaagattaaattaagaaataagaatgaagactagagagaataaaactcgaaacaagagttttcttattgctttctctttctcttctctttttctctgttttctctatatcttataaatgaatgaaatgagttatatatagtagagcttacttagctaggaagtaaattacttagagaatagtaatggataaacatcatccatatcttaaagatgaagtaatggataaacatcatccatattttaagaaggaaataatggataaacatcatctatatcttaaggaagaaataatggataaacatcatccatatcttatggatagagatgaatgatggataatgacatccatacttatccggtttataacactgatcaaaataataccattattctacgttctctaatcgtgaatcctcataattgagatatacagttttattttttctgaagacaataatctacacttaatatacttgaataaaaaatttatttgtcttaccataaaaagaaagagtaaaatattgattttgatctcaacaaaatcatataaccgaagccgaaggatgtgaaacaaatgggcttctagtttgggcccaaatagcctaaagcgaagataaagcccataaaaacctaaaatgtaagcgagcttgcttgttgctcctataaattcataaaccctaacttcgttttcctctcgcagacgcagccatggtaaattcttgatctccgcctctcaatctccgtttcttatgtattacaaaatgaattctccgtttgcgagcttgatctagttggtttagcgtgtaatggttccttaggtttctgatgtttcgttatggatttgcatttgagtgttttatcgttgttgttattttagggtatcgatcttatcgcaggaggtaagagtaagaagaccaaaaggactgctcctaagtccgatgatgtctacctaaagctt

SEQ ID NO: 1460 - DNA, 114695 bp, Arabidopsis thaliana
catacatataatgacaagattaatcagtttcagttttttttaaagacaagtagcagaattgatctataaaaccttacatacctgtccgtgggcagctttctccttttcaatgaaagcggtgaagttaaaacgttttctagaagatctccaatcaagtagcggaacacccgtcagatttgtttttctaaacccacaagcttctccaattccaggcacactctcatatatccacaccagcaaggtctgaacacaaccgtgaatcacataagaatctccgtcatacttgacaatcttcacagaccttaatagagagtcaaaagccactcgaccccaaggatacttctcaaaagcaacaggatcaagcactcttttagcactcgacaacgggactctagaaccgtgatgaatcccatgtactcccacagatagtaaacataatctaccaaccatcatcctcttctccaaactccatgtcttgctaatctcaaagacacgttccaactctgtaaacaatgggccaacagacattgatacccccatttcattccagaaatctttgtaatcagtttcaccagtgtcagactcgtcaaacatatcgcaattgaggcccgttatgttctcaaactcgtagagagaaaatcttattggcctgcgatcaatcaaacaccacatctcatgtatgttgtcgactcgcaactgattggtgaggaagaaatgaactgtctgggcagcccatataaagccactttcagtaaactttataaaaagaccaagtgtagttttcttcaactcatcccacacatctgcacctaatccgtctttgatcttcccaatttgagaaacatagcagctgtgggccatactccttttttgcaacggtgattttccttcttcatacaagcgaagcggataactgcgggtatgactagaagacgccattcctaatcacagaaaaaacaaggttgcataagcaaataacttaggatcttagatgccttgtgagattggcaaactaaaatcataacaaatctgtcaccaatctattaaaaattgaataaatctgtcataacaactcagaaattcaaaagaaaaatcatacgaaggcgggagtttttcttaaaacaaaatacagacgatataggctcaaacacttactacagacttgtgtaattaactctgaatccaccgatgcaaatgagaaaaacaatctgcaacaatacaaataaatcacactttgatttccattgcaactgaaatgcaaatgagaggatttttctaaaagtattgagttaaaattgtcgataccctaaaccgacttaggaccagtgacgccggcgattagaaaaaagatctgcaacagaggaaaaattccttactcgaaagtcctattcgtaaacttcaatcgaaaagggaatttatcaaaaacaggattctaaatgtgtttacctataacgaatgtagagaagagaaactgccaccaccagaggagagaaaccgtcagacctgattgagagaaacacaattcgccgccgtttgtgtggccggagaagaagaacatgtagatctacaacaacccaaaaccaattttcatttgtcgagagtcgatttcacaatctttaatctgaaaagaggatgaatctaaagctgaattcacatctgattgactccgaatttacctatatcgaatccacatacaaaaagaacccaacagttttcggcggtgaatgggaagaaccctaaaccatcggacacgaacgcccaccgctgttcacagccgcaggtgaaaccggagaagaggcgaactcctcactgccgtttgtgcatccgaaacccacagcgcagtcaccaccggagaagaagtatccgtcgtttgagagagaagaagcagcaacgccaccaccggagaagagatatctcctcgtcgagcagcgaccaccggagaaaggagccactaccggagaagagaagtcggcgttacgaagagccaccaccggagatttgttagggtttcgatttgaaatcaaagaagaagaagagacatgcaatttttgggtttcgatttcgagagtcggggaaaacactttcgctttaggtttcagtaaatttttttattctttatttctttatttaatccattcttttattaatgattttatttatttttaatcaaagtcacatttttagtataattctggttataaaactgattagggttaaaatgtctttagatttaaaatgtgagtcattctagtcagccatcaattacaagagtcatttaagttattaatcctaagttatgagtcaatctgagcaaaattcagtataaattttttaaaatcccttgtaaatcttttaaaacccttttaaaatctatttcccgccagaaatatttacaaggatttttaaaatcatgtttttggcgggaaaaataaaatttggcgccaaaaaatttgcgggaaaataaattttggcgccaaaaaaattgcggaaaaaataaattttggcgccaaaaaattggcgggaaaatttcagtttccaattacatgttcctatcagatgagggtaatttggtcattttattcaagggaagtggtatttttaaaaatggacaacattaaagggtattgttgcaatagggtagtaaaaaaagggtagttttgcaaatctcccttataatttagcttgaatgaaaaaaaataaaagaagaatgtagctttaaatgagagatttgtaaacagagggagtgaagaaatgttttatatttttattaccttttatatattagaaaaggataatgtcaacaatcatactattattattattattattattattatagatcgcgagaattaaataattttagtcttttttctcttatgaaacattcgagaatcactaaggtaatgttagaaaaatctttaataacattattttccgtcataaaaaattgtggtattggcttaattgttgacaaatcattagtacatgtaaacatatgtcatcgttgcactgacaacagtgtttacggtgtcatagtctttggcagcaaaatatctgagggcaaaaccacgattgtcgaatgcattttcaaataattcattgcataagcgatatttagaatcaatatccggtatgtacgatccttataatttaaattggttcagcgtatccgaaatattttaagtttgataattgagcaaaaaatttgcgagaccaaaaaatctaatatagcaatttcaggatttgcgataagaacctcaaaacaaaatgaagaattgatatcttgtttggtgcatatggtgtggagctcatcttttgtaaccatcgtattaaactttgcatacgataagacaacaaaaagaagtaaaaccaataacaagccaataaaaattttttatcgacgtatgtaaccatttttcttgttctatgagttttggaatttatgtgaaatttatataagctgaaaatatcttcaaaattaaattcttcataccataataaaatgatttaatttattagtaatatgtcaaactgttcaatgttttcttttttgataatttgaccctttttgatatgacaatacattagataattttccttccttatatttaaaatacatgttgttattgtttgactgaaatctaagaacatttcttggatttaagagaattacaataaatcaaaacaactaattatgtaaaaagtcgtgcttataacttgatggggttgtgtaagaacatgcgagtagatcaattatatatgtgccactaattcattatgttcagtcaaatttatctcaacagtaagtcagtaatattaataattttaatttaattggagatatgaaatttattttccgataaaaagttacgtttcatttttttttccgtttttcgttgaataaattgtagttacggatcttattcattatattacatcctaatgataagaaattattagggggatgggaaatttagggtgattagtaaatcgaaaaattaaataatgattgatatattagtatttcatctataatgatggttgtgattggaccatacgttttctaaaagagttaagtgtaatgtggcatcttggtgagtcaacaaaaagaagaaggcatgcctcgttggatgagagtatctaaatctttgtcaccacggccactgcagttcactaccaccttggctccatcacgaagagtaggcacgagtttgtcgaggaacgcgagcgcgtgagacgcttctaatgccggtattattccctccaatctgcttaatcgcatgcacgctgcagtcgacaacatataattaagcttaatgttttatgtaaatatattaaaaaaaaatgaaaaaaaaattcttgtaaatattataaagaaaatattagtagtaaataactatagatagacatgattacgattatgattattaaggttacagtttattaactactggttatggttataaaaaatattaaccgtaactcagggccggcctgaaaataaatggttcatagcattttttttttttgaagttttatatataaatatttaatattgatgctaaaattttaagattttaaaataatggggcctatttttgcaaaaataatatttttggaggccaaattttgcaacaaaatttatgggactcacatcaattgtttcaattggctgtgctcagggtcaactctgccgtaatctaaccattatatatagagttaagatggttatgattagataaggttacaattgaatatggttacagtaacaatagttacagttaaatacccttttgattattgatgattacaatatacatgataccagatgcaaaatcttacgtattttctgactttttaataagataaaaaatatgttgtatattttttcctatacgatattactctttttaaaaaatctttatccgaacattcgacatttttttttgcattacaaataaataaaattgtagttttaaggttttaactatacagttaacacacggttgactgtacggttactacagttttgatacggttacggttaattgacggttacgattaatatattttttaattaatctattttacggttaatggttacggttacagtccaattactgtttaaaaacggtccggttatgattaaattttgctcatgcctaactatgaggtacgtaccttgaattgcttcttcgtctgttgctgtatagaactccgctctgccagtttctttcatgaaactaatctccggtccaactccgggatactctaacctacgaccatgtaatcaagcagttgtgagacttattacgtcaatataatgacttctcttagttttacttcgtcttcaaaattaattttacccaagcgcatattatttcccaaattggaatttttattcggcaagaaaaaaatccgggtcaattagaccggttcatagctaatcacgagacgtggacttgcattgcatgtgataaacgtgatatctttttttttttggttcgataaaaaaattccgaatactttatgtgataaagatagaattctatctatgtaacggtttgttcatttattttaaataaattggaatgaaaatatataatgatgatatatacttagactattttatttttaaatgatttttctaagattagtttggttttcgcaatcgaaattcctaccaaattaattttgagattatataaatgtcacacttacccaacacctacggagtgtggtttaagtatctgtccttgatcatcttgcaataaatagctcatggaaccatggtatacaccaacatctccaaaggccaaagtagctgaatgtttccccgaatccagaccaagccccgcagcctcgacaccgactaaccgcacatcctcatccccaacaaactcatggaacaaacccaatgcgtttgagccacttcccacacaggccaccaacacatcaggcttaccaccccatagttgcttggcttgccttcttgtctctttcccgatcacagattgaaactcacgtactattatcggacacggatgcggtcctacgaccgtacccgataagtagtatgtggtatataggttttcgacccagtttcgtatagcttctgaacttgcatctttgaatgttccttccactgatataaccttttaagatcaatatgtaaaagcgaatttaaagttctgtatacataatctgttttagatataaaactcatctttttaaaaataaaacaaaattttgtgttgataattttggtgaaatttacataaactttttaatttacattatttcttatgctagatttgtacttcctttactaatattccggtaactatgttgctcaaacattttatctcatgttacttggtctactgaaaaatttggacagataaatagatcagaaacaaactctcgatcattcagaaggtgagagacagaagatacgaaccaagcattcaaacatggtttgcatctaaaggcccttaaaagctcttgtataatctaatttcaaaacaattcggaaaagttgaatttgatgtacccaaaagttattttcacttgaatctaatttaacattataataaataaaaaaaaattataatataatcaagtataatttaaaaagggagtggtcccatattttcgacatccataactttaaaactgagcaaatatttacacaaaatgacaaaatatgttaaacatataacaaagtactgtgtatctatatatacatttttgtagacgttttttgaagataatgttgaagatttgagccataattcaacaattaattcaaatgggtgggttttacccggtttaactctgttcggatcttggataacatgtttaattctgttctgatcttggataacattaatttttggaaaagttacctaaaaactaataattaaaaacgaaaattaatgatttaattaccaaatttaatataaataatatctctaaactaaccatatttgttatttaccttaactaatttcctaaaatatttctacctaatttaaacataaatatataattcttctttcactttatttattttaaatttatataaaatatatatagttaataaaatattatatttttttctgcatatgatgtaattcaaattttttaaaacggacatatattattcaacctatgaaaaaataatatgtgtacaatgtcccacatcgcttagaaaaattggacaatggttcagacccatattataaaaggaccaaaatgattctgattacgaatgagcaggaaacttgatttatcaggcgtccaaaattaaaatacttatccgatttactcgggtttttttattttaaagaattgaaactttaaaatgtttcaagaaattataaatattattataactttatcaaaagttaaatattataattttaaaaactttttataaagtttatctttaaaaaatgctttgaatatttataattttaaaacttataaagttttaaaaattataaattgaattttaaagaaatttaaacattataaatatatataaaatatattaatatgagacgatagattacatgaaaaatcttaaatataatcaaggtcgatattgtattttttttaagtttcaaattttatatataacactcaaaatataaaagatattaatatgagacgatatactgcgagagaaatcttagatataacactcaaaattcaatgatgaagtttgggtcaatattaatcttttttgaagtttataattttatacatatttgaaatttataataaaatgacaaatttgtgtttagtttcacgggacggggttatatggtgtgacgggtttgagtggattataacataggatggtatgctacggaaaaaaccctataattaacaattataatataattatataatcttaaacactaaacaaaattaacaatattaaaaaaaaaaacttaaaactttaatttttttaaaacacatttcgattctttcataagatttctctcgcagtactaccacgggtgaaatcctagaattgacgggtttgaatcgatattaatatgggatggtgtactacgggtgataatttagaattgactggtttaggttgataataatttgcgatagaattaggagtgaaatcctagaatgataattaaaatataattatacaattaaatactaccacgggtgaaatcgtagaattgacgggtttgattcgatattaatatgggatggtgtactacgggtgaaattttagaattgactggtttgggttgataataatttgcgatagaactaggagtgaaatcctagaatgacaatcaagttattattatacaattaaatactaccacgggtgaaatcctagaattgacgggtttgattcgatattaatatgggatggtgtactacgggtgaaatccgagaaacaacaatcaaaatacaattatacaatattaaacatttaacaaaataaacaaatacaacttaaaactttaaaatttgagttataaaatttcgtctcgtggtgaattatacatttaaatcaaacaataacataaatttattaaatcatcctacaaaatattcaattattttttaattaatgaaaatataagcccgcggtataccgcgggttaatatctagatacaaaaaaataatcaaatttcaattctataaacatactaaataatatatctaaatatacaaaatataaaaaataacaaataattataagactgtgaattatatattacgaaagtaattactgtcaacactaaaataaaatatagacccgtggtataccgcgggttaaaatctagtatatactaaaactgttgggtttttttttttatatataaattaacaaaatttatatatgctgcaaaacgagacctggttatatttggttatgagttgaaatagcaagttacctgagcaccaaggagtttcatggaaagtacattaaaggattgtttctctatatcagcagctcccatgaaaacagtacactccaaggagagctttgcacatgcagccgctgtggcgactccatgttgtccggctccagtggccgccaccacacggctgcaaccaagccgccgggaaatcatggcctgagcgagagcattattgattttgtgagacccacagtggctaagatcttcccgtttcaagtatatctctggtccaccttcgatggttggaactatgttcttgtagtgttcggttagacgttcggcgaagtagagaggcgtttctcttcctacgtagtctcttaacgctgtggtaagctcctcctagttataattaaaaataaagcaattatgttttatttccaaaacaaaaaaaaatgttttctgcaaaaaacttataactcatctctttttgcgactttatcctcgacatctaatacatgttagattaaccctacggaatctaatataatacgcagtataaccctttttcaccatttttgttaccatcaattttgtaaaatattgacatataatgttaaatcgaagccacttcgacaaagagttcaactctaccttcaaaattttaaaattctaatgtatatgaccgtaaaaacgtttataatatacgtataaggatcatattttagattcttttagacgtgataagattaacttgcatttattaaaggtgatgtgtaaagttgcaaaaataaatgagttagatgatttttttgcaaagaatctaaaataaaatatatatccattggatatttaagtaaccattttgtttgaacttgcccttttggttttgtgtttatgtttttttttgcaataagctcaatatatgagaaaaacgaacctgaaattcgtgatcgcacctaacaaagttaaattcgtcttcaagttctatcaggcgagacatcaatgtctccggtacaaacttcccaccgaacctcccgaatttaccgttaccgtcaccacgaagaaactgcctcttgtcggttcttgttgggaccgaatccaacgatggaccactattactgctgagtgcattgatttcacggtggtggcgttttgtggaaacgccgcaaacaaccaagtgtgtcatacggtggtttcttgccggaaccctaagaagtggctgccctcgtacctggattttactggacgacattttctctctcttttctttcttccagaatacttgttatatctatttgagattttcttaaggaaacatttgttttgataagtgcttttttatagttggaacgaaaataatttggttgaccaaaaaaaaacggagatgattgtttttttgttttgctacgcatccatttgagtttttacatgtttaacacgttgttgcataattgcatttgtacactttaacaaaaaaaaaaaagcatttgtattgtatactagtcctcttcattcttcagaaatataactttattaacgagagaaatacatttagtttttttctatggaagagagtaattttcacttatttaaataccttaagtgggagatatataactttatgtatatcctcgtttataactaacttattatagatgtgagtataggagtttttttttttttttttctgttcaagcttaatatgatataagaaaggaaaagaaaaaaggcgattttaggtttcattgacttctaattcaatctaaattagaaaggattgacatattttcttgacgatcttatttctaagttttttttttatatttttagatgtgagctcttaacaaataacatcacacatggatggaattttgaatgttaatttctttcatctttgtgcgtttgaaaaataaatgacacgataagacaataacaacacatattttcgggagaaacaaaaatcaagaggttgtggttttatttcatgtgtttcatagtgtttgaagataaggttttatacttttcttgtttcttttttgtcacctttaaattgtgctatgtactatgtgacgtataaagtcagttttcttattagaaaataacataataatagttgctcagataattctgattcaggcatcaatgacatgcttatattagagattaggtagggattaatggcgcatgcgatgggaggcccataatcatgaggaaacatgtaatgtcccacattgtgagagaaaccttgactaatatataagagatataagctactctacctattgtcaattggttttaggttagaaacccatacgactttaacatggtatcagagccaggttatatgagataaattaaaatcagcattatttcattgaactctaaatcatgaaacactacattcttttatttgtaaactctcatccctatatataaaatctatgtaagagcttctaaataacgttgtcctattaatttaaattacgtgttttaacaaaaaagcgtctgatacatgtgacgtgaacgtgaaggagtcccacacccatgtcaagtcatcgtactagaaaggaaatatagctttgcttattcaattgagctacctggagagaatttctaaatatctatatggtatcagaattgctatgattaatcactatctcacattttcttgtccttcttttcgttatacgtcaaatctatgccctgtccaagactccaagtccaacctatacatacccaaaacatcctttaatttcattgttaatatgttgaatatgaccgaattagcatcttcaaatttatatcacatggtctggtctacatatttctcaatggtcatgaccacctttcctctactatgaagtattaccactttttaaaactaataatcgaatgcttaagtctattgttttttttttccaatacctgtttgttctaaggaatcttttttttcctaatttgttaaacgattttaaagaatctttgtttcgttcattaaaaaggttaatgacatcaaattgaaatggaacttaattacttaaagtgatcttttgcaatttgcacaccatacacggaaaaatgttaacgaaaacgaagtctagttaagcacacaatacacagaacttgaaaagccctaaatagggacgaccagtccaccactactcatagatttaacacgtaaccatgattaagttgtgattttttcttttctcatcctctgtcacaaccaaccagaaatcattattaataaagtatacactacccaaaactgtgagaaaaggaatcacatagaggaaaacatggaaggcataaaaaatttgaagacatggaaaggaaaatatacatcaaattatatgtagataaatttgtataggtgtatatatattgcaaatttcagcttatggataacaaacgaatatatgtttgggttcaataatcaaattatatagcttatatacttattctatattacagaaccactctcttattattagtgtttttgtcttatatatcgttataaatactcttccaagagattaattgtctgcatagttttacttataataaaatgctaactatattacaataactatataaaatcatactaatttaataaaaccaaaacaccaatacaaaactagttcttctaaagactgtaaataaattggaaattgcaataggtatgctcagaaaaatccatatgtagatccccatattttcaactgtttcggtgttactgttgtccaaaataagacgcatgtatccctatgtgcagtagtaaacttaatgtagctcctatatcactatgtgtcagacaaaaagaaaaaaaatttgtgttggatattttgtgttgtttccttcgcctatttcatattttccaaaaaactttcttcacctctttctctcttctttgccgactgcgagaagaatctggcggcgagcgggtcaatgtatatcagaagatgaaaacgttgtgtggtaacctcaacgcacttggtgataatgaaaatgatgaaccaccgcagtcttctctcgatgggcttttggatttttccaacaaatcgacttcttcacgattccagaactcagtgaagaagctgaaagcattaagcattacagttctttctgcgctattaaataaatggcaacaataaacctttacttacccgttaaataattacttactctatacttcgcaaagatgttgttattcaagaataacttaaaccgctcgcagtcattttgccatatcttttcaaacagaccgcatttaatccgttgatgcgaaatttactgcctaatttatttagtatagagtgtcctcatgtcattcctaggttacctcgcaagatgattcggggattttctctatattccttatccacgcccatgcagttggcggggtgtctgaatgtgcggattttgacgtttcctccatcgagagtcaagtgaagaagcttgtttcatcattaattctcgtggttgggtactaattacggaagctttttactcgtaatgacgttgttaatctgatagtttattaccgaacatttcattgtgtttaataactcgacatttcatttagtttcactttgtgtaataactcgacatttcattgcgagtgttgaagacgaaaacttatgttaactttgttatttactatctcgttacgatctaacatcgttatatgctatagggtatcgttatctgctatcaggcatctgctaataaaacctatgttaccatttcagataacttattatcgactaacataattatctacattctcgacacctcttcttcatcctaacatgtatcattacttttttccaatttctgtacatgtcttagacactaacaacttggattgtaattatattaaggatatattttcatgtaagaaacattagcaataatttaaacattcctattaagttcgacattcaccaccagaagttggatagggtcatataattatacattaagtggaacagaagctgtacgtacatacatttaaaaaatacagttccttcaagtttcttatttataacacacatcggcagaacattgattgcatcatcctagcctctcccatccgtaacttccttcctcaaaaaaccttctcctctacccccaaaagctcgatgctactttttttactacgggccctgcataccaaacgcatttacaaattttattgaactacaatgtttgttaactgataataaccctcttatcatgataaatgcgacaatacatgaatggttgtgtagctcttatctgcgagaaaatccgcatgggaggacattggataaacctgctaccacgtacccgataacttaatttaactgtaatgaatttttaccactaaacaacatagcgactaagaaaagaacgatatcttcaaaagcattaaatgctgccgcatcattacgtatccaacaatatctcgtgttggtaagggtaaaagcatcatagattgttgtcggcgagtagagaggtttaaatacagaattatcaagcatacttacctaatttccactttctgtgagcatagataattaattcaccataaataaattggggtttttaggttgaccaaatataagcaaaaataaataaacaaaaaaagaagaaaaaattaagcaaacatagtaaagtataagcaaatgaacaatttgatttaacatttctagttttctcatctacaatattaatcaaattaactataaaaaatatttaatgtgataatatttttttagtatgaaaaggatttgattttgatttgatttaacaacattatggaaacacattcgatattctccttccttaatttgtagtcgatatggtagctttgataattatagattttattgggaacttaatttacttttatttaaaaaaatctcaggtttgagatgatattggatatatgttgctgggaactaaatttcttattatcccatttagttttgaaattaaactgtttgttgtcatatcgtttgcaaactcggttcatcattgggcttgtgagaacgttatcatcacaatgagaaaagcggaaagcttcgtatgacccaacaacattgttgaaggtttttctcctttcttctcttttttagtgaatttggatcatgtcacgtgaggaaacaggagctacaatggtcattttaaacaaacaaaaataatttagattttattcgagattttgttttgaaattattattaactttgtgtttgtcttacaatattgggtattgtcaatatatgtacttagaagaatccgaaatttattctttgattttgccactgtttgtcttatactgtttatgtggtaaatactatgctacccctataatatattttcgaaaatctcattaccgttggactagtattgtgtcagaaggcaacataatctttttgatagatttttttggagaagcgtgatataattatgaactaaattgaacttttatagaaaaccgaagcggtgtttcctttcttctacactcatctgttcacatattcatttattagagtcccaaagagagagcgaaagtctaaactgccgttcatagaaggaaatttggtgttcaatcggatttttattgtttacccggtatactccgctgagtctcgatcgtatggtatggatttgattttttgggtttttgattgatgaatttctgtggtttttgccgatttatgacaaatccccatcttattttgcagatggaagaagttgaactacctaatcgattgattgcctttggagaaaaacccttaggcaagagggttaatgtctacaacaaaatcaaaactctttgcagcatcataaacgcacttgatgacgaagagcgggcattcatcattaacagttcgcttggtgggttgatggattttccgaataaaccggcgttttcggcgagttatagtctatttttactgagtaggcaattggaagttgctaaaccacatgaaatttggatagtgtacgctagtactccggttagattctcgctgagagagttcaagatcgtcaccgggcttccttgtgggaaatacccaaaggttccaaaaaagaagaagaaaggaactactggaaagcagatcccttattatagttccttgtttggtctcgaagaagatgtaatggtggaaagagttattacgatgctcaagaagaaggttgtaaccgatcaggaaattaggttaagatatgcatgtttggctctcgttgatgggtttttgttgctgacctctcactaccccaaaattatgaaagaccacgctgaaatggccgaggatttgcagtggtttctgaaatatccttgggggcgattgtctttcgagatgatgacgacttccattaaggagagggaagttgagcagcttgctacaacttgcatcaccgttcaaggttttctgtacgcattgcaacttgtggtattggaagcagcacctgttatacaggaagggcctcaaattgacgagatcgttggttctgattctgatgtagaccccaccgttgtcgtaggtcctcgtcagggtgtagcactcaagctcggtaatgccaaggatgtggatgcaaaatgcgaggtaaccctaacttgcagtacaacgttaatagatgtgttaacaccattcaacttttgttatcggcgataataaatctgttaatattttactatatatgcttagtgtttgataacaagtttaattctcggtgacctcgtatcgcgataatgttttgcataccgtgtatgttttttattatttgtgtactcgccataccgatatacttagctgataagcatgtggttaacgcgctgctaattttttttgccgttggttcatcctatttggctgcaggcttatgttgatcctatcatatatcccgattcccggatgaatccatcggaagacttatcttggtcagatgatgaagatgacgttagggtggagaatttggtgaagatggcggaagaagggaaggcattttcgaataaaatgtttggtggggggtgtatcccatctgaggttgttgttgcagtgaaaaaacccaagagaggtggcaaagcaaaagtagttcgtggcaggaaaggtacaaaaactggtaggaacactgttgggctcaggaggaagcagaaaattcccggtgtagatgaaagggaagggtttgattgtctagatgctaacgctttattcactagtttttggaaaatctagttgtcgatactcgaacttcaacggcttctgcagcagcaggcaatggtaccaaacctaaccccgaagctgctgatgtcgaagaaaataccaatcttgttcctagcccgtaggagtccaacaatgaaacagcttctggagatcaggaatcaaatccccctcctagctactcccgaccattgcattctgatttcaaccttccgtcttttcaaggagaccaagcaatatccaccatcgacgacgttgtttctttttacaatgcttctgatcttcaggacgatccgatagaggaaagaactatttttcaaaaataggtccgagggcagtgtattatttttaaattacatgctaacattttaaactgctaatgtttggtatatttccctaatatgtagtcaacgtattatttgtagggcgacagtaatatgggagatgacactaacacaggcgtgggcgggcaggttgggttttcattgctcgaatacccatttaataccgcttgttaggtggaaacgttgattaggttatatgatataaccatatagttattcgataatatgtgtaatagactgtcggggcaaactatggttaagtcaactcgataactgttttgttaatgtttagctttaacattatttattgtttacgctaggttgttgggggagtcatatgttatggcgcaaaatatattgttaactgtcaatttatcttattctcgtctttgttgtagtctgacgcggagattgcagacaacaccgccacagtcgtggatgtccaggttagttctgttttggtaataaatatataagataactattttgttagtgtttagctttaacattatttattgtttacgctagattgttgggggagtcatatgttatggcgcaaaatatattgttaactgtcaatttatcttattctcgtctttgttgtagtctgacgcggagattgcagacaacaccgccacagtcgtggatgtccaggttagttctgttttggtaataaatatataagataactattttgttagtgtttagctttaacattatttattgtttacgctagattgttgggggagtcatatgttatggcgcaaaatatattgttaactgtcaatttatcttattctcgtctttgttgtaatctgacgcggagattgcagacaacaccgccacagtcgtggatgtccaggttagttctgttttggtaataaatatataagataactcttttgttagtgtttagctttaacattatttattgtttacgcttggttgttgggggagtcatatgttatggcgcaaaatatattgttaactgtcaatttatcttattctcgtctttgttgtagtctgacgcggagattgcagacaacaccgccacactcgtggatgtccaggttagttctgttttgataataaatatataagaccgatgtgctgggtaggctaatatgttatggtttaaatatattgttaactattataagtctccttacctgtgtacaaataactgcttgtttgtgtcaatatattgttttgttaacttgataactgataagttattataataattgttttgttatcatgtacctttatctttttttattttaaacttatcgtaagaacttttttgtggagccataatccgataattgttttgttagggtgtatatttatcagttatttatgttttacttttcggtgctggggagacataatttgtagtttacccctcctaaattttaacagccgaattccaatttttcttattcacgtcttcgttgtaggccgacgcggagatcgcatacaacaccgccacagtcgtggacgcctaggtgagttatgttttttaaataatttttttaagcccgatctgctgcatatgcgagtatattatggcgcaaatatattgttaactggtaaaagtctccttatatgtgtacaaataactgttttgtgtgtgaccctatatttattttaaaaatttactgttaccattttgcaatattcgtatgcgttgtagggcgacattgaaatgggagacgacactaccacagtcggtggtgaccatgtctctcttttttgtttaattaatcttttttaccgctgctcattttagtcctcaattgaaatttggatgtatatttgttatttggtaaataacttatccgataacattaataacaaaatatgaggcgataacatattggttatcagttgatagattactataacgtattcttcagattagggcgctaacatatatttttctcggcaatcaaatttttatttaggatatgaaccgtccctccgcaactcgtgtgttagaacacaccccagaagactcaaatgtccatccgttgtcgtatgtttcaattgaggttagttgttttatgttctaattggttaattatttgcctattaagccccacctcacaggtttttggcgctttgtttaacaattgaggaacttctcgttggtgttgaaccaactcctcaaagaggccaggtaaaggtgagcatttttacccaactgttaatcttagttgttagttctatcgttatatgcaaaataataaactatctcaatggtacctttcagggtaacgacgatttccccttgcattcctcccaactacagtctcgtgccagcgaggaggttggttagcagtttattattttgttagcacacgattggaatatttatggtcattttcaaatttttctgtactcgttatttaaatgtgtgtgttttttatgcagccccttgcagatgtgtctaaagtagcctcgagtcaagtaatttgtatctataactataaagccaaatgtatattaccctataagtatatttttgctacgataaacatatagttaacggtaattggatgttgggcatctagtcaccaatttaaatttcttacagattggtgatgtcgctgctagagagactagtttgtcacctactcatcgggattctgatgaggtacattttcttgtcctctgctggatgtaaactacctactacatgttaacatttttattttgtttttaatcatgttttaggactttacaacacccccaccttcaaacccgtctgctacaaaagcagccattgggactgtacccgatgttgaggtgaacaaaggaaggaaaagttaaatacctaggactctgtctagcaaattagatgggcggttccactttgacaagaaaaccaagctgcttgttggtcacccgtcccctttgctgagcgtcggtgaggttgttaccgatccagaagaacgttatcaacgttctctgtctaaaatcagagggaaaaggtaacaatattacattttaagcttgttatcaaataaatggtacattattttcaattgtacaaggtaagatgtgtggctgttactggtatgtttttttaaaaatttcatggttttgcagtttcattagcattgttggtgaagtttccctatcagccaaaaagatctttgacattattgagaggaaaaaacagttcaccagcaaggtcatggacgctcttattaaatttagtaggcatcttttaaggactgacgatattgatggtgagaagctaagggtagatgtgcttggttccaagtttgtttcacaactgactaggctctttttaaagttttccaaaacatccccgcccgaagatttcattttccccgcagtccttgttgaactacttatgggtgtcggcgaggcagatcgtgtaagattgtttgatgaggcggattttgtgtacatgccattcaatttcgacaaaaaacattgggtggcattgtgtgttgatctcaaggcgcacaagatcacaactcttgattctaatattcagcttcgcaaagactcagcgatgtgtgccgaactccagccgcttgctgctatgctcccttacctcttcaagcaggcaaactcgtccagggatcccatctcgttacaccctttctcgattgatcgcctgcatggtatacctcaggtcacatcgtcctttgattcaggcgttttctcggtgtttctcattcacgcccatgccgctggtgggatcgaggagtgtgtgaattttgatgtagctgccttggatcaagaagctaagaaacttgtctcgaccataatacttgttggtgttgcttcataacttcaaagttatcgaactatttcgtatcagaactctgtgtttatgacctgttttgttttgctatttggttatggtcccccggatgggttcttttattatggtgatggtttattttggcttatatcggtttgccaccgaaaacttgggtaatggtatgaacacgtaatcattttattaacattgtcttcatattagaatcatattagacactaattgtaaaattgttttattagccgagaacgcagttttaaactgtcgttgttaacccatataataccccgtagtcgctaatattagtgttacttgatatcgcgaattcatagctgttgacaagttttctattatattttaaattgtcgtggataaaatacgttttaagaaacaaaaacaatgttaaggactaacttataaattaacacaatttataaacaatattctacatttagtgtcattattattcggttggaagaattatcgtagtaacctataaattattcagtcagcgctaatattactgttacttgatatcgcagactcatagttgtagacaagttttatatattttattctgtcgtcgttaacattagtgttacttgatatcgcggtctgatatcagtagacaagttttatattaggttctatcattaatacatatattgtatattacttgtactcttacatgataacacaaatattatatattctttaaattttgtgttttttcccagtcttattaatcttgttctcttactaggtaacttatattttattcagtcaacgctaatattactgttacttgatatcgtggactcatagctgtagacaagttttatataattttctaaaatatcgtgttgatattgacgtagttatttttaagtttgtgtgttttatttatcttgttcacttactaggtaacttatattttattctgtcattgttaacattagtgttacttgatatcgcggtctattatcagtagaatgtttttatattaggtgctatcattaatacatatctcgtctattacttttactcttacatgataacacaaattttatacattttttaaagtttgtgttttttcccgagtcttattaatattgttctcttactagataacttatattttattctgtcgtcactaatattagtgttacttgatatcgcggtctgatcttagtagacaagttttatattaggtgctaacattagtacagtaaacctgttaacacaagttttttacattctttaaagtttgtgttttttccgagtcttattaaatcttgacctcttactaggtaacttatactttattctgtcctcgcgaatattagtgttacttgatatcgcggtctaatatcaatagacaattataataatattttcatgtttcattacccactaacctagttattaaccgatttctattgggtaaaaagttatcatatattttcatgcaagtcaccgtagcatgtatctattattataattgcttataaatatgcatataacacaaatattatacagttgttactaattcaagttgtagatgttaacattgattcatacgattattagcacatatattacctgttaacacaagttttacacattcgttaaagtttgtgtttttttcttctgttattaatcttgtcctcttactatgtaacccatattttattttgtcgtcgctaatattagtgttacttgttatcgcggtctgatatcatcagtagacaagttttatattatatttgtcttggataaaaagttatcatatattttcatacaagtcaccgtagcatatatccattattataattgcttataaatatgcatataacacaactattatatagttgttactaattcaagttgtagatgctaacattgattcatacgattattagcacatatattacctgttaacacaagttttacacattcgttaaagtttgtgttttttcttctgttattaatcttgtcttcttactatgtaacccatattttattttgtcgtcgctaatattagtattacttgttatcgcggtctgatatcagtacacaagttttatatgatatttgcctttttccatacccgctaacccagttattaacagagttttgtatggggttatcatatattttcatacaagtcaccttagtacgtatctattattataatcgcttataattatgcatgtaacacaactattatacagttgttaccaatttaagttgtagatgctaacattgattcatatgattattagcacatatattatcccgtactcagtaatgttcattttattggataatgttgtatcatacttttctaataatgtgtgtgtaccattgcctcataagatttattgatttccattgtaacatgtttgttacgctccggttacgaatattgacttagctgggtttagctatttaacatcgtaaacaaaagtactaaacaatattatagcatttaaccgaaggtttaacataatttatcacatgcatacaaggaggtttgatgggaatcgcccccgatcgtaatattacattcttaggatcagattccgtacgtatatacagcgaaaatttcctgatccttcttcattatttatcatacattctcagtttccaactttcatggtaccatcctttcaaacctccttttactcaaaaaacttctttcagtcgccaaaaaaccactccgagttgtagctatggaccctacacataattacttgtgttggtaccatggatggagatgttcatcaattattaataatatttgctaaaattaatgttaccgttatcggtctcctgcacgttgccctattatgtcccattgtcctgcatctggagcaacgttttgatgattttttctggacataaataacatccacattagctctatatcttattgttatatatatccgttaataacaatgttaccttgaactcttccctagagaatagtcttctcttacgcggccttcccggtggcctacgaacgtaaggtggcgcaagttttccgcctctgacattactgggggaaggagtcagtgtatccatgtcgtggacgggcatgattactcctctgtacgccaatctcagatatgggacggtgtggtggacgcctaccattgtttcgacacagattccttcttttatcactgctgctatggcatgagaacacgaaatcgttaacagttggaattctatgaatgtgcctgtcctttcccaaaggttaaccgcaaacgttgaatcttttctctcttgcacttcataaaatgcatctcctattttaattacgagatatcctgctccttttcaaaattttcaatgaccatctcattcaccttaggggcaaaagattcccctcgtgttgtgcagcttttcgcctgagggcaaaccatgtaacaagtgtgattcgcatagtctttaagagagaaattaccggataaccccttgccatggttaagacattgtttagcgactctgctatgttgcttgtcatgaaattatacctatctcccacaaactgcgagcgcgtccaatgctcaaacctaatgtcttcgaggtaattagtacattctgggtgcatagctcttatctcagcaaagatgcgattgaagtcgcttggccggtaagcttgggctgcagtggcgaccaaaaagctcaacccttccgacttgaatattgagactatgttcctcttttagatggacaacgcataccgcgcgtgaagacatcggataaacctgtacattagcgataatgtatcagtgttatgatacatacttactcaaggtaaagtaacatttacgagatagccacgaaattaggggattaactatatatatatcgatgtaatagtataattattggggttcggtatataacttaccttctgtatgcttgcataaatcgatgagtgcctgtctaaaacgaacaccaaatccggatcatctgggatggcgtccgtgagcctctccatgaaccatgtccacgcatcgtcattctcgatgttcactatcccaaaagcaatgggaaagactttgaaattggcatcttgagcgcttgcaacaattaagcagccaccgtatcggcccctcacatgcgttccatcaatcactatcacctttctcatataagaatatccttgtacagctgtatctagggcaaaaagcaattacctgaattgctccacacctttcttatctttctccgtatcaagggcaactagagagttagggtttgtttccagaagaagcatgaaataaggctggatcaaagcgtagctgcccatcaccgaatctatcgcattatccatagctatttctcgagccctccatgccttccagtacgagacatttaggctgaactcatcccggagcatcttcctcaactcgttaggccttggcctcctaccaaccccaagatactttgttctcatcagtttcccagtcacagctgtagatgcttgtttgtgaaagtctcctctggtgtctacactgcaggtgtgatgttgacttgcacattttatcttgaaccggtcactatcctccaattttgtcgcataaacacgccacaggcatgtatgacttacgcacacagcgaggacaatgttagggcaagacttggcggtaatgaagtgaaactttcgccgtatcgcatgtattgcaagttttgttgcacagtcttgtttattcttgaacaatctaccatatggaagatatgttaatgtttaccgaggtaaatacccgaattactcttaatatcttagcgtctgacctaatggtactatactatatcgtctgatataaatgtcatatattatcattaaaatttgtagatacattaaaacttaggtgccaatccattttatatcctaacatgttttaccttcttctcccggatcgtcaaaatatggtggggcgtccttgtcacacaacacggttggcactggtgtttctttcaaatatatatctgccaacctccggcgaacatgggtatttaactcagtaacttatttttgagttgcaacaacctcccccctaacaatgttgttgactatactcatttttggtgtatttatgggtgccatacgcagcggtccgtcggggtctgattagtagtgtgccacatcggcttcacctgtgtatatgaataagaagaccgttatcagattgtttcctttttgttacaagtcaacatgtatgtttttcgataatgtgcactgtatttgataacttacctatcctggccaaacaattgttactagatatttcatcttcgtccattagatcctcactagagaagcttatactattcgacggtgtcttgaatgtcgagtcagttgaagataacgccactattgataccacgtcaagagctgggtccgcattgccaagtgtaagacgaatggcttcctccgggtttgaacttgtttgccttctaacctcgttatccttagcattagccggagtcatgtcgagttatcctaccatagagccagccagtcgtatttctctttcctgcatctctctcagcattactgcctgttgggttttcctccaaactgcgaactccaagtccttaatgctcttatcgtccaagacacgttctttccctttagcggttgcacttggttggccttgggatatggttcttggtgcgacgtttcctacactagtctcccccgtattttctcggatagttatacccccactccttactatgtgggttactacaccatacttgtcaagtccgagatcaccaatcacactattaccagcgacgttaccaaataacattctcgttaccgccgaatcctaagctgctcttgtttcactgctattccaatacttatcggatatcgcttccgaggtcatacctcctatatctaagacgcttcggtaggaatttactgttgatgcccccaacatctttcgtatggtcttgacctttaggtgaacttcctctagatcagatcgaatcgccataaacaaagtcatatcctcgtcatcgagaatatggatcgggtttgccctctgccaatctgggcccatcatccattgcgaccattggtatgatagctcaacttcatcttccgactggagtgataatctttccttcacagcgtcaacaactttagcgaacgggtctctttcccagatttttaccgccaagcataacccatctaactcggcgacgtgttcatagcatccagactcatctcttttccactctactcgaaccagtctaacaaccatcgccatagttcctgtcgataatcatccataattgtagtgttagcgttcgaatgagacaaaattttcaaaccctaagttagggtgtactatttattacactctacatatgatgaacaaagtaacttgagaattaacttcttacctgaaacttcaattactctaatcttgttatcatcgccttagtaaatgcagatattttccgttatgtgttttcagttttgttgttgaagcaacattgataggggtgtaataaatagccaaacacgcaaaccgaattatatcccccctcatcattacgattctcgtactgtaagttacaccggcggatttttttgcaggttttgtcgactcattaaatgcgagatatccgaaaatcttttatcttcccactacgcgtatccttagcaatagggctaaatcaagcatattcgttttgcatgttttcttctacctaaatatttcttttacatgtacacttccttaattaaatcacggtggaagtacatatatttaactcaccctacaatatttgtatttgtagtaagtatatataatagatgataacctttactcatttaaattagtgtgtgtcatttattgattggtacaaattatttcaccttagttactatttatcggaaccttaaatattcagaaaaagacaaacatgtgaataattattgaattagaccagaaaatattataccagaacacttatataacttacatgcatgcatgaattagaaataataaataaataatagatatgctattaaaattttatatgactataatgattgatgtagggaaaagggtctttttcaattcgaactatttaaaaaatgtgtttttcaacctgaacaaattcttaatgctgatttatacctgaacacatcaaaaaatttaaaaacctacctgaactgttgatatagtgcaaaattagaagtcaacgttaacagatgttagtcaacgttaacgattgctgactcagctgacacatgtgcattgacatggcatattacagaaacgacgccgtttttgtcattttgaattcaaatttttttaatttttttttgtataatcacggactcgaacctgagatccttccacatattctattagtcgttaccattgagacactaacatttttaatgtttttgtaattctaacattttatatagatcaataaagcataagaagtcactaaatcataaaaaggacacaagataaaactaaatccaaggaaacaaaatttaaaactaaagactcagcatttccaacataagagttttttaaaaaaacttctcaacataagagttatacaaatttaaatccgaagacacaacataaccatcataagagttactaagaagacataaaaatcaagaccattgtaagagttgctacttgtcccaaaaaattcagaaaaaccctacaccaaaccggaaagagtcggatgtgttgtttccttatcaccaaacctgaaaatagatcaatcttgtattggttgacttgcttgtgttgctcgacttgatccttcttctgcattagtgtttgaagtcttcttcttccttggtggcatatacttctctactccaatattatggcactttgaagcattgtgatcagaatgcccacatcgacgacaatgcataattcttttctctctactgagtttcttcttctttgaaggtatgtaacctttcttaattctcataaacaaagtatgtaacctttctgaattctcataaaccctgatggcttgatcttatttttctattaatttccttatttatttgtttaaattcaattaaaatttattcggtatatagaattaagatcactttcacagcagaatttcaattgattttgtttgcttgcttgtaattttgatgtggtctaaattactagcatttgttttcttcttctctttggtttttacgtacaaatccattgttataaccttctaatacacaaactaattaacttttacttatactaatatttgtaatcgataaacaaacaatagttagaaaaaacttaatttttgagatatactagaagggctatattaatatctattcccaaagatgagaatattaggtattcatgcatgaaaactgagaaattaaccttttcttttttcgactaatttatgacgaaaaagcttccacaaaatcgaaataacgataacagtttatagcataggtccaacaacattaaatgctaaagatattttggaatatatttcccgccggaattggaataaagatattgtaaatgattactgatatgtatggggttgcaggtatatcgaatatatacgttggtcggtttattagcattgtatcctctttccttcaataacccacatctatcacactaaatagcttagcctccgacaactttaatgcaagaggaagataaacacaaagagaaatctaagctgaaaagtaaaagtaaaaattatgagtattacgtatattattgttaatgataacaagagtgatatttttactttagggtttcatagatatgaataacaagaacgctaacaaatttgttattgccgaaactccagcaggtgaaaatggtgttcgcggtgagattggtccctaggaatggaaaaactatgaaaacggctcgcaaatggatgggtttgcactaggagtccgactgcgtgagcaaaatgggtttgccaaagtggtaattatggcggtaaaagaaaagttagcgctgggttatgaagacaatatcgagttaacatatcagtggccactgtggatgatgggccctgattggaaacgagcaaacccaatcgatatattagacgatgatgacatgaccctgttcatggcgattagggccgatctagatgaagtgcatctgcaagtaaagattatacgaggtgggaatgttcgaaacgttaatagttatcggagtaacatggatctaagtggcctaagttcaaaagaaatataggaaaaatactagaataacgcaaaaacgagggctgtatggggaaccgaactaacaatgttgatgcgtaacaatttagatgaaaactaataactatagtcttgagtatattgtagtaaatattatcagctaatgataatatcggacactattacaatttagagaagtatatattttcatctcaataacattagtcgataatttagatatcagctaatagtatacctgtttcaggtgacgcaaacggtatgaaaacaatggggaaagacaatgagatgactataagtaaaggcaaggagcagcacaacacgtattgaggggttaccataagagacaacatggatattacatctgggactaccagcaaaagtaacacaaccaggggcaagtacaagcttgaaaggaaaagagaaagttattgatgacgaggagagggaaagagattgtttatttgagatgtggcgaacaaatcaacaaaaagaaacgtggcgagatatgtgtgtaacacaaatgaccttgtgaggaactcaaacaaatacaacaaaaagtgtgcggcaaagagaaaacagcgagggccctagatttcggaagtggccattaggcaaaaagagatccaaatgaaaatttgcgcctgactcttgcaagtgcataaacacatgttgttgggccaaaagtggtgccctatcttctagcgattcaaccttcggaacgctaacctcgctttccacaagcatttgtttttgtagcgaagacctaatggatgatactgactcatcgaccaacaatagcttatcggtcataggtgagttatctaatcattcatatattatccgataattatcttatgcgttattaacaattattcaatctttttaacttttaactgtaggtgacgaaacactagtacacttttactctgatcctgatagcccactcattatggatcctcaacccatcacaatgattgataaagtcaaaggtctaattatagaggacgaattatccactaaagagataggaacagattcaactaacacaagagtatcagaggtatcgaggtataatgataggggacaaattacccactaaagagataggcgataacttgattaaattgaaaagaacttagtgattaacaatagagttatcgaaaactatgttggtaaatgttaacaaagttaatcgataagagtattaccgaacatttctcatccaactctttagcattctcgagcttaaaggaaggactctcgagggacctcttcaacatcgtcttctgcgcctttatattcagactcaattgtctcatcaattacaagcccttcttgaatagattgagctgcctgtaagataaccaattgtcgagcgtacaacaacccctgaacaacgaaacacgtacttgctaattgttcaatttccctctcttttattgacttaatcatcatctcgaaagtggaacagccccagggataagcaagaaatgcacccacatcgtcagccattttagcgtgcgcctaaacaattttaggataatgaaaggtaacgacaaggaaaccgtcgacgatagctaagcaagcacatcagatcctcataccggaatttgagacattctttctcttcaacatcataataacccaatccatggtaacatcttcttcaagcctaataaacttaatgtaaaatggaattgtcttctccgtagtgtctttcttcttcttcatcttcaagctcgaatacttcccacatggtaatccagtaacgatattaaattctctcaaagaaaaacgaataggagtacccgcaaataacacccaaattttgtttggcttcgccacctccaactgtctacctaatataaaaattccaaagctcacggaccagtcgggtttgttaggaaactccaacaggcgaccgaaaggagatcgagaaaggtactacagttcaccattgtcgagggcgttgaagataccgcattgattattcatcttctaataaacattaactttctcgccgcgaggttcttcgccaaaagctaacagacgtggagggagaggaatcgaaggcatcgtttctagaaaaaaggataaaccctagtaaaacaacacaagagatgtagtcgaaataaaaatcaaagaggaaaaatttagattgattaccagaacaagtcgtgaggaacaaaacccagatttgagagataaacttttgctcgaaaaacagaaatatataatacaagaattttggggagtcgtttcttatttccttctgcctcaaaacgctgtctctcatcttcatataggatcgaaaaagatgactgttcgttaaccgggaaagaaaaaaaaacaaatataaaatacacaattcccaaaacaatatctacataaaatcttctcataccgtctacaataatatcgctctactctctataattgactaaattgataacatagggatacatgcgtaaacaaaatgttaacagtagtgagggaacactagaaattgaagagagtgaattatcgagtcgtctgagcatatcgagtgatatttttcatactaaaagcttggtacatcaatcatgatagtaaatataattaattgtagtcattcttatttaaatatgatttttattattacttttaaatgaatctattataaatgattgatttctctctctttcttttattaattataagaaatatattcaccacatcggaaaaaacatttttgtaatttttgaaatgtttaacaaggatataaaaaattcattttctacaggtatctacaaaatcacaaatacagagacttggaccaccctttagaaaagtgtgtaagcctttttcactttaggtgttaaatagtgttaattgtagtcattcttatttaaatattatttttgttattacttttaaatgaatctattataaacgattgatttctctctctttctttttttaattataagaaatatactcactacatcgaaaaaaacatttttgtaatttttgaaatgtttaacaaggatatagaaaatttattttttacaggtatctacaaaatcataaacacagagacttagaccaccctttagaaaagtgtgtaagcctttttcactttaggtgttaaatagtgtggaagacattagttgtaagtctttatatgatataattcctttgttccatcaaatgtgatgtctaatagatattcaatgtctgacacaatcagaagattgtaatattaaacactaatcttataattatacgaaacaacatatcattggtttaagtccatacaaaacagaaaaagacatcaaactcaaaacagacgtacacaaactaaactaataaaacattaaatcaaagacttatcttgtaaagtaattcaagcggccttcagccatatccctccatgaataagcttcgtcacattaaactggtaggcttccttcgaatctctaataactggataacttaacaaaaaaataaaaaataattaaaaaaaacaagaataaacttgtaaaataaaagtgaattgatctatttgcgttaaataattaattttttctccacccttaaatagattgtacaatcaagactgaatgtgatgcatcttattatcgacgcatgtgagaattttgcctagataaaaattcatgtctttacactatagtgccaattactcttggaacattgtggatgtttcgataacaaagatatatgaattttcatagattccaaacatcatgctcctcctgtcaagtttatgctcttgtgagtaggagtacaattatcataaaacaggccctaactgttcaacaattatcataatacttacaatatcatcatttgaagcactgttttgacgtctcttttcacattgtcttatgtgtccatgtaatatgataatcgaggatgagcgtgatctcgatgcactgattgaagttgaaataaaagatccaccttcagcagtccaaatagcagaagatggtgatatccagttccaagagtttctaagttgatttagagaagtcaaagataaagaagctgatttttcactttaaaatgcactaattgattatttgtgagaaaaatataatattgcctatggttaaagaaatctataatattttcttatttttaaatgatgtaatgctttttttctttaataaatgtttaattaaaacaatgataattttttatgaaagttttgtaagagttaaagtaaatggattaatttgcaacttttgtaaattaaagataataatactaaaataaaaagaatctgaaatatttttttatatagaaaaaattgagacaaccattagagtgaaactcacctctattatatagttgctatattttagagaaaaaaatatagaaacaactagtgaaaatagtgtaacatagctaattagaccatcaccaatgggggaaaaattgagctctcatgagaggttctctcatcaattttggaaaaaaataaatcagaaagaatgtattttgagagagctgtttctcttgagagagctttggaggtgaagagaggcgcacacgtgtcacattttaattggttgatttttataaaaaaaacgtgtgaaagaatccgtttttttctgcaaattttcctcgactacctctctctctttttaggcaacggcggtggcgattgatagtatgagttttgctccgacgattgagagtaggattgaagctactttcctttaatcatttctaattttgcaaactaatttcttcactttcatctttgatctctctggaaaaataactaatttgagttgttggaattaacttgttgaatttttctctgcaaattgtttggaataaggtaacgtttcctctatgtccacaattttgtgtgttattccaataattgattgtttttctctctttctcaattgttcatcgttgatatcgagaatgcatgaagatctataggaaatagttttacattcgcgtagattcggattgcaattgtgtagattcggattgcgatttttgcttcatgcattagctcttgatcgatagttagattgtacctgtttggattggaaatgtctctgatgttgttcgatatcctaattttttgttatttataacttttttatgaggtaattatctagtagaactcaaatcgagctccgtttgttttttatgcagtggaatgcgagcaaaatttttgttttcgaagcatgaaatttttttgctggacatagcaattattttgttttcgaagcaggaaagtttcagatgtttttggtgtttgtatatgatacagacaattttaacaaaaaagtaaacgtttgaggcggactcaaagaaagaaatcaagaagttgcagcggtatagagacctcagatcaagacatggattcagtccagtgagatcaaagataagaaagtcagtggtctttatcttcaacgccttttcttttaactgactaaggatgcgacttggctcccttgcaatctcttaacttgcacatgcaaaccgtaatctatggctatgtgtttagttatctctcctgtttaaagtttgtggtgatgatttcaatattatcatcttataactaaagcttgtctaacatctctagctactttactttggtttcatataagctgagaggagtggcttcatctctgtgagaaagaaaccaagacaagaccaagacaagggatggctgaataatgtggtgagttgttttaccgtattcgtgcctaaatattgattcttgacccctttctttaacaaaaacgtcaaagaagacaaatgtttatggtgtttttgaaatatatgcaacgttatgcaaatgttgtaatttatgctatgtgggtgaggcaatgtcttttggcttgtttttctctttcagactcatcttcagacatctattacaaggcataaggatcacataataaagttggaactgatcttgaggcacaaggatcattttcatttttgtaaagaatcccacttagagaacctaccattggaggatgacaaaattaataaattttctaaggttctaaagcaccctcaatagtgtatcttaggtatatcttaacaaaattttaggattaaaaatgattaaattaaatcaaactaacaatcttaatctaagaaatgtatctaacataagatgtttttgcttagctaagatgtgtctatgtgtcacttcctaattggtttaagaaatgaacaatagggaaaacaaaaaaaaaatgcaaaattaattttctatccttaagatacaattgaatcttaaccattggagatcatttttgttaagatacttaacttttagtcttagctttcaaaaggcaaaattttatttttaaataatgctaagattcaaaattaagaactaattgattcttaaccattgaggatgctcttacctattaaaatttccaaaaaatagaaataaaatattggtgagggtcaataggtggctctcaccattggagatgctaaatagctacttaacgtaaggcccaccaaaccaccatcatgtgcttcttttctattttttattttttttattgatatttgttattggaccaccatgtgtttatagtgcctcatcaatatcccacacacaatatgatgcctatatatatatgggtaaattatatacagtagccattgacccacttttattttcaaattttgacactgtgggcgggacctttcaattcttagcctttcagccaaaaactgaccaaaatgcccctgacgaaactgaaccaggtttgtacctacggactgcatcgttggaatccaattgaagcatacactgttcaccgacgggaagtgcataaaatattttctgggtttcggcgaatttgacattatagcttggaattaaaattttaaaaaaatttgttgggctcagatgttttaaatgctaaaaagttttgacaagacaaaaaatcatgattacctattataatagagattatattataagatatttacataattaagattagaattctgggaaaaaaaacgaatccaaattgtgttacggtgaagaatctgaagtttttagttgctgttttacaaagtttgaaggtttgaaggggagacaatctgtgatctgggtaagaaattcgtgttaatcttattaattacacttgagaacgtgatatgaaagtaatgatccgttttaatttttttttaagtttataaattgttttgttggagattctttttatctttgtagatataaatgaaagccctatgatctgttttattaaattcctaagttcatcaattgttttgttagagattctttttgtcttcgctgacataaatgaaagccttcaaaaagatctgatttttttgtatttaatgttgttctgacctgaggaatttatgttgcaggtatggagttacctgtattaattatggttggtgagtggatatacaaagaagaatgtttgaaatatgaagctgagaaaaggaagtttcggacgttctgtacgtattacagacacaacgacgtacacggatttggcaagtacaatatgtgatattttcagtttcaagtttagtgaatggaaccctataataagttactggatgcctggaaagatgtctgatatgatagcaagtaatcgccctccagtatatattgagaatcaaatcagcctggatacatttatgttgattcgtaatggcgatccttctgttaacttgtttgtgtctttttactctatcggcaagggaggccatacagagacagaggttacaaatgttgatgtatctcataatttttacgaagatataaatgtagatgaggatgacatagatgaaggtgatgaggatgaatatgaggacgaggataatgaagaggacgaagatatggatgtacatgacgatgacaccgatagtgaatgtcgtggaagtaccctcgaccctacaatagacggtagtgaaagtagttgcgaagattacgattacaataaatggggtgatctgattgtggaagaatatggaaatggtcatgttgaggaggacgtcgtgaataacactcaacaaaccgtggaacccacaggggaattcactcgtctattggcattgtgtacgtcaacagataaacatgtacatcatgtagaacccactgctgttttggttgacagtacaccaacctctgctccatccccgacgtgtcaacatgatttgtaccaatgtacgtacactagagtctgtgtagaggagacaagatgcgaaggtgaattagttaagtacacggctgcaaatgtggatgatatagctgagaacgtaactggagatgatggtatagtcgtcctagaaggggtttctgcaagtgggttaaatattgaatctgacgaccgtctagtgacaacaggtgaagcctacgaagtgtataaaaggttttctacattgcataatggtgagaatgagtttctcgataccaatgctgctcctgtattcgatgatttagccaatgttcgagtcgatgcgaaataagttgaattgagtacgtcaggtcatctcttgtatgtgggaagtgttttcaaaaacaggcaagtcatacagcagactatgcgacttgttgcaatcaaaaggtgcttccgctacaaacaaactcggtcatgccctaaaagattagagatggtttgtgtagatcacaattgttcatggcatttgactacacatgtcatacccaattccaaatgtttcaaaatcacagggtatgattctatccatgtttgcaagatcgagagtcaaaatgattatcgtaaacatgctacttacaagcttttaggcgaggttatgaagaatagatatagttctacgcaagggggtccgagagctgtagatttacctcaattggacttaaatgatcttaattttggatctcatattctacagcatggagagctagagaggttgcagtaaactctataagggttgatgatatggccagttacaggtttttacctacatatctgtatcttctacaattagcaaatcccggtacaatctgtcatctccactccactcctgaatctaatggtcgccagcgcttcaaatatgtattcgtttctctctcgacatctataaaaggttggaaatatatgaggaaagtcgttgttgtagacggaacgcagctgattacactgtattttactcattttaggtatatgtatatcatcatttagctttgcatttgctcattatatcatgtcattttagcttattttgcatacttaggcatctaggatcgtcttgcattcgcattgcatgttttggtgtgttttcaggtgcagaaggagctaaaaaggactctactcgatccattcactcgatccaggcagctacagcagaggtatcattctactcgacctctttactcgatccaggatgctacaaaggaggctgcagtttactcaaccttcttactcgatcaaggcagccttagatgaagcagcagattgatctactcgcccctcctactcgatccactactcgatccatttactcgaccaagggtgaccaactctacaagacttgttgagctatcaaagcgtcttcggatcctcctcattccccactcaaccagacatctgagcatacggataggagaggatgaagcatctactcgaccaatagatcactcggagcatagacacaaaggcgcagactttgcagcaccctctttactcgatccccaagatcgagtattcgcccaaaccgcctcaagtctcttgtcttctagtgaatctaggggttccaacattttagtataaatagatcactttgggatttgtccaaaggatctatgctttatctttcagtttttctttgtgtttatgaatcttgaaaccttaattactcttaatctattttgtttttgcatttgattgtttaagtaaagttgtttagcttgtttagatctacattttggtatgattttagtaatttctgggtttgtgttcttgagaatgttgcatgagtagtgattagggttcttgaggatggattagattagggtaatctctaggttagttaggtggttagtgtttaggtttataaccttctggattcgcttggcccctatgcggtttttgctggctaatgtggagattcgagcatagacgttcagcgtccaaaagacgttcaaatggatgtctgacctacgaattccagagatttgtagactcgaccaagggattggcttgtctgcctattggctttggtagattgtttcttaaaccctgctctgctatgttacatcaacgagagttgagattaggaagtggtagagttatgggggtctctatcacgagagtggattgacccggtttttgaatctatcgtcatgggtatctacctttcgcctattagccatctgatgaaccctagagctgcccttatcaatgaatccatccttataacttctattagatttatttgtatcccctgttgattgcacttttatctaccggttatttgtatcctctatttgcatcccctattgattgcattttagttcttaattttgtcacatgttggttctactcgacccaatgatcgagtagggctattaggttctcatttttacttgtttgaatcctgacctaggattgttactagaaacccaccatcattataatctggcttgacttagtagtttctgtacacatcttgattgctagcaatacagtgcactggattgacaccccctatagctacatcgacatgtttgtgttttaggggaattgaatgaatctcacacacattcaacataagtaggcctgaaaaaccttcttatcaatttgacgccgttgccgattcattattgcattgttacattcaagatatccgaaacttttaagatcaagttcttttacatttatcaagttactaactcatattttcgtttgcttgtttttgtggtataggtactaatctttgtgcatgattatcgtaaacatgctacttacaagcttttaggcgaggttatgaagaatagatatagttctacgcaagggggtccgagagctgtagatttacctcaattggtcttaaatgatcttaattttggatctcatattctacagcatggagagctagagaggttgcagtaaactctataagggttgatgatatggctagttacaggtttttacctacatatctatatcttctacaattagcaaatcccggtacaatctgtcatctccactccactcctgaatctaatggtcgccagcgcttcaaatatgtattcgtttctctctcgacatctataaaaggttggaaatatatgaggaaagtcgttgttgtagacggaacgcagctgattacactgtattttactcattttaggtatatgtatatcatcatttagctttgcatttgctcattatatcatgtcattttagcttattttgcatacttaggcatctaggatcgtcttgcattcgcattgcatgttttggtgtgttttcaggtgcagaaggagctaaaaaggactctactcgatccattcactcgatccaggcagctacagcagaggtatcattctactcgacctctttactcgatccaggatgctacaaaggaggctgcagtttactcaaccttcttactcgatcaaggcagccttagatgaagcagcagattgatctactcgcccctcctactcgatccactactcgatccatttactcgaccaagggtgaccaactctacaagacttgttgagctatcaaagcgtcttcggatcctcctcattctccactcaaccagacatctgagcatacggataggagaggatgaagcatctactcgaccaatagatcatgaaaggccccgatccggactgcctaaagtccgggcgagttctctcgacccaagccactaagtgactcggccctaaccgtttatgaggttctttcctagtctaatccgtttcatatgattccgagattcaatatatgagacgaatagagtaaacaaacaatcggatactttattaattaagcaaaggattcgatacaacctatgagtttgcatataagctattacaagtcatataatcgatccctagactatccgaactatcaccacccatcatcccggccttgagtctctcgcgcctaagccaagtccttcccacgatcaccattcgttcctgaaagtcatagagccataagtaatcttatttacttaatcatatgcaagtccatgcaatgctctatatgccatacactactcggatccgtggagagaattcagagaggggaagatcgcgcatcagtccggccgattctcggcaggtcagttaagacccgccggtcctccgccgagccgcgtccccgcctcagccgatccctacccggtccgagtcttgtgtaggatgcacatgacccggatactactcagcccgcgggcgttacagatcactcggagcatagacacaaaggcgcagactttgcagcaccctctttactcgatccccaagatcgagtattcgcccaaaccgcctcaagtctcttgtcttctagtgaatctaggggttccaacattttagtataaatagatcactttgggatttgtccaaaggatctatgctttatctttcagtttttctttgtgtttatgaatcttgaaaccttaattactcttaatctattttgtttttgcatttgattgtttaagtaaagttgtttagcttgtttagatctacattttggtatgattttagtaatttctgggtttgtgttcttgagaatgttgcatgagtagtgattagggttcttgaggatggattagattagggtaatctctaggttagttaggtggttagtgtttaggtttatacccttctggattcgcttggcccctatgcggtttttgctggctaatgtggagattcgagcatagacgttcagcgtccaaaagacgttcaaatggtgtctgacctatgaattccagagatttgtagactcgaccaagggattggcttgtctgcctattggctttggtagattgtttcttaaaccctgctctgctatgttacatcaacgagagttgagattaggaagtggtagagttatgggggtctctatcacgagagtggattgacccggtttttgaatctatcgtcatgggtatctacctttcgcctattagccatctgatgaaccctagagctgcccttatcaatgaatccatccttataacttctattagatttatttgtatcccctgttgattgcacttttatctaccggttatttgtatcctctatttgcatcccctattgattgcattttagttcttaattttgtcacatgttggttctactcgacccaatgatcgagtagggctattaggttctcatttttacttgtttgaatcctgacctaggattgttactagaaacccaccatcattataatctggcttgacttagtagtttctgtacacatcttgattgctagcaatacagtgcactggattgacaccccctatagctacatcgacatgtttgtgttttaggggaattgaatgaatctcacacacattcaacataagtaggcctgaaaaaccttcttatcaatttgacgccgttgccgattcattattgcattgttacattcaagatatccgaaacttttaagatcaagttcttttacatttatcaagttactaactcatattttcgtttgcttgtttttgtggtataggtactaatctttgtgcatgattatcgtaaacatgctacttacaagcttttaggcgaggttatgaagaatagatatagttctacgcaagggggtccgagagctgtagatttacctcaattggtcttaaatgatcttaattttggatctcatattctacagcatggagagctagagaggttgcagtaaactctataagggttgatgatatggccagttacaggtttttacctacatatctgtatcttctacaattagcaaatcccggtacaatctgtcatctccactccactcctgaatctaatggtcgccagcacttcaaatatgtattcgtttctctctcgacatctataaaaggttggaaatatatgaggaaagtcgttgttgtagacggaacgcagctgattacactgtattttactcattttaggtatatgtatatcatcatttagctttgcatttgctcattatatcatgtcattttagcttattttgcatacttaggcatctaggatcgtcttgcattcgcattgcatgttttggtgtgttttcaggtgcagaaggagctaaaaaggactctactcgatccattcactcgatccaggcagctacagcagaggtatcattctactcgacctctttactcgatccaggatgctacaaaggaggctgcagtttactcaaccttcttactcgatcaaggcagccttagatgaagcagcagattgatctactcgcccctcctactcgatccactactcgatccatttactcgaccaagggtgaccaactctacaagacttgttgagctatcaaagcgtcttcggatcctcctcattccccactcaaccagacatctgagcatacggataggagaggatgaagcatctactcgaccaatagatcatgaaaggccccgatccggactgcctaaagtccgggcgagttctctcgacccaagccactaagtgactcggccctaaccgtttatgaggttctttcctagtctaatccgtttcatatgattccgagattcaatatatgagacgaatagagtaaacaaacaatcggatactttattaattaagcaaaggattcgatacaacctatgagtttgcatataagctattacaagtcatataatcgatccctagactatccgaactatcaccacccatcatcccggccttgagtctctcgcgcctaagccaagtccttcccacgatcaccattcgttcctgaaagtcatagagccataagtaatcttatttacttaatcatatgcaagtccatgcaatgctctatatgccatacactactcggatccgtggagagaattcagagaggggaagatcgcgcatcagtccggccgattctcggcaggtcagttaagacccgccggtcctccgccgagccgcgtccccgcctcagccgatccctacccggtccgagtcttgtgtaggatgcacatgacccggatactactcagcccgcgggcgttacagatcactcggagcatagacacaaaggcgcagactttgcagcaccctctttactcgatccccaagatcgagtattcgcccaaaccgcctcaagtctcttgtcttctagtgaatctaggggttccaacattttagtataaatagatcactttgggatttgtccaaaggatctatgctttatctttcagtttttctttgtgtttatgaatcttgaaaccttaattactcttaatctattttgtttttgcatttgattgtttaagtaaagttgtttagcttgtttagatctacattttggtatgattttagtaatttctgggtttgtgttcttgagaatgttgcatgagtagtgattagggttcttgaggatggattagattagggtaatctctaggttagttaggtggttagtgtttaggtttatacccttctggattcgcttggcccctatgcggtttttgctggctaatgtggagattcgagcatagacgttcagcgtccaaaagacgttcaaatggtgtctgacctacgaattccagagatttgtagactcgaccaagggattggcttgtctgcctattggctttggtagattgtttcttaaaccctgctctgctatgttacatcaacgagagttgagattaggaagtggtagagttatgggggtctctatcacgagagtggattgacccggtttttgaatctatcgtcatgggtatctacctttcgcctattagccatctgatgaaccctagagctgcccttatcaatgaatccatccttataacttctattagatttatttgtatcccctgttgattgcacttttatctaccggttatttgtatcctctatttgcatcccctattgattgcattttagttcttaattttgtcacatgttggttctactcgacccaatgatcgagtagggctattaggttctcatttttacttgtttgaatcctgacctaggattgttactagaaacccaccatcattataatctggcttgacttagtagtttctgtacacatcttgattgctagcaatacagtgcactggattgacaccccctatagctacatcgacatgtttgtgttttaggggaattgaatgaatctcacacacattcaacataagtaggcctgaaaaaccttcttatcaatttgacgccgttgccgattcattattgcattgttacattcaagatatccgaaacttttaagatcaagttcttttacatttatcaagttactaactcatattttcgtttgcttgtttttgtggtataggtactaatctttgtgcatgattatcgtaaacatgctacttacaagcttttaggcgaggttatgaagaatagatatagttctacgcaagggggtccgagagctgtagatttacctcaattggtcttaaatgatcttaattttggatctcatattctacagcatggagagctagagaggttgcagtaaactctataagggttgatgatatggccagttacaggtttttacctacatatctgtatcttctacaattagcaaatcccggtacaatctgtcatctccactccactcctgaatctaatggtcgccagcgcttcaaatatgtattcgtttctctctcgacatctataaaaggttggaaatatatgaggaaagtcgttgttgtagacggaacgcagctgattacactgtattttactcattttaggtatatgtatatcatcatttagctttgcatttgctcattatatcatgtcattttagcttattttgcatacttaggcatctaggatcgtcttgcattcgcattgcatgttttggtgtgttttcaggtgcagaaggagctaaaaaggactctactcgatccattcactcgatccaggcagctacagcagaggtatcattctactcgacctctttactcgatccaggatgctacaaaggaggctgcagtttactcaaccttcttactcgatcaaggcagccttagatgaagcagcagattgatctactcgcccctcctactcgatccactactcgatccatttactcgaccaagggtgaccaactctacaagacttgttgagctatcaaagcgtcttcggatcctcctcattccccactcaaccagacatctgagcatacggataggagaggatgaagcatctactcgaccaatagatcatgaaaggccccgatccggactgcctaaagtccgggcgagttctctcgacccaagccactaagtgactcggccctaaccgtttatgaggttctttcctagtctaatccgtttcatatgattccgagattcaatatatgagacgaatagagtaaacaaacaatcggatactttattaattaagcaaaggattcgatacaacctatgagtttgcatataagctattacaagtcatataatcgatccctagactatccgaactatcaccacccatcatcccggccttgagtctctcgcgcctaagccaagtccttcccacgatcaccattcgttcctgaaagtcatagagccataagtaatcttatttacttaatcatatgcaagtccatgcaatgctctatatgccatacactactcggatccgtggagagaattcagagaggggaagatcgcgcatcagtccggccgattctcggcaggtcagttaagacccgccggtcctccgccgagccgcgtccccacctcagccgatccctacccggtccgagtcttgtgtaggatgcacatgacccggatactactcagcccgcgggcgttacagatcactcggagcatagacacaaaggcgcagactttgcagcaccctctttactcgatccccaagatcgagtattcgcccaaaccgcctcaagtctcttgtcttctagtgaatctaggggttccaacattttagtataaatagatcactttgggatttgtccaaaggatctatgctttatctttcagtttttctttgtgtttatgaatcttgaaaccttaattactcttaatctattttgtttttgcatttgattgtttaagtaaagttgtttagcttgtttagatctacattttggtatgattttagtaatttctgggtttgtgttcttgagaatgttgcatgagtagtgattagggttcttgaggatggattagattagggtaatctctaggttagttaggtggttagtgtttaggtttatacccttctggattcgcttggcccctatgcggtttttgctggctaatgtggagattcgagcatagacgttcagcgtccaaaagacgttcaaatggtgtctgacctacgaattccagagatttgtagactcgaccaagggattggcttgtctgcctattggctttggtagattgtttcttaaaccctgctctgctatgttacatcaacgagagttgagattaggaagtggtagagttatgggggtctctatcacgagagtggattgacccggtttttgaatctatcgtcatgggtatctacctttcgcctattagccatctgatgaaccctagagctgcccttatcaatgaatccatccttataacttctattagatttatttgtatcccctgttgattgcacttttatctaccggttatttgtatcctctatttgcatcccctattgattgcattttagttcttaattttgtcacatgttggttctactcgacccaatgatcgagtagggctattaggttctcatttttacttgtttgaatcctgacctaggattgttactagaaacccaccatcattataatctggcttgacttagtagtttctgtacacatcttgattgctagcaatacagtgcactggattgacaccccctatagctacatcgacatgtttgtgttttaggggaattgaatgaatctcacacacattcaacataagtaggcctgaaaaaccttcttatcaatttgacgccgttgccgattcattattgcattgttacattcaagatatccgaaacttttaagatcaagttcttttacatttatcaagttactaactcatattttcgtttgcttgtttttgtggtataggtactaatctttgtgcatgattatcgtaaacatgctacttacaagcttttaggcgaggttatgaagaatagatatagttctacgcaagggggtccgagagctgtagatttacctcaattggtcttaaatgatcttaattttggatctcatattctacagcatggagagctagagaggttgcagtaaactctataagggttgatgatatggccagttacaggtttttacctacatatctgtatcttctacaattagcaaatcccggtacaatctgtcatctccactccactcctgaatctaatggtcgccagcgcttcaaatatgtattcgtttctctctcgacatctataaaaggttggaaatatatgaggaaagtcgttgttgtagacggaacgcagctgattacactgtattttactcattttaggtatatgtatatcatcatttagctttgcatttgctcattatatcatgtcattttagcttattttgcatacttaggcatctaggatcgtcttgcattcgcattgcatgttttggtgtgttttcaggtgcagaaggagctaaaaaggactctactcgatccattcactcgatccaggcagctacagcagaggtatcattctactcgacctctttactcgatccaggatgctacaaaggaggctgcagtttactcaaccttcttactcgatcaaggcagccttagatgaagcagcagattgatctactcgcccctcctactcgatccactactcgatccatttactcgaccaagggtgaccaactctacaagacttgttgagctatcaaagcgtcttcggatcctcctcattccccactcaaccagacatctgagcatacggataggagaggatgaagcatctactcgaccaatagatcactcggagcatagacacaaaggcgcagactttgcagcaccctctttactcgatccccaagatcgagtattcgcccaaaccgcctcaagtctcttgtcttctagtgaatctaggggttccaacattttagtataaatagatcactttgggatttgtccaaaggatctatgctttatctttcagtttttctttgtgtttatgaatcttgaaaccttaattactcttaatctattttgtttttgcatttgattgtttaagtaaagttgtttagcttgtttagatctacattttggtatgattttagtaatttctgggtttgtgttcttgagaatgttgcatgagtagtgattagggttcttgaggatggattagattagggtaatctctaggttagttaggtggttagtgtttaggtttatacccttctggattcgcttggcccctatgcggtttttgctggctaatgtggagattcgagcatagacgttcagcgtccaaaagacgttcaaatggtgtctgacctacgaattccagagatttgtagactcgaccaagggattggcttgtctgcctattggctttggtagattgtttcttaaaccctgctctgctatgttacatcaacgagagttgagattaggaagtggtagagttatgggggtctctatcacgagagtggattgacccggtttttgaatctatcgtcatgggtatctacctttcgcctattagccatctgatgaaccctagagctgcccttatcaatgaatccatccttataacttctattagatttatttgtatcccctgttgattgcacttttatctaccggttatttgtatcctctatttgcatcccctattgattgcattttagttcttaattttgtcacatgttggttctactcgacccaatgatcgagtagggctattaggttctcatttttacttgtttgaatcctgacctaggattgttactagaaacccaccatcattataatctggcttgacttagtagtttctgtacacatcttgattgctagcaatacagtggactggattgacaccccctatagctgcatcgacatgtttgtgttttaggggaattgactgaatctcacacacattcaacataagtaggcctgaaaaacctgcttatcagcagctagtcggtcgttacaaaggatgcctcctcatagcatgtgcacaagacgggaacttccaaatctttccattagcttttggggttgttgacggcgggaccgatgcttcatggattttgttctttgagaacttatcagagattgttccagatactgacgatttgatgattgtctcagacatgcatttttaacatatataaaggcgtcagtgtggtgtacccgaaaacccatcatggagcatgtatagtacacctggagcgaaacatatcggtgttttacgcaaggtacggtgtgtctggtttattctttcgcgccgctaaagcatatcggattagagattttgaaaaatactttgaagagttaagaggtcggagtcccggatgcgcaaagtatttagaggatgttggatttgagcattggacaagggcatattgcaaaggggagcggtacaatatcatgactagcaacaactccgaggcaatgaacaatgtcttaaggaaggcaaaagcttatccaattgtctatatgctacagttcatccgagaggtcatcatgcgaagatttgcagcaaggcggaaaaaagtgttgaagtgtaactctttggtgaccccggaggtagatgaacgttttctccaagacttgcctgcgttaggaaagttcgcagtcatgatgtctaggccatggagttatcaagttacttcaaagagtggtgagcattttcacgttgtactagatgagtgtacgtgtacttgtcttaggtacacgatgttaagaatcccatgcgagcatgctctagctgctgcaatacctttttggcatcaacccgaaggctgaggttggattgtggtatagctttcaagtgttttctaattctttccaagaacctgttttacctatagcggacccaaaagacgttgttattcctcaagatttatcggacctgattctcatacctccacgcagcagacgaccacctaggagaccacccaccaaaaggataccatctactggggaaaaccgggtaagtttttcccccatcctaactgctatgcaatttttacttcgttttaaccgacttactattttataactttcaaaaaaagaggcagaaaagactcattcctaatcaatgtacaagatgtcaaaaaaccggtcataacaagaagacatgcaaaaaccctatttagtcctcgcgatggttatagtttacgtctttgtgcttttggaagatgttctacgtacgtttttggaaatctttttatcagtctatgttgtaatattacatattattttgtctgtacgtacgtttgtggacctcgtattatcggtgtatttgattatccttcaactcttttgtcaatactgttgttgtctgtacgtacctttgataaacgttttcatttgtacgtacacttcgtaaatctaattataaagagttgacggttacattttttactaaaccgttacatcgatttgggaccaatcatcgcgtctttttaaaatctatttcagaacctggtaataacacccttcattcattcaaacaaaagtctaaacccatcacacaaataatacagaaagttggttattctgggttttttttggcatcatggatgctggatatcatgccattttcgaactttgtccaatgatcaccggatggagtatacgcgcttttgtggtcagggtatttaagaaatgcgtgggaataaatgagttcgacgtgggtctcatcttggccgataatcgagtactatttcgccaatgtgtttataacgtttttactttcacatatcttacatgtcactaatcatgatgatttggtgcagggaatgcgttcccgcatagaggctaccattaatcgtcgcattgcttcgttttactctgaccgtatccgagaaaatgagtggatagttatcaatactttctcggtttgtctccacgacgaggggatacacaaaacgtcccatgactaccggatctgttttatggatcagaccattgttaccaaagttttgggattggctgtaataccgtattacgattttactccttttgactacatcatcgagaggatagtttcaaccggagtgttagtcggttagtatatttgactctctattcattcttgtatatctgtacgtacacgtaatacttttatcttttattacgtacaccagatgtgattggtgcgctcctttaggttggcaacttgactgaagactaccgtgggctgaaccttccttttaagataatggatcaataataagtgtccctatgttattttttaaaaaaagtttcacctaaatgtttgttatatcctccatataatatatattctctgtagcaaggaagttcttcaatgtgaaacacacaatgatcaaactttggaatttcaaagattcttccagcggctaactggtcctcaaaatgttattgctctcgtatcgtggcgtctgagcgggatttataaactgaaggttgtgagcaatggccccatctccaaagtcattgctaatccggatataccggaagtggaagaaatcagagtagttgtctattagtttatctcttgtttctgttattcttaataactacacatttgtaaccgaatttaaacatatcatttatttatgctaaagttttacttattttcgacattatatttcatggacgtatattgtatcagtgtacgttcaaactactacagtttacttattacaaaatacatcataactgtaatgactttccatggacgtacatttatatcggtgtacattcaaatagttgttctgtacgttcaaaagcaacttcttgcctaaccttgtcttccggtgattgtggcagttcgattctgtgctcctccaacttttgtgactcaggagcaacaacttcttcttcacgattaccactaacacctttcgcaacatcctataaatatgcaaaccatacaaattagaaataacatgtacgtacactataattagtagtaccagacgtacctgattggacgaggaagatgcatcatctgacattttatcaatgcctgggtcagacagtatttgttttgactgcggtaggagttcttcaaagttaccaccatcaggaatgccttgttcgggctgttatgtcaaaattaagaacataaagaacataaaatattctgtacgtacaataatgaaatactaagaacataagttacctgctgagttggtgatggaacacgatcgacattgtcttccattatagagtcagagacatttcggtgtaacttggaagaatcttcatcaatctccgagttctctcctacctccttcgaaatcaaaaccatacacttggtcaataattgttcttttaaatcttcaaatttattatccaaaagatgtttttgcctcttgaagaaacgcctcaattcgaccgcatacttatcaaacgcttcgtctccaaaaccatcaccaccactgggtccaccttccccatcatcagagtgggtaattttcctttttttgttttcaacaggatcaagcacccgtctttgcctcttcaaaataactatataaaacggtttaatcatgcattactactcttagaagaacctaattctgatataagttatacgatgaagagaaatggttacctctctctcctgttattgagggccggacttgcttcttaggctcatcatcgcctccaacccacattttctcatcccactcctgcccagatttcaacatccttaaaatattatcaactcttgggtcctctttttctttcctccataccaaagattttgggcaatcattgtctgctgggtccacaatatatgtgatatccacctacatagataatcattgttaatttcagagtgtatgtacttcatctttttataccaatgtatgtacaacaacaactgtacaaacctgctcagtagcctcgcacgccaatatggtggatgtcttgattggacgcagtttggaaaggtttttaatagtcctctccgtaaagacggcggtatcttcttcagaaggtaggagactagcaataaactggatagtttcgaaagcaaagagttagagtccaagtgggaagccatggagtgcataagattgttgcttgcaaccattccggagtttttcaatgtcggtctctccttctttgaaacttgtgcaacgatccaaagttaggagaaatgatgtccttctccagggatatttgcagaagaaattcaggttcttcgtcagctcaactgtcatctcatttggtctcaggggaggagatgtgtcacatattagcaccccatccacaataataattagggcgagagctaatttcttccatggaggcatgtcagtttcagaaatcaatctatcccttaaatcttcaacttttggattagcattagcagatccaaacagagtattccaaactgttttttcacctgccttccgctgcataacagtttctatagcactatttttaagataggtttcacattccaaaccagttatacgtgccaattctcttaatcctaacctaataggatgaccactgaataccatccacatctcataacatttctttgtaactaactgatggcatattaacccaagaacaagtttaccagaaaaagatgccttgttagtagggatcctaaagaggtcaccaaatggagactctagaaggaacgtcatttctggtgtgtccttaagcgcagctgctatttgaccaatgtactccggtctggagtatgcatttatcttcgccttggtagggtagtggtcgagtgcaaacaacctctgtggtaattcacccggatccttagaagtacttcctgaaagttgaaaaagacgaaaaagttcttaacacgtacattatatcccaataccaactaaacataaactcgatattcatatacacgtacacctaaacttttatactcaatcaactgtttttggcgttaaacactaaaaaccctttgtcaattgaaaatttctgagttgaaatctctaaaattaacctagattttgcatcaagacattctccaaacgaagttagggcaaacttacccaaattagtcgtcgccgtcgatgactcattaacatctgaaactcctcgccgccgactactcttcctcgtctccgccatttgagtttttctatgaacagttaatcgataaacccgaaaatcgtcttattgttagacactttaacacgaactcgatcgaaatttcctccacttaatcaaagactcgaactcgaatagagcctcaatcggaataaggtttaagtttcgtcggaatttttctgcgtcttcgaaatgactcttcgtcggaactgttctacgtttctcgaagacagtttttgatttattttaagttttaaaattatttacttacgtttttttaaataattttaaatatttaaaattatttccgtaaccagaaaacggttcacgaaactgaaccggctccgtcagtttctcgttccagggcaaattcgtcaattttgggccgaatggttaaaacttggttggcccagcccactttgcctcttcctaaaagaaaaactcacagaggtggtcacggtgaaattttctttatatatatcatgttgcattctagcttcaaaacttggttggcccagcccactttgcctcttcttcgcgtcttagctaaaattcaatacctttggatggcgtcgaggccgggagttctgacggaatggccatggagtccccttggtggcttcaagttcttggttgccccgttggcgattgcaagcatacattcatacgtgacagctgaggaggaggagaaggacctatggagactaatgatagtggcgatgatgctgtggagaatattcacagccagatatggatcagtgtgtcgcgtcacaagacggccaagggaaggaagaagatcgtggatgtagtgttttaaaaaccttaacagtggacaagcccattgagttcgagcaagtggaccgagagcaatcttgggacgaccaaatcatcttcaacacgctcttcatgtatctcgtcaacaacaaactcccaggctgctcgcgtatccctcccaagccaccatcatgtgcttcttttctacttcatgctgttcccgtcgagttcttatactactggttccacagatctctccaccaccacttcctctactctcgttaccattctcaccaccactcctccatcgtcaccgagcccatcacgtgtatgtaccttcatctatcatttttcttctactaaatattatacatccctcaacatatttctttaatcaaaattggcagctgtggtgcaccccttcgccgagcacatcgcctactcagtactcttcgccatacccatagtaacggtgtccctatgtgggatcctctccattgttcccttcgttgcatacgttacttacattgacttcatgaactatatgggacactacaacttcgagtttttccctaagcgtctctttcatcattccctctcctcaagttcctctgctacaccccctcgtacgtctacactatatatacctacattgttaagatttgaactcacatatataaaacataacgtggcatcaaaatatgttgaaggttccactcgctccatcacacgcaatttagaaccaactactctttgttcattccaatctacgaccatatctacgggacgaccgacaaatgcagcgagtccttgtacgagaagtcgttggagagagaggaggaatcacccgacgtcatcaacctcactcacctcactacactcgactccatctaccaaatgcgccttggcttcccgtccctctcatctcgtcccttgtggtctagatccccatggtacctcacctacttcatgtggcccttcaccgtcctcttctctttcgtctccgtaacctcacccttcactctcacctccttccaaagtttgcatttcacgtaaggcatttcgtttacatacgcacacccactctatttatatattatcttaacatagaagggtttaattttgtaaattggaatttatggtttaaatcaatactgttccaaattttcacacacaaaatacaaaaaaaaaaaaaaaagtttctccctagcaagaaataacctttaaaaccaaaaagaaaaaggtaagaaaaaaaaaataggtgagaagataacctctaaatcttgtctcatgtgtatatcttttggaattggcatctaaaattttactactaattttgcatcataaacatgtggcggcagtataagttgcagcgctaccatgagtccatcaacaaaatcatagatgcagctatccttgaagcagatgaacagggtgtgagagtaatgagtcttggcctgatgaacaatgtaaggtcattagagcatccttaacggtgggttttagtgatggttcttagctttggattgattaaaattaaatcaataataggctttatttgagaaacccgctcttaactaagaggtttaaagagcctttaagaggcgctgacgtgtctgattgggtgtactgtgaaacgaaaaaaaacattatcctcctctctctctctctcttcctcctctttctttcgcatattctctccgattgcaaaatcggaagagatacgtctcgattatcactctccccgtcacagtggtgatgttggtgatcgtttttcactttcatcgatcggtggtgcagcctcactttagttcatttatttgggattgcagaaaaaaaatcatattttggctatatggattcgttaagagtgatgattcttgtagtttgttttttttgtttccctaacgttgttttgatggcatgtgtgagacaatttaacaagtagatatagctagacgaagctcaggtgttgatcatctgttctagcattttgaaattggttgatctgttgtgcaattgattgtgacatgttcttgtatcgcttaaactagaaagcaaatgtttgattaatagatatgtagctcgtttgttcgtggattagtctgactcttgtataacaaaccaaatttatcaactagttttaggtagataaagtgttcgatcatttgtctagcctttgattgacaactagttggttgatctgttgtggtatgctcttgaattgcttaatctataaagcaaatgtctgaagcactcatttatctattgtgcagctggttaagggggtgattggtaagaggctttcatggctttaaatggattctaaagcctttgcagtattttttttttttttttttttttagtttttaaggctttttttcttcttcctttctcttcctttctgaaagtcatcgtaaatgaagcttttaaaataaatattattaaaagcttttctttttcttctctaaacataattaaaagctctctacaaattacatatatatttttttcaaaatgtttttgataaattaatcattatcatttttctaactttcttttaagatccattacactaataataattttatttttttatcatcaccactaataaaagtagaaatcaattttattgagacataatattttgtcactatgccaacaattccataacaatataaattatgtgactaatttgtgactaactgataatggttgcaatacattcgtcacaaatttttttcttatcaaaaacgtcacaaacattgtgacgttatatttggtaattgttttgtaacaaacagcaacgagaaataaaagtaacaaaactgtcatatttaccgactataattagagtcttaaaaccgtcatatgtggtgactatcaaaatgtcatagttctgtcactaattaaaacgaaaatatagttactaaatcgttactagtgatgactaaaaaatcgttgctttatcgtcacatctaccgactaaaaacatcgtcgaaaaattgtcatatatcctgactatcaaaacgtcacttttgtcacatatgaaaacgaaaatatagttactaaatcgttacaagtgatgactaaaaaagcgtcacaattatgtcatttctttcaacggaactatagtcactaaatcgccaaaagtacggactaatcatcgtcaccaaaatgtaatactttgtgacaatcataccgttccaagactgtctctagttataactaaaaagacgttatcaatcggttctcatttccaactattttatcttcctaacttcatcacattttattactacaaatcaatcataatctttcataattaaaaaactatttgacacttatattagtcactatatttactaaattattttcagaatttgtgattttttctcctctaaattttcatatattgttgattaaaaaaatagattaataaagaaactgaaaataaattacgaaagcaacatctaaattaaaattgtctgaaaaaaaaaaacgtaatatggtctaaaataaaagcaaactgaagtaaataaaccaaatcaaagtaaaaccaaataaaaagcaaagtcaacccatatggtctaaaatgaaagcaaacagaagcaaataaaacaaattaaagtaaaaccaaatagaaaataaagtcaagccatattacgtagcacgataaaatggagaaactcccatgggagcttgtggagaagaagaactttctacaggtggaggaggtagagctgatgcatctaacccattctgacgtgcaagagtttgaattagttgctccacagcttcgagtcgaacaagtacattatcttcacgactcttttgcagttcagcttctagttctttcactcggagagttaatgctcccacttcttcagtagcttgagggggaactaaggaaccatctgacatggaaaccccactctgaagtgatccaaatccaaatacacaaccttgttttggtattccaacaatctagaaaaaaaacattagttcatgaatattgacaaattttaaaacacaaacttcttcaaagatccaagaaagcaaagtagattcaagtgaaagcaagtgaaagttatcttgacatagatttcatttttctcttctatggtaaggcaatccattgtcaaaacctctccattggaggaattcgcttgtgtcaagcgttcaagaagacattcatcatattgttcaacaattagtcttgctctttcaacaacatatgttccatcagatttttggtgtgtagctctcatcacagcaacgaaggaagagtcttcgttattcgcttcctaaaaacaaaacaaaaaagaaagtaaataagtcttatgaaaggtttttaaataaaacataattgttaccaaaatgaaaaataaaatatattaccaagacatcttgaactttagcatacgaacgttaacccgctctgtgacaatgttggtctaaaccatcacgactaaatagtcgtgaagaacgagctttttcacttttttcttttgcttttggagtcttccaataagctaccattactctcaaatattcagccagaatccagtcaggttgttttcatttggactttgcaagactaaccattcctttgatgcgaacagcagaaagggcatcaaagttggctttaactagatgctcaatcgaggcatcccactcaaaccttgtctaaaatatatctatatcagacatgtattaaataaaaaattatttctgaaaaatagtttatatatgactaacacacaacttaaacgttgtaaaccatgcatctctataaaattgcggcacttttctccagctataccaaggtccctaaaaacacccttcaatgatttttctaacacgcgttgatacttcggtgttgtttttgaacctgatgcatatgaatttaaattatatttacagttacttttgttacattaaataatgaatgaaacataaaagaaagaacaataccatttagctccatttcttcgagaggggtgaagcactcgaatatcatattgcacatgtgcaatttcttctctctgctcacttgattcaacgtttgcagtttgagacaaaggtctttcataaccagcagcttgagaactcgatccttgtccataaaaacgaccgctaatggttattgttggacgcatctataattgacaaacaaaaataaaataaataaattacgtttagatagatatacatataataatagaatgttattatattgttgatacaataattattggcatgttatgttatccacgtacgctgtccacaacaacaaaattcattttcataattctttcattccacaatttttcacctgttagcagttgagctggaagatcacttacaactcttccctttttaaaaattttcttgttccacctataactatgatcattcggcaaaaaggaacgatgacaatcaaaccaactcgttttcctaccattcttcaactgaaatgcatatgtctgatttaaacaataaggacacgccaaccgacaatgagttgtcaaacctgaaagcataccataagctggaaagtcgcttattgtccacataagtacaactcgtaaggaaaagttctcctttttataatgatcatatgcttgaacgctagtataccacaaatctttcaattcttctatcaatggttgaaaaaaaatatcaagacttctcttaggatgatttggaccaggaactagaactaagagaaacataaactctcgttcttgcacatatcaggtagaagattatacggagtcaatattacaggccataatgagtagttatgtcctgacataccaaatggattaaaaccatctgtacataatccaaggtaaacatttcttgtttcagacgtaaaattagggtatactttgttaaaatgtttccatgattctccatcagatggatgagacatttccccgcttttcaccgagtgttctgcgtattatattagattgatacaatctcttcaatctgtcggcaagcggcaaataaaacatctggcgatatgcaactcttttatgcccaagctgagttggacgaaatctatctttgccacagaacttacaattctctaatgatgcatcatctttcccaaaaagcatgcaattatcttgacaaacatcaatattttgataatgtaacagtggcggatctagaaaaatatttagtctagagcactattaatctacttgttatatattattgttttatcaaaattattacatatattgttcgttactaaactataaatttgtgatcaaatatgtagttcaacaaatctgtaatttgtttctcacaatatatataggtacccaaggaaaaactatgaaattgtgtacatataattttgttattcattttcacataaaagtaaatgaatatatatatcaaacattttagaaatatatcagcagacatactatttaatcaattaataaagaaattttaaaagaaagttaaaagtgaatgttcataaatcaaaagaagaaatacaagtgattaaattgataatagtgggggaagaaaaaagaaaagtcaaaagaagaaaaaagttacttcaactagtttcgaacctgtgtaaggaaggacgaatattgaaaacacttaaccatttgtgctgaatcatttaacttacataaatttacaagctaatatttataatttagtgtagggcacgtgccccacctcccatacacatagatccgcccctgaatgtaaacctaaagaccacataagcttctttacatcgtagtacgatttcattgacttgttaccttcgggcaaatattcttgcatcatttcacaaattgcgttcatacaattttgagaaagattataatctgtcttcaaactcatgagttgagctgctaaagatagttgtgaaagaccttctttacatccatcataaattgaattttttgcagcatccaaaatatcataaaacttttttgctttagcattgggctcttcttctatgttttcaccaaatcttgattctggtttatcaaatgcttctgaagctattgttgcataaggattcattggttcagtgtgagacgcagacccaaaagcatcctcggtagcagaatgattgtcagacatgagaaatccaaactgaataattaagcataaatcctctgttatataagtgtttcgtcacggtcgtctcaggcaacatttttccattctcacacttaatacaagaacaaaaaagtttgcttttctcaagaaataaaggctgattcttagcaaatcttagaaatttcttcaattcttggtaatattttgttgaaacgtcattagttttgtaatcgattctttcatatatccaacgtcttgttgctgaaatattattgttcgactacattaaattaaacctacaatattaaaaaccatttatcagaaaagtaataaactatatgagaaaattataagtattagaaatgtgcgagaaactgaaaactttaatttactgcatatatatacatacatgtaaactttaatttactgcatttaacgtattattgccgattagtattctctagcaattgtattattattcgaattgttcctgcaactcaacaaagaaatattaaaaacattagtagaaaataagtcagtagttacgtttataacttaatacatagtaacaagagttgtgagtttgtattcgtttagtattaataaatactagatgagtacccacgctacgcgtgggtttgttttgaaaattgttaaaaaaatatttatattgatttttatttttgctaatttatattttttttattgttaatgaaattagatccataatttgtattttataatttttatggttagattcatttgtaactcgaaatatcaatttctaattttcatgtataaagctgattatttataagatgttaatattttttcataattttgatacaattatgtgtaaccatgttacttgtgtggtttaaaatttaccttactcgattataaataaatcaattcattgttttatgtaattcaacaacattgtgataagctcatgattaaagtttggattaacttcaactgaacaagatctaaagagtattcatatgaaaaaggagtatgaagaaaataaaaagatagcaaaaactaaatgtcatttaagtcaacacttttaaatcttctgtcattgcatatatcaatattagagaaatgatcgtgtcttgaatgaattgaaaattgtctaacttgattataaataaactctttctggttttatgtattcttctgatataatactccaacaacattgttataggctcatgattaaatatataaaattgatataaactcaacaagatttcaagagtattcatatgaaaaaataaagataaagcaaaaatgaaagtatcatttaagttaatacttttaaatcttctgtcattgcatatatccatataagagaaatgatctttgttgggtattaaaaataattaacaattaacaaaacataattaactaaaaaacagaaatccacaaaaatatttagaaaccaaacattgttgaaaatatttattttttatatgccataatttcgtaagttaaatttacatcatggaaattaattttaaatgagttaaaattaataaatgaaaatattctcattaaaagtaattgaaaaattaaatcctataagcagtttttctcaaaatattctattttcacttatgattacatgagttaaaatttttagaataaaacataggtatagtaacacatcaaaggatgcaagagtgctccatcgtacgatgcgttaaaattcttaggttaaaacataggtattcaaaaatttattcttataattaatattttgtgttttggtttaacgaatgaaaacattatattacattgacaaatataattttatccaactaaactaatgttaaataaattatattactattttaaacttcaatggtctttttaattagtattattatccatactaaattattttaaaaaaaatataatatgtgctacatttaaatgatcaataacacatgtaaaaacaaatttgttaattttccttttattgaataaaagtaaatatatatatagttatatatagagacatataaattagtgtatgtaaatttgtttacttttttagattttctatttttttaagagaataaaaaagttaaatttttaatgacacatgtaaacatctgatcgtttgacttgacacgtggcacgatcctatgaattagtaactttgaaaaccatactttatataattcaaatactatctataaaaatatatttttatagatagtatttgaattttgtatggtaatcaatatatttttcttcatatttaatttaataattattgttttaaacaaaatttcagtcttatgtattctatttcaattatacacactcaatgttatcagtgaataagagaaatgatcgcgtattaaattatttggtaggtcttatgttttaaaggtttattatagtgtattaaaaaaatttagtcattatagagtagtgattattgctataaaaaatagtaataaaaagaatataatgaaagtagtgcttaatttattaacatatttttttattttttatttttattttaaagaaatcaattaagagtaagattgatgatacatttaatttgcttatttaattttattaatttttagttttaaaaaaatcgaatgacacatgtcattttcttgtgtgatgatgtgtcattcatatggagagagttggccaactttcatatatatgatttttttacagatgttttaaggttaacatgttagcaaaactgaaacataccagcagattttagagcagagcatgtgacaagtgaaaactaagcatgagcttattaataaacattcattggactggattctaagaacaaatttgacgaagtactaaaccagtttgactttttgtagtgaagtgagggaatcaaacactaattgatatgatagaagacacataaaacaattttgtttcttacttgtaagagaagacacatgtgttgatatgagcaaaacctttattacttgtaagagaagacacatcgtcgtgggcaaaacctttcttcttttccgagcatttctaaatcaacataacgtgggcaaaatctttgttaattgaactataatttttaatgtgtttatatataagtctttccacataaacaggataatatatatgttgatcgataagattcctatttttactaggattagaattaaaattaaatataatactttttaaagtttatctaataagaaaaatagtctttatctcatctaaaatattataacaaaaataaattaagataataacggtttgaaatatttttaaataaatgaagatgataactttttaaatgttgttaatcagtccacattgggacaaaattgtaacaaaattacgaaactatttataacaaaatattttgtcactcattggtatcaatccatgactactatttagtcactctaatgtcacaaattgtgactcccatattcattacaaattcgtaactaatttgtgaccaaagatacgtcacaaaatcgtcacagttgtttcggtcatagaatcgtaatatttttgtcgctaattgagacaaatttcggtgatgatgaaaaccgtcacaattttgtgacgaaattactacgaaattgtgacaaatatatttagtcaccaaaaacgtatcaaaaaggtcacaaattagtgacgtatattattagtcttaattattttctcagtaaaaatgatttcttgtagttagatgtcatttcattatcattaataaatttgttgattttttgataaatcaaaaaaacaatcaaaacagttttgagaaaaaaatttagccataagaatcattgaagataagtattttaattattaatgtgtttggatattaagtttcggcatgaaacaataaatataaataatgcaatgtttttttcttttttaaatgtatgaataatatatatttttaaaaatcattaataaagttttattgttacataaatttatttctaaatttattttatttattattatatataataataataaaaataacagtcacagcttctacaattttgttctaccaatcagattttaacagccaaagtctttacaaccaaattctctgcagctcaaatttttaaagtcaaagcttctaaagccaatgatttggacagaaatagtttttattaaaaccgttaaaagtcattgctcttttctaataccttcaactaacgatttccaaaggaaaaacataaatatctcttattaaaaccctagctcttataaaattctagatgagactccggctccttggagttgtggaaatcacacaaatttccgagttttacacttcggtatcggtgtttgttcttttgttttcggtctggtttttctttcttctgttgtgtttattattgtatgcatattctttagtttttttgtattttttgctacttgtacaccttgtaattattatggaaacttcagaaattatataaatatttcatattttaccaaaaaaacaaaaaaagaaccctagatgtacataagctagctctaccacaaggaagtgggctcatgagaaggtaggtgtggttcgccattctttaacaaattattgcgtaatcataactatattacattcgatggtatataagaccatctccattgcacataaaaatgggggtctttaatttaaaaaaaaaaaaccatagaaaaaaacagtattaatatttagtttcagagggtttagttaaaaacatttgaatattctctctcttatatggttctcccatgtcaatttcttatttgtttccatattttaaataaattaaataattaaactaaataaaaaatattattattaaattgtaaagaaacacatatgagtagttaaccaatgcagatggtctatgaccacaaaaccgggagtcccttatcgattggcaaacaatttaagaggccacttgatagtaattccacatattaaatccggcacatccactaaatttgtcaggcgtaacacatgcgcttacaacactagacacaaatcagatatcaaacgatgacatcacatacacttgatttgtttgtctcatcactagcatctccaacaaacaccttcattagtgcaaactctgagagaaggagagactagtagagttatcgttgtgaatttctgtatgagatgaaacccacatatacttgattaccgcaataataaagcgtaattacgacattaaggagaatctcatgagcttttacagatttgagactttcttgcattgactgattcaaatcttgtattaatcagttacaaaatttaaaacgtggagcaaaaaagaaaactatcgaaggcccacttatccaaattcagatccaagtcaagccaactcatgggtgtgtggtttagtatgggtatatttttctttccttttactgttatattgtgctcccaaagttttgaactttactatgaggtcccaaagccactcttggaaagtaactccagtgggcttcaaccataatcctccttgaataagctttgccacagtaaattgttcggtctcatttgagtcttcattaaactttaaatctcgtccaattcactctcttacccgtatccgctaggcttggctataatacttgaacccgaagaaccgaaccaataggcatgaccacagttacggttataacggttacggtttattaaccaccggttatgattataaattttttttaaccttaaccttaaccgttatatatacggttaaaacagttacggttaaatacggttacggttaaatacggttatcgttaaatacggttacggttatttgataattatgatatagttaatatatgagacaaaatattatattttttaatatttataataaaataaataaataaatagtgatatatcaaataatatttattttacgtgattatgtgtttcaagtatttatagtgaatcagctatctatttttcttaaataaaccaatgaataaacaaattaatggtcataattataatgattgaatcaattacattttccaaacaaaaacaatactaaggagaagatgttgtgagcattaaaaaacagttttaagagtataaataataataatatgaactacttatgatttgatttatggtaaaaagagtagtgaagtaacttcgatcgtagtagtgggcatattaaacaatttaagttattattttagtgaaataattatttatttatacacagttacaacttacaactatatttttaaggttttaaaaatacggttaaccgcgcggtttttgatacggttacggttaattaacggttacggttagtatattttcttaaccgcaacagatctattttcacggttaatggttatggttattaatcgttttatacggttacggttgggttacggttaataaacggtccggttacggtccaaaatacggttacggttagattttggtcatgcctacgaaccaaacctgatccgaaatacccgaacccgttctactttggttctgtctaattatccgatcgggttttgttttcaaataaccgtgggtatcgggtattacccataccgaacccgatatccgtgagtattttttattatccgaacatatatatacatatgaggacagatatgcattaataagttgaatttgtgacttgtttaatgatttaagttatgaaacaagctcaaaacaaggtttacttcttgttttatactattgtcttaaggaaaaacttgttataatttcagatttttcggattttatgggtacttttacgtatgtttgggtatatttggacaaaatttgagtaagtagtactcaaacccgaaatagttttggttatttatgagttctttaaccaatatccgaattacctagacccaaagtaaaccctaaccaaacccgacccaaatacccacatgcacagggctactatccgctcttaggaccggtattcgcatactctacatagtacaatgtggagagcacaaactcggcatcccatgggaaccaaccagtcgggtcaatgtgcttgtcaatgaaagactgcatgatcactgttcttgagaacaacttccacggctgtccaaggaacattttcacatatcctttttacaggagcaagatctgaacttgccgttatcttacatttttagatcgaaatggctgtgttcggattctgatcctcccgtccttgtgccgtaaacatgtaaataattgtacacaatttactttcatactaactgtgtttttttgtatgtccaagttgaaagaattattgtctgaccattgttttatggtgtttttgaatgcctgttttttttataattttgttaactatgtggtttattaatatttttttaaagttttttttttataattctgattttgataaattttatgtttgccttaggattattaattaacatgttaatcaaattcactatacatagacataccatgtaaacaaggacatctactaaatatacaactatgtacacaaaggaacacatcaatcctataataaattcaatagtatcaatgtttaaaaggtatcaataataaattgatgaatgtttaaacgttgtaaattatacaagttaatatttacagacaaacaaaaaattaactatattagtattgtatcaagaagcaaaattgataaactaattaaagcattaatcccatgcaaagcacaagtactgacatagttagattgtaaacacaaacgctgagaccaaaaacaaaattataaaccgctagtaaaataaaataaactttattttactgcattcattatcaagaatttgaagagcaacaaatgatagaaaatgcatattttaaaatgttgttaagagagaaagataatgctccaattgccaattactaaggaggatcaattttcataagttaatgcaacaacaccgtggtgttggtccttctccttcaataaaagcacattctcctcctgccatgtacttcctagacaaacattcattttcacaccaatgaggcacggcatacctcggacatggaccaatgcaacgagcatatatcgattgatcgctcgctgcacataaacaacccagttaatatatttgataataaaaagagatgtgtacaaacatatatacatataaatagttactacccgatcttaaaatgatcaaagatatataattgaacattaacaacttacccggaaatgccaaaacattgttgtaataaaacaaaattggaaacaatactacaagaagtaaagtcacgatgttctttgtgatatccattatatctcactatcaattctattgagaaaatatgtttttgatcaatttctagatctttaccaagaacattatttatatgattttttatcttgaaaaatctcaagtttcaaactttattttatattttcctcttaatggtctttcatatttgttaattaggatgagggttgattaaaaatttaaaatgatttaactaaaaattattatctatgaaatggtaaatttgacccaaaaacaactttttagtatcagattgactaatcaatatattcaagaatatatatatttataaatgtatctatcgatattaatgtttagattttctatgatgattacccaaaatttgtattgaatttgaaaagatttttttattatccatcataattaaaattagactaagatacaactatcactatatcaaactagtaatattaacttatgcatctcttaaattatattgcttctaaaaggcttgaggaaacaacgagcaagtggttagataagaaaaagaaaattattgaaattatatatatatatatatatatatatatatatatatataaataattttatgcaaaagaagaaataaagtgagtctccttaattcgaagaaatcagtacagagaagtgagcgcaagggcttacgaatacaagtttcactatctcttgtatttgtaaatctaatccttctttttgttgagtaagccgatgcacaaattcttctttttcgacgccatcagtcaacctagagacgagagattactttgaatttaaaaaagaagagagaatccgaagaaaaagagaaataaaaaatcaccatgtaatagtattctgatgtaccaaaatacataaaatttacttaactatgtaaaaaccaaattcgataccagattttgacaccggagtcgcagcactattacaaactactaggatattaacttaggtcaaaaatacatttactatattgttgttattttcttttactaaaggtcttttaacacttgggaattggagctttacaataacgaagaaggctgagagcagtttcctttggcgtagggtacttaaaaaacaaacacatacaaggttgtggccctggctttttaaatttcttacaacatgtattatatagcaaagcccattgttggttatttctcatgaccacacatttatcgagctcaacatcgcagccaacgataccttgagctttgatcggagctagaaatgatattgaaagtatgatcaaggcgatgaacatcaatgggatagtcttcatgtttagcataaataaattagtagcaatcaaaaaagataatgttattgaataggaaattgttttgttttaggtctttaaataggaaatttaatcaataaatttcctagaacataagaaaatatgaaaggtgagaatcaattcctatacataaggaaggacaatgttcaaaagcaatcaaaaacaaacaatcgacttgttcaaaagaccgattcaatagggtctgcaagaattttctcaatgaacttgaatgtgattaaccaacattttgatatgttaaagacatcaaattaagtgagttaaaccatactgtatacgggaaaatgttcattttattccccaactatttgcaattaacacaattattccttaacttgtcgttgacttaacaaatttggccaaaatttggtcaacgtttactagttaatagaaaaatattaaattactcgattaaaacctaataaactcagaaaatcctaaaatttcccccaaattgaaagtcattccttcgaattagaagcttttttcttcatctatttatcgtactctcgtcaaaatatgcagattcaattttaatttctacatgtttatcaatcgatcttcagaaaaaattacgtagagttcttagtttgagagaaattttgaggattttatgagtttattaggttttaatcaagttatttagcatttctctattaactagtacaaattgaccaaatcttgggcccaatttgttaaaataagcattttctcaactttatacctcatatacttgaacaatgtggttggttcataaatgttttttgtttcagactgaataaaggattacatagagaatagaaagctgtatattttggtctcattgtatcagatacaggagttagcttcaaagaacacagcctaagagtcaaacaatttatctatcaaatcgtggaaacgtcatgctctcaaaaacttttaaggagttaaaaccctgtttttcaatcttcttccaagttactaggactactttccttgaagcttttagacaaccatatcgcggtttctcttggcgatacctttcccggaccaaatggttttagtaacacgttcagctcatcgtacctctcgtctataagtaatcttgcactgaattcaagtagtccttcaagtgcctcagctcgttgtcgatatgagctagggtcgaatctttgtcttcttgatgcacctgaggaagctctacttgatgctccagcagttgcattttgatcagacaaatcacttttggtttctcgttctggttcaagtgtgaatttgtcttttgttattgagcagtctagtggtggctctggaggcgggctgtatgatcctctggacgatcctttcttcttgcgaacaacgggaatgaaaggcatttcttcatatgaagctaacgggaacttgatcctgtcgattcttggcgagtttactgacacatctggagaatttagctgatggagtataccgatgttcgggtggtatagagagtcttttgttccttttgcaggtttctgtgagataggtaaggaggccctacgagtcactaccgcaggtttctgatacatcagatcgaatatataatcagactgaatcagcagttagtaagataaagagcatttggacgaaccacttaccagcagaccaccactcttaggctggtttgatctcactggcacatattttgaactgttagaaaccactgaagaaacagcgggtctacgaacaaccactctactagtgtcatttgcagacaaatccactggcctgtgacggtgtaaatacgtgtgcacgggtttaacagaagaaacagaatcttcttggtcaacaccgaacctgcttggaccgaagctcacacttttgccagaagtacgctttctctgctgaggatagctacttctcctttcggattcagatggcaatgtatcgtgttcccggaagctcagcttgagaagaaccttttgaacgtagggctgaagtagtggctgtctgagaagatcagaagcctacacagaagaagagacatgttactcatcaggtttatactgctcaggttaaatgatcacaaatgctacaaaaatgtgcgtacgcttggtctgagttctggattcttcctgagcatgcttttaacgagactgcgactgaagaaagcaagaacacaaatcatattgaagttgttgcagaattcaataagctctaatagcttcacatcacaaagaagaatctatacttacaaggcggtagaatattgcgcaggaagtggagcaacgatggaccggtttatcctgttgatcagaccttgcatgtcctaaaatgcagaaagtgtaacaaaaatcagaatgtcatgaacataaggcaaaggaacatgaacttaaagatgtgaatgaagaagaacttacaaaggctttgaatgccggtttcagcgccgtcatctcatacatacaacaacctgaacgcaagtgcaaaaagagaagaaaagactcagatgaatactttgttatctagagcaaatgttactgtctaagccatggaagagaaacttacccagcgaccaaatgtccgactttgacccgtagggaatatcagcaagaagctcagggcacatgtagctcggcgttccaaccacctgatttaaaacaagtcatagtaagagcctgagaacagaaacaaaatcatttgagaagtccaaagtctatacttactgaagaagcaaggtcatcagatgtcaagatcttcgcaagtccgaaatcacctgcagaagttatcgaacttaattttgtcacacggactaaaaaaaggatagaaaaataacatatttgcttagcatcttacctaggcgtatatcttgatcctttgtcaagaatatgtttgaacactggatcaaaagattttgtattagtaagatatattatcaataactgtgttatgccttcagaatcagatatcataactaaccttgacatcgcgatggagaatgtgactggcgtgcaagtattcaagagccattaagagttgtaccagccacttgcagagtttctgaaaacaaagcaagaaacgagtttcagaactttatgtaacaataatatttcagaacacagactttaaatcagattagtgtaacacacctcttcagagaactctacgccgttggctttctttattgcttcggccctgtaatgcagaggaaacaatgtattagaaacctattcatactcaagaatggggaaaaaactctgagaaggaaacaacaattatacatgtcaccgcctttgcaatagcctatgacaatgcacacatagcaaccctgcaaacatacaccagagcgacaattatatactcttatatgtatatgtatacaaataaaatctctaatgaagtaacatagaggcttgaagaacttactttctcaacccaagaatctttatattccacaataaatggattccttatctttgagatcaattccatctacagagagataacaagtaaaactgttagtctcatatagtaaagagtcatcatgagatatcatctacacctagatcctactaagatttcaaattcttcagctcaataactttaacatgcttgatcctctaaaggaaccacattttgttttcgtttcgaataccacatacagatttggcctcataaaagaaaatatgtaccacattgtgttgaagaagagcttagaactaacctcttgatgagcagaccttcttgttctaccagtctgcctagctaaccgaattttcttcaaaacataacttcataaaccaaaaacaaaaaaaaaaaaaacagaacataacaaagaatcaatcattgaagaactaacaaaaactctctccagtttcagtttcaaataaacacaatctcttacagtttcttctcatgtttatgcctcacaagaagagctgacccaaaagaacctttcccaatttgctcaagaacctcgtaatgctccatcgaaaacaacctccttaaaaatattctcttcctctacaagaatctgaagtaacaaatgaagataaaacaaacaaaacaaaaaaagtaatgatccaattctcaagttcttgtaagaaaacactaaccgtacctttccggacatataaagatttgtgggaaaaaaagttgctaaaaaagtgaaaacatttagtaagctaataaagtgaaagcaatctacacgaatcttcaacgtttttttttgcctgccgacccaccaaactaaataaagtcaatttgtcacaaaaatgtcacaaaaatgaaaatttttagtaaagctgagaaaagaaatgtatccacatcatgaaaaaatgatctataaactaaaataaaaatcttgacttttttttttttttttggtcttgttaaagctcaaatctttcaagcaataattgaaaaatacacgaaaatgagaagtacccattaattgtttaagtcgattagacattacaaaacacaaaagattagttcttgagttcgaaactaacctaaaaaagcgtcggtgagagatttgaggaatgtgggtttagcattttcgggaggagaagctataaaacggcggcgtttaggaggtagaagtgacggtggagaggaaaaggaatcggaagatggtgaagaagctggttcgccatgagaggtgcttcttcttctctctttctctctctgtgtctctctgactgaggaaaacgacagagtttactgggagagacgtaaatcgactttgttattttctatatataaatatcctgacactattttatataataatgttattaaattatgtagaataacgccgaaaatgtatagtataataatttgttatttaaattggtcaattgatgtcaaaagaaagaaaaacaaaaggtggtaataattggtcaattaatgagtgaaatttgtagaagaggaggacatttttaaagaaaagaattggtttatgtatggcataggtagcactagcacacagtggtcaaattggtttatgaactgggtttaaaggtatacagtttaagtcccatgaatacagttttctactattattttctaacacaacgactctaataacgaaaagccaagaaaacttaatcattttatccaaaagtcgaacaaaactttatgatttaaatgacattttgaaagttcatgatttttcatcataaatttgaaaacttgcgcatattttaacattttttattttaaaattataaaataacacattttacattggtacgtgtttatgaaagttttatatatggatcaaagcaaaaaattggtacaaaccaaaatcatttagaagatgaaaaatttaagtaattagaacgctctcaaacaccattctcgagatagctcttttgtatctaatctctaaagctggtgaagttgaggtccgcccgattcaacttgagtactccatttggggtggagaagcaacaacgcgatcagctcactacgtcagaaaatatctttttaaagtgggtgtttctcagttttgtgtttgctttccttttatgtggtgaatttttcaccgcaaaatctcggcaacctctatggtcatatcctctctcagctttagtttgaaaagcgttgttgccatctctccccttctctctcctcccccccccctatcgttctcctccatggtggttctcctccatggtggttctccacctcgaagccttcgacgaaccaaatctcgtccctcctcgacacttatgctctcgttccagatatgtggctttcccagatgttttctctcaccgaatatcgctgatggcaagagtccagcctcttggaccgtaagttgcgcctcgttcggtgaaattgtcgacgacgcaagatatggatgaacagactcactcatgggctcaagcaacagttttcagatccatcatgttcattaatggaatccagcatacgtagttgcgatgtattcaagaaagctctaggtgctaagtggacgataatcctccgcctagcacatagaacgctttgtcggggtctaagcgattttaggacgtttaggcagttttagaataaaacaatgtatatttctatactactacaatgttgaaaaagcattataaaaattaaaaattatcaaatttttgaaaatgaatttaaattttacttttaaaagtaaaataaaataaaataataaaaatataggattctttaaatacaatttaaatatattaaaaataatcaaaaatattaagatacatttagacccgtctagtctgcttaaacacgcctaatgtccgtcttatccccttaataaaagcatagcccgccaaatctatcccaccgcctaatagaaccgattttaaaaaagtcaaagcagcacatgggcgcctatcccgctttcttgaacacaccccaactttatctccatcttggcctctgcttcactattcatgtttccaattccaattacattgatgtctcgacattatgccttgtacgacaaaagacaccatccaagcatgatgtagacatctttattttggtgttgcgataataattcccaaaccaatgtccaacgcttcactcaaagctcttcgactgagtgtttaagatctaaatttttcggcatagtatctctaaatttgagtcatttttggtgtgacattggtcaccaccttagcatatcattatctctaaatttggtcaatagctctgtcgagtctctgccaaagcatctcctaaccacctccacccttcagatatggattggactttgaaagaaattcattgacctctctttgagatttcccgaatcaatgcgaagagcctcaacctatgtcttcgatctatagtttttttttactccttcctttttgaaattttaaaaacctttgatcaagacctcctcttatatggagagaactctttatgaaacttaccttccttggcttccagcttctaagtttagaaatgactcgagctgagaagggaccaaccatccccacaaccacctatgagaagattaacaccaaagccacatcagactcaccatagtgggagccatcacgattcgctgaaaaagcttgaacgctacaccatgaccaacattcacggatatgaaccaccaacgacttatgtaaatcaagctctataagcagaccgagcagaagacaacacgaaaactagacaaaaccatctcgaaagagtttaaactagggacaaaagaggagaagagaatatctcgaagaagaggaatatctgaaaacaaatgccagacagtgctccgaatgctgcatgaccacaaaatgatggagaaacaccacaataaaccgtataatgagccctagatccgccaaaaattatacccttaggagagagacaaagaaagctaagctaaaaattggagacgatatacccaagccatcctattcacatctgagaatcctaaccgccaccaaaactaaatcaaaccacaagaaagacgagactaccattgtgagacaaccgagactttgattccctcaaaccaaagatgaagtcttctagctaactgggacaagaggacacatgtaaccagttgaagatactaggaacggagaccgactttgaaacaatgttgattcagcctccactttcgcctcaatgataaagctcttacaaaaccaccacctgaaactacggaaacattgacgaggggaaagccgaaaactacttgaaagagaaagagcattcacacagcactggcggggaaagccagtggtcttagagaaaaaattgtggcttaggtttttcattatgttactatatcaactcttattggtcaatgattatgtggtttgttgcgaatttgttgtggatttgaggttgcttgatttacttagtaaaaagtaaacttagctcaatcttatgcaatatgttattgatgattgttctttgactgccgcttggagatgatcaccatttatacaataacatagttataatgaaaaaaacaaaaatatgtcggtgtaacatcttcttggatctatatcaagagtcaaaataaaacagattgaggtcttttactgttttttcatagtgcgtttgatgatttgtggttcaggaaagatcgcttgatatctcttccatcttctccattttagactttgtgatagctttgtataactgtgatctttcattttcatgattttttcctatgatttgaagcttagagacccaatgactgaaagaaccttctggtggtgaagttctcacaaagtgttcgacaaaactctctcgagaaatttcttgggtttttttcatatctcgtcttttggttgtgaattaaagctcatgcatcttatgtttatcgtcccactaatggaggatagcctccaaatgcatcaatttatcatgaatctatatattagagcaatgtgatgtttttactatctatacccacggagtcgagagacccttacgactatgatatataccaacttgatacgatccaaacgaatcaaagtttcatcgagcagaaagttagggagaagagaggacaagtttgagaggagacgagaaattagggagaagcaatgacatttcatgtgatcgttcttccaaagtcttatgacatagtgaatttctaaaaatatatactacgagcgtcgaataaatcctaacatattggctcttagcatataataacatcgtatgtttgcttatttttactttatttttcataggtttccagtgaagacttcaagtgattatggatacttcaagactgttttcaagcattttttcttccagaagcatttataggtttttgagcaaaaaggagtaaatgacgagcaaaacccatttcatgacagttttggagcctcccaagtttaacgtccactgaaggggttcgcaagtaccaaatcaagatatcatggcagttatggaaatctagaagagtcaagatcgacattaaagtgtaatcagactcatatgacccacggttgatttttagtgcctaattgaaggaagcaccgtccattaccggtcataggcttgtgaccggtgggaagcgcctcatggaaccggtcacaacccacatgatcggttgtttgccttctctagggaacctcgtctaggagctctcatccctacacttaccaaaacgatggtgttttagcatttttaaccctaatccaagatccgaacctagaaataccactttatattgagaaaatcatatacttcttccacaacatctcttgacgcctccaacagcctccacagcagctctttgtcgtctccaagccttagaagtcgttccttgaaaaagctatcatttgttcattgtttcttccctctttcttattcttatcgcctttggggagacaagttatcttctgtgaaatgtagagaatagtcctttgtaaaaaatttgcttatttattcgttaagatgttattgttcatgagagtgatttcgtttacttgcttaatgaccaagtaatctctttgttgggtttgattgggtcattcaaaggggattcatggtttgagtatcttactagagtgttagatcttattttcgttcatactaagattcttccgagacatctcttacttaatatttgtcatatttataaagcttttgtgcatgtgtgtcatttttgtgtcatatttccataatatttatgaaatttgttttttaaaaaatcatatgtatgtgaaagatactcaactattttataaatatcaagtaaaaaaactatacaaatgatattttttgccctacagtcagtatgtatggtcttattcaattcttgatgtttagaacataaaaaaacatcaacgtcgtctatgtataattctaattctcgtcggtcgtgcattaagaataattgtttttttttcttcttataatcgatttttgtttggtgcgtgaattatgtgttctggatatgactttgatttaaatttaattaatagattatttctatatatatctctaacagcaacagtgacgtctctatcatggagctttgaggttcctaataagtaagtattctataatagaacaattggttacagctatgtaaaacagtgtatgtgtgaactgaagtgtgaacacttttaatttattaacttattagattatgacccgcacgtacgtgccggatttcatattttaaatttaaattattttgttattttgtgatatatattatagtataatttattagatatctgaactcgcatatatatgcaaaatatatcatattttgttataagtaaactttataatagtatggatattataaagttaagagtaataatcgaaattcaattgtgttcgtgtatagttatattttaagatccggactcacacggacaaataactcaaactaaaaccaaatgtatatcctattttacaccagtaatcaaactgttataatgttttgattagtttagaaaataaaaacgtatatttgacgtatttttcttggaacggaaaacccataatgtgatgtatctatcataaattattcgtcctataacccgtttgtatatgtggaataaaagtactaccaacccgtatccatcacaaatagaatttgtgtcacaaaaatacgtacatgcagggttatgtgtgtaaacaaatttattttatatagtgctcataagtcataacccaaactcataccaggtggatatttaatttgatgtccagtttgttttcaatttattttatatagtgcttccgtttcttttcatgtcgtttgtgtctcataattcttgttttcatttcattccattaaaagtacgttccaaaattcttatttgcttacctttaaataccatgttatatatgactgagttttgcggattaacatataggatgttaaagtttacaaatatatcataaattaaaacacacaaataccctttcttgatttatttttccttcttcaaattcaaaaatatgaatagcattataacaaataattttgtaaaaaattaaattttaaaaaatgtaatagtgtttatttccttagcttcattttcaatattcttctttcccttgtttaattataattaattggatttttgaaatataataaattttttgaaatacacctataaaagcaatttatttttgctgcataatttttttgaatgaaaaatgtataattagtctacattatttcaaaagtttctgcaataatatattatggatttatttttaaaaatatccggttgaaagaaagaaaaaagaaaacccaaaatatttcgaaattagtatgtacaatttattgtttagatatttctaaatgtaaggcataatgataattaccttaaattaattatttttagtataatttatagtaaaaataaatctttatatttcaaaatacttaacccaaaattctaaaattgaatttatttatgtatcacaaattataattttttattcatggtatcaagcaagttttatgatttttaaattttttaataataatatagtaataaaaataaaaattaacttccaaaatgttagtttaataatatagtataatttgatatcatatcttagttttttaatttttattggttaataaattttaaaaaataaattttaatttttttgtccataattaataggaaagagaaagtgagtttaattttgggaaactaataattacttaaaagaatatatcattttttatatttaaatctattaattttgttattactattgtatccttaatgaatttatttaaaaatattaataatcaatggcattttatgtaatattttacccttcataaggttgtttattttcaatgattcccaattaatagtatagatataagtttgattaatcttgtgtgtgtgtctacatatttatatatatgctatagcctatgtgaatgaagtgatgacatgttcaaataattggccctgtcaacgtttatttttggatttaaactaaaaatatgtgatgtatactgattgtcacatacggttaatatcctaaaagtttttactgaaagtacataaacttaaacaatataattgtgcatttcatacgtgaatcagctaaaaatctaagtaactaattagtactgtgtttcttagaaaaaatattaagagagtaaatggtcaatgtgtacatcagaaatgccgataacacttaacattgcaagatttatgcgtcttactaagacggtcttagtaatgacatttgctatatagtcaaattgactatcctaactaagtaacgagtccgtcgcaaatctaagtcaaatgtctcacaatttatgatggatatgagacgacttacagaacaacagatttactagacaatttacagaccggttttgcatgaaaaaaaattggaaaatacatttctttttttttcttctttttttcagggtgaattgttaaaatgactcttttggaagacgaaataaataatatagcaccataaaatctataatgtattgaataacacttaggtgtggtaaaaagaccacaaactccttccaacgaaaaagatggtaaacgtgtgaagcatgagaagaattgaatacggctgggttacgtgacgttgttttcacccaaacaattttcagtagcatcagcaaaaaaaaagtcctgcaaacagaagataatagaacagtatggatgagggtgaaaatagtttggtagttaatacgacgattcaaagtgtaaaggtacatacatttcgctttcgagcttcactttgtttggagaaatagcaaattgtttataagtacagaaaactaaaccctaaggatgatagggaacacaaataacaagttgtatgaatatatgagatgaaacttgtaaatagaatagtcattgaaagtctcaatcgcatattgttttgctgcacgtactggaaattgatgtaactccaaaaaaatctgaactcttgcctctataaattgaaacccccaattcattttaatcacaaaccctagacgtcatttccgaaaattaacaacattgcttccgtcgccaatacacctccgctgattgttggcgaaatcagaagcttcagaaaaggtggactgtaacttaatagggatcaattattgataaagcacaaaaaaccttgtgtcatttgctcccataccatttttcaatattctcataagattaggtacttctctcatttgagtgaccattttaccccttttctctctcctttgcctccactatcaccattgttatagataagatgcaacaatctaagcaagccatgatcttcactctccctcaaagaaatcaataatgcaattcgtcggtggtcgaatttgattttgcaattatgggtcttatgaaattatgatcagcttttaagtgtagtttccaaaataatcccaaattagttgttactagagataagagtctgggtgagaaggaagaggccgtcttgttgataagatgttgtcatctttaagggattcaaagaattccatggattaagtttatccaagtaactctcaatccaaagttctcaaaataatttagattcttaattgaaattcataattgattctatatgtgtctttgattgaagcatttgggttccctatactcttgatagggtttagatttcactaatcaaaacaaatttaatggggattcattgggtttaattattttgtttgggttccttttgtactatccgttaggatatagattttattattattaggtgtgtgattaaaaacaaaaagaaataaaaaaacgaaactgaaattttttgggaatattaagaggagaaagaagcgatgaagaaagaaaaaagaaggaaagaagaataaaaaagaagaagatgaagaagaagaagaagaatgagggcaaaatcgttatttcttatagcagaatgtgtccatctccattagcccaacaaaaagtactctttttagagtttttggacttaaatgtaccccaaatacgtaaaagccccaacttattagagccaaaactctgtttgaaagttaagagttggtgagagagaagaatttgtttcatgcgaaaaggagaagacaaagagcgtgtgtctcaaacaggaataacgttgtcattattacagaaaatacaaacaatatcaagttactttttttggaatgttagttttttaaatatataatatttttgtaggttataagcccaaatttctcttttttataattagaaaaataaatttcaaattagacaaagcttcaaattttgcattaataaacagaacttaagaagaaaagtaattatctttccctttaacctagaaaacaacaatataatatgtctactaagaaatagttaatattaaaaacatacaaaaacatcacatgtaaaatcagacaacattttttttttacgttttgcctaagattgtaaagaatgaaacgacttgtattattattatttttttttttttgcggtctggttctgcacttcaaattgaattaagacatgatttatttattttctgaatttgctggcccatcccgttttccacctctaaatagtaaatagaaaccagataagtaactaatttactaattcacaaaaatatttattttccttgcatttatttattttgattattgttgaaagacctgatctcttcacgtatacgtgaaattcatggagaataaaagctagaatactaataggaatttaaccagtagtttattcaagttcaactgaatttcactgtttgtcggtgcacgtgtacggtcgaccaagtcgtcaagatacgtttcccactaatagcattaaaacagtaacactattcatatataataactttatcataataaccaaaaatgaggttttagcaaaaagcagaaaaagagaatataactgataatatatatatagaagggatttattagaactcaagatcgaaacctgaaaactgaacattgcttttatcgccagcaccatctccatctacatgcatgggtacagaaatatcaggatcttgggatccaacccggttttcctcgggtcgggtgtctagatctctggctgacgtggccgtggtggcggtggtggcggtggtccctgttggtggttggctgtataaagctgtgagttggtgaaaataaggacaagtccttgagtcaagtggtctcttcttgttaacatcttttgtcttcctaaaatacttgttgatgttttcccatttctctttgcatcttttggcacttctcttgtacccaatctccaacattttcttggatattctttcccataatggaacagcttttgaagatgttgataatgagttctcatctttatgatcatcatcattcatgttactgatacttcttctaatgttgatcagagccaacacttcatcctttggccatctcttgccaagatcacttttatcatcgctttttggaggttttgggttttggtttttgggttttagggttttagtagaaaaaggttcaagtgatttgtcaatggttaaaaggttatgtggagttagggtttgaggtaatagtgatgatgaagtttgaaactttcttctgccttgggtttttcgtagagctaaagaagatgagtcttgagaagggcttgttgggttttggacaacatcaagatcatggtctgtaaacttggatatgaacttgatgatgttggtgtttctatcactagccatggcttgttcttgtgctctaatctctacctctttgttaactctctcaatctcttgcttcttccaagcttcctctctcgctatcttctcttcttccttcttcaccatatcttccaggagtttcttatgcatctcctcttgttgagctatcatgttcctcactagaccctcacaaaacccttttaacacaccaaacctctctttctctttcttcctcttcttcctcttcttctccttcatgatcatcatcaagcttgatgatgatgatgacttggcatcatcttctacgtttccaacttttccaacctcaatagagtttctttgattctccattgatgcttcttctacttgaccctgatcctgatctcttaatttgtcctccgccattaagtcttgtaccgtttctcccacgtttccttttccttctactaaattggtcctcttgttttggttatccccaacttctgatgaaacatgttcattgtcatgaccatgatgataaaactcttcaacctcactaaatatcctataattatttcccttgttgttataattgccgatgtgttgatgatcattagtgttgttgttgttgttgttgttgctattgaaatatcttctctcttcttcttcaaatttctctttgcattcttgtggactcctcttaaaaccaacttctgccaactttctacaacatcataatttcataaacgacataacgtcattaataatacgaatatacatatatatatatatacgaatatacatatatatatatatacacacttctaccaataatatacacatatatgtattgatatcttacaatttcatcgttagtttatttttaaaaatgcattaaaatggcacaaaaatgtcaattatgtataaatataaatagttattaatggccaatcatttgttaacatcaaaattaaatatcccaaaaaatgcttattcaaaagaaaaagatctctagtctatcaaatcaaattgagtaacatgataattgtaattgttgtaaatgtactcttataaaataaatactaatgttcatgtccatatgcatatgaagaaaaatataaatgtgttgatgcatatataaagaagtatatttatatatgtgtgtgatatgtattaccttgaagtatgctcccaagtgaattcagggaaccaattctccactgtagatctgaacctaagaagagcaagaacttcatcactacaccatggatgatgatgatgatgttgatgatgattatcgctatcatcatgatccgtctgacctatccactcaccagtagtagcaccaccatctttgatgtcatggtgatgatgatgatgatgatggtgaatgatcttacggctatccaagctcaacatatgctgaggttgatgattggtgttaaaggaagagaatgagacaggaaaaggtagtgatctttccgccgccggttgatgcggcggaagcggaggcggtggcggtggagaagctatgaaacggtggatctgctcaggtactccaccatcaaacattttcttttattcttattcttctttttttgttcacatcgaaatctctcttttcactctcttttttagtctctctttttatattgctattttttttgtcattttgagggcaagaccttatatttatttaaaaataaaatatctgtggttggtatttaaccattaatgaatagttattgtttattaactacttaaccatgtattttattttcttttgtctgatttgattccgttttgttaattattatgtatatatatgttcaaaaaaaattcctagaataaaagtgaatgcttaaaacctttttttatgtttttgttctactaactttatagagaatattcgaaccattcttgaattatttggcatatatagttgccaagtaaaagaattgagattttcaaggatgattctgagtctcacgatccagttctcatattaatgcaaaagtttagacctaatttacatgaaaaatatcaacaaatttgttttctgattgaatcgaatgtatctagtagcattatatgttttattcttatctttccatataatgaaattacaagtcaattttttaactcaaaagctaccgtgtagataaacacgcgtatatagtccaagtttatattttgttcttcttgcataataattgactgatagtgagtgttattttttatatgtgtaaaaattcaatttacaaaatggcaaagacaaagacaatattactaaaaacgccaaacatcacctctctctcatttatcactgacattttgtccaaatacaataaatcgaatcatttagcccatgttatagccaccccttatgctcaaacaaattaagtgaaacctaagcattaaaggaatacttgtatagttgaatactataaatattaagtaaataatatatagtataaagctggttctcagattcatattttatacttttgtcctagaaatataggataaatatgggcatgatcgaaatgtttaattcatacttcaaaataattacgaaagcataggttaattattgatattccggtatctactaaattgctggatatatatggaaataagaaaaaaaaaaaatccactaacaaatgattttttacttcttattagccaacaaaatatttacttcttttaaacatagtataaattgataatatatataaattgactcttttatttttttagttacagacttttacagtcgactaacaagtgacaaccaataggttatattaatcattagtaatcaacaatttaaacttcttttattacaactcttacaacaaaatcaattaagttattagatgatagtctttcattttccaaaagcttattattataattaaacaagatatgatggactattagtaccgtttgaggtgtgtagttatgaatttaggctagaatcgatttttcaaatgcttcagaaaaaatcttgctctccatattttaaccatcggcagatgcttttagtggtaaattttttttattgaaatggaagctgaaattagtatggaatttgatattatattccccggttaacaaaaataaaataaaggagtatccaaattttaataatcatcaatcaaacaatcaagtcttaaacaaaaaaaattattattttattataacaataaatgagtagaaaagaaacactacatagaatattgagagccacatttaatctgaaacaataaaatttactacaaatgcataacttaatataaaccagatagagtatcaaacaacatccggtacgagtgatctattttttcatctctagagactaccaacatgtacaattacattattttatagggaaatatacataaattaattgtgctttgtcttatttttacatcaattgttcttgtcattattgtgatactttataatatttttggaaaaataaatatagaaattttggaggtacattagaatcctatgcagaagcagatgcagatgatagtgtaataaacggcaagcgagaatggcagggcacgtgaatacatgcaggaactgggtcctctcttttattaatttattatgattatttcttacaatttgtttatttatgaccccattgattttgtcttttaagttctactcatctgcttctcaggtccacctatttatggtgcacctctttttcttttgtcgacttgtcgttattgcgtcagcgattgtattggatcatggaatcactattaggacgaggtacgtgcaattcttgctttcttctttttctaatgtcggcttaaattactttcacatctacttcttgttcaaatacgtcacattatatgtgaaatcttgtaaatctaattaaattcatgttttgtctctaatcatatgtatctctattcacaaggtcacaatgatccgttttgtttgagtctttctagagaaaaatacttaatcatacttgtattgacgatgtcattggatttgtgttcaattttaatttgaatctaatctcttctattgcaagaattataccgggaatatataatatatcgtttatacttagattttctgcaaaataaccttccaaaatgtatttttataataattatatgatatattttcataaaattataagttaaactaaaagtaatgcgcaatataatttattagtactatcttcaaatttataatattatgatataagaaatattatatcaaagttcttgtaaagagaattccaagttaatttattcttatattttgaaaatttaatgtatgtgacaaaaaaactcttcaaaactacatatgatgattatactgcattttatttttgatttcgcgagattaagtgtttttttatttaaagtataagataagaagttgcaaaaatagctatatagtttgagttttcctctttctactttataatattacttagattaatattatgacattcttgatagacataaatctctatagagatttatgcatttgaaaagtaatttacttgctttgcatttcactaaagaaaactaatcctctttaaaattccttttcagttttataaactatttttacaaactccaaacgtaatttgaaagattgtctactttttgaaatttaaaattacaaagtacctaaaggaaaactgatttaagattaatttgaaaagaatattcattaatgtaaatgcatgcaaacaatctaaactaatacaatgccattaaatatcctggcatctttgagaggcatattgtttatatgaatcggaggaggaaacctttaaaaaccaactaattcaatgtgttctgttccattagttgaatgactcctcttactatgatttaagttaaggttgatcactattaactaataaataacatgattaatccaacacaccaaagattcgtctaggtttccgtcaaaatctcatggttaatggaagaaagaactagtcatctttcaaacccctaagacggcaatcgaaatcatgcaactctggttgtccttctagtgatctgacctttatcagtggcgacatgaaatcatgcaactttaattatattcaattttcatcaacttagtgggttactaccaaaatggacttattaattttcattgttcagttagattctactatatatgggcttttatttctagagtgagcttttggtaaaattatttggtcattttgttgttccttcaaattatgagcatcaatatattattgagagaaataactttcctcagatattcccaaggaaaaaggacattaagatttttttttgtttcttaagattatgcaattttataaataactccaatgtgttatatccggatttaggtctactagggcgtaacccgcggtttttttttggtaatgttattttttgaagttgtatgttgttagtgaatttgtgattgttcatgttatatgtagaagaagaagtttattagaaagtagatggaaatacaatgcatttgttgttttcatatgatttgcaagttgaataaaaaaaataaaatgagtaatggaataactattaaaaatataatcatatgttaacatgtgatagttgggccgggtattggaactataaaccggcccgataaacttttcaagacggagacaatcctggaaaatgcggaggtggctaaaggagactctctctactggcaggtaaacgaaactcgtgggaaatggacaacgagaggattcgagagctagagagacttcagatcaagcagatttgtgagcttggtttgagggattccaagttgaagaagtcaatgataatgatgacctctcttcatttcccttctcttcccacgctcaagcttcgtgagccaatctctcctcttaaacgctagttgagaaacactttacaaagacaaaatataagccaaaaacgctctctgtagtcgaaacacaataacacttacaaactcacattaaagtcaaaatgacaataaaagtgcttaataagctccgagtggtaggccagtcgaaacacaaaaacacttacaaaatttttaacgacaaaactcaaaatgacacaaaaaaaacttccctacaaatccgaatggctagtcggaacattaattatacgacaacactcgatcatgtaaacaaatagtccgaacgatccatacaaaaaattatacgacaatactcgtaagaaaacatgaaaaatatgtcaaaattctaacgttagctcgttaaaaattctaacgttcgatagttgaaacattcaaaatacaacttgcttaagtcataagaatgttgaagaaaaaataaaccaacggtagtcggtgaaaaatacaatgtcaaacaagaagctaaaaattgatattacgaactatcaaaataatacgttaaaatttgcctatacacataagctaaaaattgccaaacaaaaaagcaataattagaaacactgaaatgtaaatcaatcccacattaacaattaaaacaaagaagaaaaacaaaggaacagaaatgtacaatcaatcccacaactgcttagccgtgacgatgagacccatcaaagaacaggagttaaaagaggtttattggagaagaaagcttcaatattccctactacaactttcccaagttcttcaagaccttccaatgtcataaaagcacaatgtggagagaaaacaacattatccaattcaaaaagctccttaggaacattagactcatcttcaaaaacatccaaaccagcaccaccaatctcaccatctcttcctcatcgattatagccccaagagccacgttaacgatcactccatgctttcccagagcagaaaaaacatctttattaatcaaacgcaatgtattctcattcaattcacaacagattatgagtgcattacagttagctaccatctcctctatatccatgtaataatgatatggaacagcatatggttttctgtttcttgagctatatgaaatttggcaaccaaaggccttgagcctcgtagctaccttcgagccaatgcttcctagtcccacgattccgattcgctttctctcaagttcaagatcaccttatcttgacttaggtaccatctgataccgttcagatcaaagtcgacttgctctgatactgattcaaatcaggatcgtcatatcctgaagtagacgctgactgattcacaaagtagtccaacaatacaagaacttgaaagatataaagaacgacttttctatatattgatttagaaacttcttaaaaataaatctctctcaagaacttaggtctttggaacatctctccaaagcctcttacttaggtcttatggaacaactctccatagcctctttatatagaacttagctacccctaagtctatctctctttaggtcttatggaacaactctccatagtctctctatatagaacttagctacccctaagtatatctctcatgaggtctctcttgactctcatgtttatctcatgaggtctctctcgactctcatgagatctctcttgagatctctcttgatgactcacatcttgagctctctctttgatcctcttggatgcttttgctctcttgtgttatcttcttcttcttcatagagatcatatatatactagaaccaaacacctcctttgcctattgtgaataggaatacttacaaatcttatccaactggacattatttgtatttctttttctcttgatttcctttcttgaatttcctttcttgtatctcttctagcatcttctacaaggagataacttgcccctcaagtaagttggaattatccaacattcttcccaactgcaaattagagggaatcatttacaattaatggaatatttgttgctaatttgattttttcgcaagttatgttgcaaaccttggaaccgaggggataatctcctttgagtggccaaaaccgttgcataactaaccgactggtagcagagatgcgacggaaaacgtcgataagtaaaccgatggcagtatttgcgacatcttcagagaagcttgagccaacgttggcgacggagatacctcaacgacgacactcaactaagtcaacatggtcaacgccagcgatgatagtaacaaccaagcgaagagattttctttgaagtcaaaaatacatgttgcttttgaggtcttggttatcaacgcccgtctgtcccctattctgttgcatctgtctctcgaacctctgttccttccttgtctctcgatagactcgttttattctgtttttttctccattaattttctcttccatttgatcggatccgtacagtctcaggctcgctctgtctccctccgatctgaccgattctttttcttcgatctgaccaatcagagtcaccaaaatggcggagacgaaggccaagagactacttaaagtggaaatcagattcagctttctcgtcccaattcgattcactaacaagaggtaccaacatcgattcaacttgcccatctccaaaaagatcttcggtgactccgaaatgttctgtgcaaggtacgaaacctctaaacgaaagccataatttcgatcacagtgatgattccgagggattgaaagatagggttgctcacgattcgaatttgctgaatgagctcgaagattgggttgctcggtataacaaggaagcagagttttaaggtattggttcgaatcccattttcactggattctgttggacacgtggagaaagtagaggttaatgaagacgagatcttgagtagaagaagaagatcaggtcttggggatttggaattagtaagttctaggcagcacaaggatttgtaagatcagttacagtggaagttttgcacatcgcgacacagtgaagtatttgataaaaatgaacgcttgggaacttgtcatcagtgttttctcagcttgtcaaaatatatctcaactatcatgaacagcgtgaagcattgttttctggaaaagctgcatctgtacctcctgtgaaatatgaagaacagggtattgtggtatttgctcgaatcccattttcactgtctatctggattctgttggaaacgtggcgaaagtagaggttgatgaagacgaggtcttgagtagaagaagatcaggtcttgatgatttggaatcagtgagttctaagcttgtatatgcgaagaaattagctgaacaaatggagaatggggaatatgtgacccataaggatacttctcttctcaagttcgtttcttcttcttcttcttcttcagaggaagagtttcgtttcgttagctcaatccaaaacgcaattcttcgtcttgacttaattccaaagttgccggcgattggaagagctgttttgtttggttacattggactctggttgctgaagaggtgcttgtgtataggaagagtaatgaggttgagtgtacagagttggagaaggagatgatgaggagaaagatgaaagcttgggaggaaagggatatgtcggagaaaggtaccgtggaagttttgcacaaggagggcttggaaaagccattgatgtcatttgagaagcctaagtttgatcggaatgaacttatgagtagcatatctaaagttaagggttcagagaagaaactggaactcgtgaattcttctcatgttgagctggactttgatgataagatccatgaaatcaaagtaatggctaggcgagcacgggagatagaagctggcatagaacttaatgaaaaggagaagcgcgatgtgaacaaagaaacaggcgacagtgatgaagatataagcattcagtcacagaagagtcttccacatgacggtttgacacacagtgaaggtgatgatgataaagatgaacgcttgggaacttcgactgacagtgagaacactgaactttctgcttttgctgttccgatgttgaatggggctatggtagattcaggttttccgaatcatgaaatggcagcatctgacaaaaaaaaggtgagtaatgtggtaccactagttcctacagacggagtcatccaagcttctgatgtcactaaggatcagttaagtatgatgaagaatagcactggtcgaaagtcacgggtcatacggtctgtaaaagaggctaaagagttcctttcaagaagaagtggtgagaaagagcttactcaggaactttctcagatggcccaagacagtgatgaaatcttcccaaaacagagcgacgaagagcgtggtgtagctagaaaacacaaattggttgacaaaaataaaatccttggtgcagctgtcaattgaaccttgaaatctgcacttgagtctacttcttctgaaccgttggggaaggatgttgattctcaaccccaaaagaatgactaccaaaaactctcagaaactgggactgcagttaagggatcgagttcaaataaaagagaagagctcaaatcagccaaaagctcttctggtggtactgaacatatagagaaggaagaaccatcaggaaaggagaattggatagagaaaactaccatgaatttgagcctgttgttgaaaaactgagagcaggatttagggataattatatggctgcaagagagagagagaaactcaggagcctggtacgattgctgatattgcagaactttaccgtagtgaatataatgatgagcttgagtggatgaaggacgaaaagctaagagacattgtcttctgtgttcgagataatgagctggctggtagggatccatctcacctgattgatgctgaagataaagctatatttttgcaaagcttggagaagaaagttgagaaagaaaatgagaaactgtctcatctgcatcagtgaattcattcaaacgttgaaaacctggactacagagtaggtaatcttctctacaactttgattgagactaagtttgctcaatatcttacgtacacaaatgatgcattaatcagcttgtcaaaatatatctcaactatctcccttcctcttattattcagatggcgtcagtgtgtatgatccactagaaaagatcataccgagatggaaagggccttcgcttgataagaaccccgagtttctcaataactatcatgaacagcgtgaagcactgttttctggaaaagctgcatctgtatctcctgtgaaatatgaagaacagagctctcatcaggaattatcagagtctgcttcctctgagaacactctcaccccttcatcagaaattacctcaagccagccaaagattgttgtagaaggaagtgatggatctgttagacctggtaaaaaatcaggaaaggagtactggcagcacacgaagaagtggtcacgtgggttccttgagttgtacaatgcagagactgatccagaagtgaaagctgttatgagagacatgggaaaagacttagaccgatggattacagaagacgaaatcaaagacgcagctgatataatggaaaagctgccagagaggaacaagaagttcatggaaaagaaactcaacaaactcaagagagagatggagttgtttggtccgcaagctgttgtcagctaataccgcgagtatggagaagataaggaagacgattatctatggtggttggacattttattactaaaaagctcagttcgagcaggcacttatgcaagagatgctgactgtttgtttttaaccgaaaagagcttattggtaagagatgtttcttgtggataatataactcttctttgtgggtaaaaattggtttgttatgtaaactagtaacttgaatattgttttatctcagatgttatcagtgctgtttaaagtgtatggggctatggtagattctggttttccggagcatgaaatcgcagcatccgacaaagaaaaggtgagtaatttggtaccactagttcctacacacggaatcatccaatcttctgaagcagagtattgtggtatttgttcaaatcccattttcactgtctatctggattctgttggaaatgtggcgaaagtagaggttgatgaagacgaggtcttgagtagaagatcaggtcttgatgatttggaattagtgagttctaggctgcagaaggttttggaagatcaggtacgatggaagttttgcagaaggagggtttggaaaatccattggtttcgtatgaccggaaagattgatctgttactgacttactgctgatgatgtttccggatcagctactacttcatatctgttactgctgatgtttcggaagattgatctggaggttatatcccacaggcttattaagggaccaaggcatcatatttctatacgatctttttctgaaacttatggtcatttacaggaccatgcatgggtcagacaaggattgatgtatccatttacggaatttatgggcaagtaagtacatgagacgctcatatttactgtattctttcatatttgtctgtttgtgtctgttccttagcctttcataacttcagatttcaggatcagacaaacttgtacaattacaagccaaatttaagaatgcacttgaggaagcagttttagcagaaaatggggtcgagaataattgtagagatgctgaaatcagctgcccagattcctctgcgccttaatccgaccaggactatggacctgcttctagatttcaggcacgttttcttgacagttgacacatattccttttcgttttttttttggttagatgttcaagtttgctcttctaattggtttgggaagacaaaaagtaaataaattgacagttctataagcatcctgtataattcataatcagttcggtaagcatcctgtagcatctacgtctggtgatatactttctgttctaagtcatgaaggcatttatacatactacataggcgtggacgtacagtttgtatctgactcttttacagttattgggaatacacaccctaaacgatttgcttatttaattactgtgtagggttcatgtcatgaggacataaggacatgcgacgcttgtggctcaggttgtgtgatgtcaacaggttagataatgagggaaaaggaacctggtgatggaaagggttatccatttgtaacattcagatgtaaggacttagctgctgaagcaattgataatctaaataacactgtattcagagtaagttctttgacctgattcttaatagttacctagaattttgatggattggtgtttccgaatatttctggctcttatttgtttgtttacttattgttattcaatagggtaaaaggataaaatgttcgactacctaagcaaagcatcgtctctttcttggtaatgtccctagaaattggatggagtcagacattaagaaagcagcaaatagaattggtccagtcgttcaaattgtcgaactcctaaaggtttgtctcctgcaacttggataagtttcagcctatagtgtatatctagttagttctgtaactttcatctcaacttcacgtataattgtaacttacaaaagtgaattttctgtagaaattaatacatttcttgatcagtttttctatttggttttgttaaaatcacaggaaccacaaaatatgggccggaatcgtggatttactttcatcgagtattacaaccatgtatgtgctgaatactcaaaacaaaaatgtcaaatccgagtttcaagcttgatgataatgccccaactgtaagctgggctgaatcaaggagtggaggagaaggagacttttctgcctctcaggtttacttctttagaatctatcttacaaataaattatagtagcagcaacagtaaccttaccaacaaaatgtcactaccaagaaattattatcatagagacgtgttctgcaaatattcttctttctaaacaatgaaaagctgtgtggaatgattgcaggtcaaggcattgtacatcaagaatttacctagagatataacacaagaacgtctaaaggcattacttgaacatcacgggaaaatactgaaagtggtgatcccaccagcaaaaccaggaaaggaagacagtagatacggatttgtgcactacgcagagaggacaagcgtaatgcgagctttgaaaaacactgaaagatatgagattgatggtatgttccattccgaaatcacaattgcaaccaaactatcctcctcttcttagttatggcatggctcttagtcccttggtgctcttggtggatttggagcttctgcctattcacaagtgagatttctactacttatcaatcaaatcattatctcttgagaaaaacgttaaaaaaaattgagtataattttgtgggaattatgtagccattaatgcatgcgggaggtcacgcagctggtggaatgtcgatgatgccaatcatgttacctgatggaaggatccgatacgtcttgtaagttcttatctatactccatatactgatctcatgtgtttgctataagacacgtttactgatctgatgtgttgaaatgtaataggcaacagcctggactagcagcgatgccacaaccaccaccgaggccttctccaccgtataggggatgcagcggttcgagcagcagcaaacaaagtagcgacaacggtagaggacgaagctgttacaatccttattagtaatttcataaattatgtcttctttatttggaaaaacaccccaaccaagtcacggaaaataaaaagtcaattttaaccattgtgttttcgtttttgtgtcatttgttttaaattgaatccaattttttcacacatgtctctttgtttctggttccttagtagcctgataaggtctgaccctatcgaagacaagaaaaagactaagactgataaaataacaagacaataggaaatgcaccttgaacggcggagagtgtagatgagagagagaatttcaagattaatgttgttgattgtttatttgataacaaaaccctaaaagggaaggttccttaaatagcatctactgagactcaatacaaaacgcaacatttcgataacccaaaagtaaaacgacacagttggcgagctggcgagctgtctttctgtgccgagctggcgagctgtctttctgtgccttagccacttttaaatagaagcttcctcaggaacttcttacgagctctgcctttccttccatttgatctcgcccttcttctcacaccagccaacgtcactcgtaacctatcaatgctcccgcgcagaagactgaccttgtcctcaaggtcgaagtccgggtactgctgcaccaaagtgaggagcggctcccaagttgattccaaggttgataatccagaccactgtaccagcacctttggtcctgaatttgtgttgctctgtcggatatctagcagcttctcaggtcctgtgttccattccagtgtgggtgatagtatcttgggaagttcctgcggggtgaatgacggaggtacagcccttttcagttgagatacatggaacaccgggtgaattgtgctgtgttcgggtagttggagcttgtaagcgacctgacctatgcgttgcagcactttaaaatggaccgaagtagcgctgggacagcttttcattcttcctatgagccacagaactttgcctataaggacgcagcttcaagtaaacccattcatcaatttcaaacgctacatcacgtcgacttttatcagcagcctttttcatttgagcttgagctatctccaagttctctcttaattcaaccagcattccatccctatccttaagtaactcctctacattcgcattattggttggaatatcgccatacctgagcagaactggtggttctctgccatagactgcttgaaagggagtggttttggtggctgaatggtacgaggtgttgtaccagtattctgcccaaggtaaccactgaaaccacgatgtaggcctcctccctgcaaagcatcgcaaataagactcaagacatctgttaacaacctcggtctgcccatcagtttgtgggtgataggctgtactcttctgtatccccgtgccctgcagcttaaacaactcagaccagaatccgctcaggaaaatcctgtccctgtccgaaaccagtgtgtttgggaagccatgtagcttgactacatctcttatgaaggcctcagctacagtcttggcagtgaatggatgtttaagtggaatgaaatgactgtacttacttaatctatccaccactaccaatatacagttaaacctgttagagcttggcaacccttctacaaagtccaagctgacatcactccaaatctgttgtggaatagggagaggtgatagtaaaccggctggagagagggtagagtatttattctcttgacagatttggcatcccttgatgtagttaaccacgtctttccgcaaccctctccagtatacttcgcttgtgagtcgtttgaatgtcttaagggcaccttcatgacctccaataggactggtgtggaacttctctagcatctttggaatgaagggagatcctacaggaattaccaaacagccttttctgtaaatcaagccatctgccacagtgaagtcagaatcatggtggtccccttgtgcccaattcttaagtatctggctcaactcatgatcctgctgaatttctgcctttagtgcagtcaagtcgatagtaggaggaccagttatagtgagctgtgagagagcctcagttggaggtctccttgagagtgcatcagctaccttattgtcaactcctggtttatattcgatcctatacttcagtccactcaacttagacgcccatctctgctgtattgtggacaccgacttctgttccaacaaatgtctgaggctgcgtgatctgtcttgataatgaattctttacttgataggtaatgcttccactttgtgacagctttcactatggctaacagttcacgttcataaactgaccttattctgccttgactggagaaggcttggctgagaaatgcaataggcctcttattctgtgacagtactgctccaatccccatccctgatgcatccgtttccacagtaaactcctgctggaaatccggtaacactagcacaggtagtgctgaaacagctgctttgagagcctgaaatgcagaagtagctgcctcattccaatcaaaactgttcttttttaactgatctgtgagtggtctggctatttggccgtaattcttgacaaatcggcgatagtagccagtgagtcctaggaagcctcttaactcagtcacagatttaggtaaaggccattggagcattgcttccaccttttctggatctgctgcgactccttgctcagagataatgtgtcccaaatatgagatcctagtgcttccaaatgtgcactttttaaaattggcatagaactgatgaagatgcagtagctgtaagacggtttccaaatgcttcaaatgtgtcttcatatcatgactataaactagtatatcatcgaagaaaaccaagacgaactttcgcaagtatggcctgaataggtcattcatgacgctttgaaaggtggagggggcgttggtcaagccaaatggcattaccaaaaattcataatggccctcatgtgtcttgaaggcagtcttctccacatcacttagtttcatccttatctggaaataggctgatttaagatccaactttgaaaacactgtggctcctttcagttcatccaatagctcttctataacaggaatcggatacctatcgggtattgtagcttcattcaatgctctataatcaacgcagaagtgccatcctccatctttctttttcactaggagaactggacttgaatatggactcacgctaggtcttataatctgagcattcaacatttcacgcacaagcttctctatctcattcttttgagcaaaagaatacatgtatggtcggagattgactggtgaagacccttcttgtaaggtaatggcgtgttctctgttgcgaactggtggcagtagctgtggagtttgaaaaaccccttggtactgatccaaaagcctctggattgcaggctgcaaggctgtttgctcttcctgtttcttgctttcaaacaaagatgctagttccaagagatatgcagttccagtgtatttgataactctttccatagacctcatcgaaatttgtcctctacatagatccgggtcgccgtataaggatacccatgtgcgacctatctgccaactgatcctcaaatctctccagttggctcttgtttctcctagtcctgccaaccaagaaaatcccagaaccaaatccaaatctcccaagtcaaataagtagtagtcttctacaaactcaattccttggacctctagtggtatatcgacacacttcccactacttttgatgattctgcctccaccaactttaactccaaaactgcgagtttgagtcactaaccatcctttctctcttaccaaagcctcactaatgaagttgcaagttgctcctgaatcaaccaataacaccactttggtgttgccaatgtatcccctcattttcattgactgctcatgagactcatcattcaaggagctgagtgtcattaccttgaaaccttctgcaggttctggatccccttcttcttctgtcagtggttcattcaactcttcaattagaggactctcctcttcaacctcttctgttatggctagacccttgagcttttatggtttgcatttatggccttgaaaccatctatctccactgtagcggcacgggtttgagttcctggcttccccactgcctgaagcacgagttgtatccctactaggaatgaagggttgtctcgttggagcacggtctaccactctagatcctgtggagacctgattgttgaatggagctgtgttggttctagcttgatttcgcacttggtaactaacagcattccgctcttgtgactcaatgagtttagctatctcaacaatatctgcaagattcactggcctacagcgaactacctggtctcgaagacttcttctcagtccattgaggaatgcagattccaatatgtcagatgtgacatggggtaagtcgactgtgagctcttcaaaacgttctctgtattcctccacggttcctgtctgtctcacgttgaagagatgatccacagcagaactgcctctgcttggtcgaaaacgtaacctgaacttttcttgaaattccctccaggtatagatttgttctctgtccttagagcagcgccaccatgtaactgatgctcctgttaaacaagacacagccttttccagtttttcttcctctggggtgcgattggataagaagcactgttctagccggaacaaccaatcgtcggcattgcctccttcataagccggataatccacagtcctaggcggggctgcttcaaaccgaggttgatgtggcgcagattgaggcggaaacgtctgtgtttggaaggttggagtagtctgaaaccccgtggaaggattagatggaaaacctgaagatgatggaagacccgtggaggcattcagctgaaaccctggtggttctaatggtgacgagtgaaagcgacgcggttcgaagggtgaagctggaagtcgaggtatctctgaagtcgacgcctggtatcgcgactggtcaaagagtaagggccgagggtgtgtgtcccgttgatttgtgccggaaaacagagtctctctgttctgtacctccaagtgttgaggatgagaggtgtagactggtaacgccggagctggagaagaaaaacggactcctctattcggtccttccagatgttgtgggtatgaagcttgtaaaggcagtgccggtgtcggagtggagaaccctatcggagctgcacttccctcacgcgtaaccccaaagatctgatttctaaggatctgggttagagcctcgctgacataagtcatctctttctccactttgtctactcgtgtgtccaaatgtggagctggcggaggttcctcaggtggtggtgttgttgtcgagccgagttcaggtgactcgacggcggtatcagatgcggtggctttaggtaacggtggagccatcggtctctacaatgaagaagcaccaatgataaggtctgaccctatcgaagacaagaaaaagactaagactgataaaataacaagacaataggaaatgcaccttgaacggcggagagtgtagatgagagagagaatttgaagattaatgttgttgattgtttatttgataacaaaaccctaaaagggaaggttccttaaatagcatctactgagactcaatacaaaacgcaacatttcgataacccaaaagtaaaacgacacagttggcgagctggcgagctgtctttctgtgccgagcgggcgagctgtctttctgtgccttagccacttttaaatagaagcttcctcaggaacttctcacgagctctgcctttccttccatttgatctcgcccttcttctcacaccagccaacgtcacccgtaacctatcatagcctttcatctcttcagatttcaggatcagagaaacttgttcaatttcaagccaagtgaatttaagaaggcactagaggaagcagttttagcagaaaatggggtcgacggtaattgtgtagatgctgaaatcagctccccagattcctctgcgacggaatccgaccaggactatggacctgcttctagatttcaggcacgtttccttgacgcatattccttttttttttttttttttgggttagatgttcaggtttgctcttctaattgatttgggaagacaaaagtaaatcaattctgaacagttctataagcatcctgtataattcataatcagttctgtaagcatcctgtagcatctgcgtctggtgatatactttctgttctacgtcatgaaggcatttatacatactgcataggcatggacgtacagttattgggaatacaccccctaaacgatttgcttatttacttactgtgtagggttcatgtcatgaggacataaggacacgcgacgcttgtggctcagtaatgccattaaaatctctaaaaaggactaaagactcacagccggaagagcttttatgcaaatactgttcaaaggttcttatcaaaatttcctcactcttcagttttctttgatcaaaaggaattgaatccaaatttttgtaacagttgcggaaatccaatcagtattgtggcatctgcaagagaatatggcaccctccagatgatagagattgggtgagaatctctttgaccatgtttggtgaattactgacctgagtaataaactattgcatccatgtagctggcttgatttgatgtagtaggtatgttgtgatgggtgtaacgtatgggacgggttcatgctgaatgcgacaacattacgaatgagcgctttaaggtgcagttatacatcgccgtgcatcttatgttttgattttgtaagtatgaaagactattgtcgaatgactgttctaatttggttatcagcacaacaattactattgccctgattgtaaaatccaacatgagcttgcgccaacaatattagaagaacagaattcagtgttcaagtatgttgttaacatcttatgttctctcactttagtcttctggaaaaaatgtgttctcctgcttttattatttgcactgttctattgttaattctttaatttgcaaaatatcctcttcacaacctctttgggacaggtctacagaaaagacgacaggactgagctgcctgatgcgattactgtagtctgtaatggcatatatttttttttttatctgaaaacgacaattctgcgttctatcctaggcctctgttatcattctcttgttgttccagagattagaacaacacttttatcttgggactattgttttcagaattgagtgcaagtgtggttaagtgcaagtgtggttcatgtgggtcaaggaagcagtcaccaagtgaatgggaaaggcatacaggctgcagagccaaaaagtggaagtttagtgtaagagtgaaagacacaatgcttacctctataaaaatgggtacatccgttatgtgttggaatattgagagaaaagcaaaaacagagtaagagacatttgtctcagagacatttgtctcttttcttgtaaagaagacaagaacaaaactttgttttattaaaaatgaaacttgttgttttactcgactagatacacacacttatgtacaggtcttaggtacataaccgaccaaactaaacattgtgactgttgaaactaagataaactgcccaaactaaagttacgactcttacaaccaccttttgctataacatagaaacttaataatcaaataacatattaccaaactcaattataaactaacattatgcttaactctctcataaacaggccctaatatatacccctgaattttccatgcaaataagatattacagattgtgtgcgtccgaaatccaaacacaagccgaacagagtggtgtatttgattctcaatctgcagcaagatgatggcttatatacagtagatcaaacacaaagtgtatgcttctagggatcttgtttattattggacattggagagtcgttcattcttaagtattccctggcaaaggtactaatatttcatctctgttactgctgatgtttcagaagattgatctggaggcgatataatacgacagacttattaagggaccaaccaagcaatcattcgttgggtacgacgaagccatctctctgttcgattactttttcaacgagtctcagactctcccaaacatgctctcctgcaatctcatcatcaaagcacactgcgaccaaggcagcgtcgaccacgctcttgagctctaccgccacattttgctcgacgggagtttagctccagggatcgagacgtacaggatactgacgaaagccttggtcggtgctaaaagattagatgaagcttgtgatgtagtgagatccatgagccgctgtgatttcgccgtatacgacattctgattcgagggtttctggataaaggcaaattcgtaagggctagccaaatcttcgaggaattgaaaggaccgaatagtaaacttccatggcgaaactatcacaaggcgattgcaatcttcaacgtttcgtttatggactactggttcaagcaaggcaaagacgaggaggctatggagattttcgcaactctcgaacatgctgaattgctcaacaccatttccggaaacggagttttgaaatgccttgtggagcacggtaggaaaacagaggcctgggaattgttcttagatatgatagaaatctgtgattccgagacggttggcataataatgtccaaggagggttttttcggcgaaaagactatcccgtttgagcgagtgagaagaacgtgttataccaggatgatcgcgagtctctgccaacaaggaaacatgttggaggcagagaaactctttgccgacatgtttgccgacgttgacggtgatgacttgttggcaggacctgatgtttcaacattcagagcaatgatcaatggttatgttaaggtagggagagtcgatgatgctatcaagaccttgaacaagatgaagatttctaatctcagaaagctttctattcatcaagccacataactagactctttattttatttttatccttgttgattctgaaaatcacacaataaattttttaaaaaggggtaaacaaatttacttaactctctctcgctatttagtgaccaaagattcaatggaaagaagaacaaagttgcttggagacaaagttaaggttttgcccaagaacaatgaagaaaactagggtttttagtattaaatttcggatccttgaaatagaggacaaacccctctatttatacactattaagacggttaaaagatttgttaaacttctatttcttcgaggcttgaatcttctaatttcctttatctccaaagactttctattttcaaaggagaaaacttctttttcttcgaattaggaagtcggctagacggtctccctacttgggctaaagtcggcaaatgagctccttattttggcccattaacaagctaaaccgggataccccggtttgattgaaatctcagtctaattcgtagttcctctggtttaagccggtattgtcggaggtgctaaatccggcaccaacaattagtcccccccagttcgggaaaatccaaatgctaaactcgagtttttccgaattaaaagaagtgaatattcggcttatactttaggaagatgcgaattaaaatttgatccgttgaacctccaagatacgtcagtttagcttggcacgcgtcgacgatataaaacaaggctaagcttgtgagttaggtagtctgatggacctcatgagttgttgaggagctgtgggatgctctcctagatgatctgaatgcctagcagagaaatgacctgactgatgagccgagcagtgagataggttaccaaatgatcttgctaacaagctgcaaggcaagctatcagatgatctgacgagcgatctaggatataggttg

SEQ ID NO: 1461 - DNA, 71284 bp, Arabidopsis thaliana
aagcttgtgagttaggtagtctgatggacctcatgagttgttgaggagctgtgggatgctctcctagatgatctgaatgcctagcagagaaatgacctgactgatgagccgagcagtgagataggttaccaaatgatcttgctaacaagctgcaaggcaagctatcagatgatctgacgagcgatctaggatataggttgctagatggtttgtcttgcgatctgcgagatagccgggcagatgagctaaaaaaaacataagttgcgatgagctgcaaacatgccattatcatttggttagcaagatacgtgagcttttgagctctttttttctttaaggtgcgaggaactctcggcttatcctgttttgaagacttaaagcaagacgaggtctcggtttttgtgaaacattcacataatagcaagcgtcgagctcggctcaatttataagtgtgactgcgagcgttgagctcggattaactgcaagaattatttttatcttttgaatgtagctcgatgctaggtgaactaagctttttgagtcgggactcaatttagagcttgacttcaacaatcaaaaaatgtaaagcacgaatacttatcttgatgggagaagaaatggcgagaggctgagctcagaattgctgttccaaaggtagagttgcattgttcgtctatgaagagtcgttcttatcaactagtgattaccttgcagcagagaaaaatactgtgataactctttgtcgaattcgacgttaaggtgtaggttggtctttctagaaagctgagcctcggggcttcgaattgatatgcagatcgccatgaatattcttttggattgctagaaatttgctttctaatttggttgatcgtgcagtgaggatctgcgtttcgctggttgcatctgttgcaaagaaagagtcataaccttcagtgtaaatttctgattgaggcgagattggcttcttttgaaagctacttttcggggcatttcggggaattttggagtctttgtaaacttctttggagctctccacattgttgacttgtcttgtagaaaaagctcaaaatgttagctgttgacaagttgagctaggaaagctgctaggcgacttgttgaagaactccaagctgttgacgagctgttaggcgggcaatagcaagctaggaaggctgccggcgagctgttagctgggcgaacgacgagccagagaaactgcagacgaactgtgagctaggaaaagtacagactaggtgctagctagacgaactgcgagctaggaagctacagacgaacagggagccaggaaagctgcagacgagctgttagctaggcgaagtgcagacgagctgctagctagacgaactgcggctaggaaagctacagacgaactgggagctagaaaggctgcagacgagctgttagctaggcgaaatgcagacgagctgctagctagacgaactgcggctaggaaagctacagacgaactgggagctaggaaggctttaggtcggttgacttatgttgaccactcttatctttcagacttatatttgaataaaatgtttttgtccttaagaacaagttcatgttttttttttttttttttttttgtgaaccttcgtcgtttgattacgtattaacaatatcggattcccaaacttgaaattaggttttaaatcgactaaattataagccatctgcaagctttgagctcggctttcgggcggactggttttcacctgacgtcacagccgattttttctgtctaagttcgggttagatgttaagtgcgagactgagctcggctttataaataaaagtattcggcgtgtactgggcgcgagacgtctctcggcttatgcccagtaggcctatgtataatttaaagagggagttctgggctctgtataaaaaataagtgaggcggactcagcatattagttggggagcgagatgctgggctcaacttactccccgtagagcatctgttcggcagatcgcgaaatacagggttcggcttatatttctgtccgaaccagagcttaagtgcgagaaaactaatagtctatagaattaaattaatagtctatagaatggagtaaaccgagaaatgagagagagttctccttgaaccaaggataatcaataattgattcccggtttgttcataaaattagattcgtagcacccaaaccgattatattcgcaaaattaaaatccgatcaacataaaccggtcgggcaattccaattttgatgctccgtgtattgatctgcgactgcgagatccatcttcttcttcttctccttcttcttcttcttcttcttcttccaacaaatgttcctatgatctctgtgtatgagcagaatctgtaatcagatccattgtagagagagatagccatttcaattcgaggtagccaaagatgtatatggcttacgggtggccgcaggtgatcccgcttctacctggatcgtgtccgtcttcgcagcgagtcgtgtaccttaagctcgccggccggctattgctggtagtttctccgtctcacctggagctttggggttcttctcaggtgctttatcatcatctctctgcatttcctagtaattggagtctagagttggttaacttacatagctttttgtttgattttcctggaattagcaacgagtgaggttgggaaagtatatgagagatgacaagtctgtgcgagaagaaggagagaatttgcaagctgtgtggagtccagacgccaaattgattgctgttcttgtaagttcttagtctcactcttttcctttgctaatttctgctaattgtttagtcactttctccagctgagaatttattgatttgtttatacaaaatcttgttattggatcttctccagattgttctttatgtgtaaggatgagaaaaaacatgtttttaggtttgattggttgatgatttcagacattctaaagcctctaatttcagtagtatcttatttgaatcgtttgatcaagatgcatgaaaactcggaacttgtgaaaaaaccagttttttgtatgtcttctcaccaattattttttgattcgcagacatcatcgttctttcttcatatatataaaattaagtttaccgataaaagagtaaaacccggagagagacaaccctcggagttgtgttttgcaaccatatctcttttgctaagtgagcaggtcccttttgctggcaaggacttgtctgtgtaagtgctttttctgtacgtgtctctgccgtgctcaacattttccgtaggagtctacacagttaaaactctgggattataaatgtaaggccaattctttctctctctgcaggagcaattttgtgagggacagcaaaactatgcttttgggactctccgatggatctttatatagtatttcctggaaaggagaggtaatgtacatctgcttcatctgcattgaattctttgtgcaagattcctgatttctcatgttttgtttgtctttgtagtttggtggagctttcagtattggctcccacccttctgatagcaacgatgatagactcttgtcctacactctcggtaatgggctagtctctggagtagcttcaccaacacttgcatctgatgataaattctctacaaatccggctattgttcagctggaactttgcactcgttccaagttattgtttgtgttaaattcggatgggcagctagtagtatgctctgtgaataagaaaggtttaaagtacacggagagtattagagctgagaagaaggttggtggtgatgctgtttgtgcatcagtggcttcagagcaacaaattcttgctgtgggtacaagaaaagggatggtggaattatatgatctatcacactcgatctctctcttgcgaacagtttctttgcatgattgggggtaagtaacttgttactatgaaaagggatggtggaattttgtgttgaacctttattttttaaaatttgttttgaaaggtttgagtattactatccatctgagtagtttttattgtggtgttgtgtaaagaccataatatcatacttgtcatactacaactggaagtttatacgcccttggtagttttcaagttgtcttactgtgatttatttcatgcccttgatattttggctgcatcgttaataaaactgttttaaaacttgcagttattcagcggattacactgggcctgtaaataacattgcatggacgcctgataattctgcttttgcagttgggtggaagtcgagaggacttgcagtttggtctgtttctggatgtagattaatgtcaactgtccgccaaattggactgacttctacatcttcccctaaaattaatccaaaacaagactgtaaatacgaaccactgatgagtggtacttcagccatccagtgggatgaatatggatatagactatttgctacagaggaggcatcatatgatagaattcttgcattttcttttgggaaatgttgcttaaatagaggagtttcaggaaaaacttatgttcgtcaggtaatgtatggtgatgatagactactcatggttcaggcggaggacactgacgagcttaagcttttacatctaaaacttccagttgagtatcatcatatccgttatccccttttgctcattcatcgtatcacttttgaaataaatttcttatatatgttttcttggtccaggtttcttatattagccaaaattggcctgttcaacacgtggcagctagcgaggatgggaaatacttggcggttgctggtttacatggcctgattttgtatgacattaggtttaagaagtggagggtatttggagatgtcagtcaagaacaacagattcattgcaagggtttgttatggttggggaagattgtcgtaatctgtaactacattgaagcttctgagacgtaagtcccgatctatattattagtttctaatcacggttcactggctatatttattaatgtttacaaggaagagaaagtgccttttggtagaaatgtgtttgcaactcttccagacttttttacatgaatgtgataaacgtttctgagcattttgtctttgaatgttgtttaatttcacgtgtatgttcgctaattattgcagatatgagctgcttttctatccaagatatcaccttgatcagagctctttactttgtcgtaaagtgctgcttggcaaaccaatggtgatggatgtttaccaggattatatacttgtatcttatcttccgtttttcatccacgtctaccatgtgaagatatatggtgaattgacaccttcaagcaaagcagatctgcaggtagttagttatttcggttcatttcttctctgcatcattttcagtaaattatactttttaactttcaaatgtgagcgcttgagttgcttttcatgcaccttaaagtgattaaatgacaaacagctttccacagtaagagagttgtccatcatgactgcaaagagccatccagcagcaatgggatttgttcctgatcagcacctgagagaaggcgaattggataatgataatttgtcttctgatttgtcggacagggaaccctcaaggtaatcatcaatagagtagaacatcctttcggtttatgctgtcattctaattgccttttgtggtctccgtagatgtcttatactgagaggaaatggggagctttcacttcttgatttggttgatggacgagagagggaacttacagactcagttgaactattttgggtgacatgtggtcaatcggaggagaagacaaatcttgtcgaggaagtttcttggctagattatggacaccgaggaatgcaggtaattcctctgcttcaaagctgcttgttatgctcacttttcttcttcttctttttttttttttttttttctttttctcgttatagggttgccctgcccctaagtgtctgacagtaactctctatttgatccctgtcttttttatttttttatttgttataacgctgagattctatattgcaggtttggtatccttctctaggggatgatccttttatgcaagaggatttcctgcaggtatgcatgctagtagagtccattttcactgccattggtagcttgtctttttgttctgatttttattgtctgtaacatcattgtttgacgacattgacattcaaacacatccctcttataaatttctatttttttcattgtttcaaaatgcatttttattatgttccattctctagctggatccagagttggaatttgatcgcgaggtgtatcccttgggacttttaccaaacgtgggcgtcgttgtcggagtttctcagagaatgtcattttcggcaagcgcagagtttgcgtgttttgagcctacaccccaggctcagactatactacattgcctgctccgtcacctccttcaggtattgttggtcctggcttctcttttcttaagttagaatgatcccttctttcttcctttattcatttctccattgcaattttttttattctctcagaatcttattctgtttttctcatattttggacagagagataaaaatgaagaggcgttactcttagcacaattatcggcagagaaaccccacttctcccattgtctggagtggcttctttttactgtttttgatgcagagatttctaggtatccaattcctatcaatctttataacgtatctctgttctttgtaatttatacttaaccttcttgtcttgcttcacctaatttgattttttgtactgaacatgtggcttttacaaatttcaggccaaatccaaataggaaccagatttcaggacctggacatcttaaaaagttatcccttttgagaaaagcctgtgatttaataaaaaaattcccggagtactatgatgtggttgtgaatgtagccagaaaaaccgatgcccgtcactgggctgatttattttctgctgctgggatatcaacaacgtatgttttcctgtctctatgtttggcttttgtttcttgtaacgttcatgaaactaggttagtttactgtactagacacgtgagcagttagcagttgctaagatagcaaacttcaccaatcttgtctgctctttttgttgagtaaactgtattctgtgctacgaaagttgatattctcttttgggttctaggttatttgaggactgcttccagcgaagatggtatcgaactgcagcttgctatatccttgtaagactcagaagcccttaaccattgagtatgtttagttaaataatgttgtatcaacaaaactgcagtcttcagtttgttactaggcaagtagcagtgtcagtcgtcatttgattaaaatctctcgggacaaaaaagcgcatggagttactattatagaacactgaagaaatctattaggttatgtttcaaatcgtacactaagtatagaaatggtgcaggtgattgccaaactagaaggtgttgctgtcagtcagtactgtgcattacggctattgcaggtaatttcggctgtcgcatgttgaatttatatctttcgagtcctttcttgtcaattttgttctttctgttcttaagaaagtttatttttatatttgcaggcgacacttgatgagtccctctatgatcttgctggagagctagtatgtatttgatgttcttcttgtttgtttaaaatgggcaattcaaagcttgaatcctaactaatgatgttattctatgaaaattatgctgttaggtgaggttcttactaagatctggaagagacattgagcaggcgccaacagaatcagattcattatcgcctaagcttctcggtttccttatttttggctccagccacaagaaatcatcactcgataagaggtggaaactacaactctgattgtagtttttgattttctagagtgatacaactgttttctgatcaatttttatttgtaaaacgtgaccctaaatgtagctcctcgttcaaagagcaaagtcctcatgttgcttctgtaaagagcatacttgaaagtcatgccagttacttgatgtctggtaaagaactttcaaagcttgttgcattcgtcaaaggcacccagtttgatattgtggtacgtatacaatttgtacctttcaccttttcatgcttggaaccaatacggtatatatattgattcactaacaataccaaaattccaggattttcttcaacgagaaagatatggttgtgcgcagctgcagaattttgctgcaggacttgaactgattgggcaaaaggttagaatcaacccccttgtggtttctttgatgttcaaaactcgttatttttctctctcattctgctgcttgaaacaatttgataactaaaacatagatccctgtcacatcgtaaaagtctgcatatttgagtaaatttatcttatatcgaagtctaactattgaaatccctcagctgcaaatgagtgagctacagaaccggttagatgcagagtttctattggctcaaatgtgctctgtcaaattcaaagaatggatagttgttcttgccactcttttacaacggtctgaggtaaaaatcttttagatttccaccgtaatcacgactttaaagcattcacagtgatataaccagattgtttctttattttgtcacaacacaggttctttatgatattttccggtatgatctacggttgtggaaagcatatagcgtgacattagaggtaacaaactcttgtttccataacaatcgatatccatttcatcacgtgcgggtctcctctttaaaacatgttctttgtttcagtctcacttggctttcgctcattaccatgacttacttcagattttagaggcaaaactctcagcgacctcacgagaagaaagcaatagaggttccatctcttgataaatcattttatttttgaagctttttcacatcaaacattttctgcctgagttttcacgttcgtgtagataaacataatttgagaagaaataagaaatacatcacctcacatacttttactatttattttggtcacaatagaaaggaaaagaaatgtataagtcatatcatgtttggcctaaataatcgaattgttacagcctgaaatcgaaaataaattgaaaaaaacactctgcattttgtgtaatgtgcgtgtatataaaaccattgttttgtccaacataaaaagataaatgtatatgtattttgatttactattcagtataacatgtttttattcaaatcaatgaagcttggaacaaaagtatatgagtgctgactaggtgtaatgttctggtcgttattattacaaatagtagattagaggtattaaaaaaacaatcggagaaagaaaaagagagttgtattaaaataaaactgaaaagtaagataagcataagcacccgtgaccgtgagtaagtatggaggcggcagaagtgggtcggcagaagtggggatgagtggagtgaaagtgggacaaccccaaagttcacaagaggctaattagaaaaccaaaaaaaacaacaataacaaaattggagatgctcttttatgcaaaaaaaaaaaaaaaaaaaaaaaagcaacaataatgaaaattaacatggtttaacacattctcattcctatatatgttatatgcgtaactggagatgctcttgtatgccccccaaatttgcatagtccatgttacttcacttaaagatagttttatttctaactttttctttataaaaactaactgccgtaagtagtaactaccgagtagtataagatggtaatgtaaaatttagtagccacgtcgaaagtgacaaacaagtgatgtatctatactctactctcataagtcacaagtcacatagagacaatcacccattcttgtatcatattcttttcagatgcaaaaataacctcacacattaaaacccgtgagtaaacaaacgaagtaaaggaattgacgttgtactcacctcacattctctccctagtttaaacaaattatgattgttatatgtttggaaagatacatgcaacacattttaaataatatgttgtgattgagccgaatgcttatatgattttctattatacgtatagcaatgaacacgattatgaattcgatttagagtgatgatacaaccttaataccttaatccattcaggctagagaccataataagttaacttaatctcctcatcctagtcactactcgaatgccatctttacgtttaaaacaattatggccacactaacgatatacctatgtttgtttgctagtataataaggatatgtctctatttgctatcacttcagccttttctgaagacaatgttaccgctatatcttccaatcaattgataccactaaatgataaaatcattgctaatcttataagatcaccaaacactcagacaaacagtttgaatcttgcttcttcttcgtttctccactctttatccgcttataaatactcttattctctcctcttaacatcctcatcaaaccatttagcctctccacactcacaaagggctcacaagtctcaagtaattctctttctctctctcaagcacaaacacacacacaaatgtataaacaaacccaccatttttgctttcaaatgttagttgttcactatgtcaagcaagtgttaattaatggtttgacttttgtgaagagtcaatcgacaatttgatcatagttgtaacttgtgtggacggggttgcttaccaaattaaaatattgaatcaatcaaatgaggtatatttcacaaataattctgaaaagtgaaaacccattatcaaaagagtcttttgttttttgacctatgtaattatgaaatcattagaacttttgcccttttcgattacttttattttaatatagtataatgtttacttattctatttcataacatcaaaatccctaagtaatgtgtctttttaattattaatgaccaaaataatatttatttgaatactagtaaagtgtgtatatatacgtacgcagcataataaggagtagggacgagaaaagcgtcgccgggatcagcaagacagaacatgatcgtctcatttgctccggtggctcctccgctcatcaccaccctctccgcctcaaacctcacccgcccgcctctcgctctctccataaacgtcgcaatcgcctgtttattttccgtccccaaacaaaacattatttgaaagcaaattatagttctagaaatatacaaatctcaaattcctaagattataatatactcaattcataatcttacataaatgtaaggtgtataattactaccaaacaagagtacgtgaatgagcataaaaatacttgatactgtaacatatataagtatataataatttaatagatactgtataataataataaaaccttataagaaatgagataaatacctgtctaaattgtttgagaccgtgataatcttgaaaaacagcaatgtcggagaaagagtcaattccctccgccgtacaaatagatgcatgtggattttcctttatccattctttgatcaaatctgaacaaagctgaaagcaaatcacaataaaataaactaaattaaaaaacttattagaagaagaaaaagtataacgaactcattaggatgtaactaataagaagacgaacttgattttcggcgagacccatttgaataactccttgtggattatgagttggatgaaaaggattattgtcgtaagctttccagccatggaagtacggcgaagcttctccatgtttgtcactcaaagctaatttggatagaagttgattctcacatgcaccctgagacatttatccgttccagtaatttgaacaatgtgtgtgatttttgtgaatttgatggattagtttacttgtgagttgtgatatgtaaatgaatgggagcattcgaggattatttatagtgggatattgagagcgagcatatgaaagaaacttgtttccgttatgaggaaacttaactgaaattttctgttttctataaaactagtagtattaattttgcgtgaagtcaaacctacggccaaagcccaaaatgtttttagtctttttttttcttcatctatgccaattataacattttttttttacaagggaactgttatatggccaaaaaaaagtcttattaatatttatgagtatctataatcaacaaatgaacaaacatttaatttctgtaactgaaaattatagttttgatataaaaataaataagaattaatgatgataaacaactgtagattcttttagacacacctgtaccatgcagatggtacatttgaaaatttaagaactttatatactatgaaaaacattgtaagacaaagtatactttgtgttaaaaatacagccgcgacttggtatcacggtaataactaagtactaattacattaaaaagactttgtgtttcattaattttagttaaacaattagatcaagcaagaggttttacagacaaaaacaaattaaaagtcgagagtgttttaaagattcaacggagtaacaaattaacaagttcaagtcttacgaactctattattagacccacgttgatataagattcggggggagattgttgattctgaaaatcacacaataaatttgtttaaagggggtaaacaaatttacttaactctctctcgctatttagtgaccaaagattcaatgaaaaaaagaacaaggttgcttagagacaaagttagggttttgcccaagaacaatgaagaaaactagggtttttagtattaaatttcggatcccccaaatagaggacaaacccctctatttacacactattaagacggttaaaagatttgttaaacttctatttcttcgaggattgaatcttctaatttcctttatctccaaagacttcctattttcaaaggagaaaacttctttttcttcgaattaggaagtcggctagacggtctccctacttggggctaaagtcggcaaatgacctccttattttggcccattaacaagctaaaccgggataccccggtttgattgaaatctcagtctaattcgtagttcctctggtttaagccggtattgtcggaggtgctaattccggcaccaacaattagtcccccccagttcgggaaaatccaaatgctaaactcgattttttccgaattaaaagaagtgaatattcggcttatacgttaggaagatgcgaattaaaatttgatcccttgaacctccaagatacgtcagtttagcttggcacgcgtcgacgatataaaacaaggctaagcttgtgagttaggtagtctgatggacctcatgagttgttgaggagctgtgggatgctctcctagatgatctgaatgcctagcagagaaatgacctgactgatgagccgagcagtgagataggttaccaaatgatcttgctaacaagctgcaaggcaagctatcagatgatctgacgagcgatctaggatataggttgctagatggtttgtcttgcgatctgcgagatagccgggcagatgagctaaaaaaaacataagttgcgatgagctgcaaacatgccattatcatttggttagcaagatacgtgagcttttgagctctttttttctttaaggtgcgaggaactctcggcttatcctgttttgaagacttaaagcaagacgaggtcttggtttttgtgaaacattttcacataatagcaagcgtcgagctcggctcaatttataagtgtgactgcgagcgttgagctcggattaactgcaagaattatttttatcttttgaatgtagctcgatgctaggtgaactaagctttttgagtcgggactcaatttagagcttgacttcaaaaatcaaaaaatgtaaagcacgaatacttatcttgatgggagaagaaatggcgagaggctgagctcagaattgctgttccaaaggtagagttgcattgttcgtctatgaagagtcgttcttatcaactagtgattaccttgcagcagagacagaaagataagagtctgaaagataagagtggtcgacataagtcaaccgacctaaagccttcctagctcccagttcgtctgtagctttcctagcccgcagttcgtctagctagcagctcgaagaaccattcaattcaagacacgtgtctgtccaagtctcggggacctcaaatacacgaggcccataagtaaatgggcttacttaagttactgcattgagaattgtagaaagctggattttttattttaacaaaatttagcaaataaccatacataaataaatagcgattgtgtaattatataaaatgcataatcaagaaattattaaaaacattatagtaatggttactgtatctaaaagaacattatcccaagctaaagacatcgaaaggtgaagctttctcggtcggcgaagcaacagagtagccttgcataaacttcctcagcttaactaactcatcagaacctgagagacgctccattagaatctccattgtgatctgatttggttcacaagatgttcgaccatctcatccatcagtttaagtaatgtctctccttgggttttctcgttaagacacttaaacaaggcattgtaagtttcaacattaggtctcaccatcttcatcttcatttcctctttcagagagagcgcttgcccgaaattccccagcttagaaaatgcgtttatgagaatgttgtatattacagtgttcggattgacctttgagtgcaaacccatgtccttaaagagcttcaatgcttcgtctaattcgccgactgagcaataagcgtcaatcaccgctccatatgtcgtgacagtcgggtctaacccgtcttctctcatctgctccatcattctctcaacactctcgaagtccttgtgtttaccgaaaaacgaaatcagagtgttgtaagtgatggaatcaggtttcttcccttctttttccatatcggttagcatctcatagactttctctgcattattcttatcacaaaacaacccaataagcatgttgtaagccaataagtcaagagaaaaccctccttctttcagtttctccaccactctaatggcgtcatgatcccgtctaacttggcacaatccagagatcaaagcataatagatctttgcatcaggagaacaaccagcttccaacattttttcataccaatacatagccttctctacattactgacgctgcaacaagcatgaatcaatgtcatataagtaaccacattccctttcacgccttccttttccatatccataaagaaaacaaccgccatgttcaatccatggtgcctgcacatcccaccaacgattgtattaacagttaccacattaggtttaatctcgtcctctttcatccgagaaacgacttctttagccgtctcaagctttccagctctgcaatacccatcaatcaagcaattgtaagtaactgcattgggcacacatctctcttccagtttcatccttaccaataactcctctgcttctttcaacctccccaccttgcagagcccgtcaatgagagtattaaaatgaatcgaatcagctttaatcacatttccatcatcagttctctttccacgcatttgttcaaaaacttcgagagcttcatctacccttcttgatttgcataaagtgttaataagaatccctaaagtcacaacatcaggccggattttcacctcatccatcttcaagactaaatcattcattctactaatgtccatattccttcctaagcaagacaaaagcgcattgaagggaggagcttcaagtggggttttgttcttcatcaggtcgctcaaaatatcccaagcagtattggcgcgagcatttttgcatagacttgatataaaccgagtcaaccaaacagagtttggggagacaccatgagagctaaatcttgaaatcaaagcaattatcttttcttctgtcaaaagcctttccttccaaacctcgtgtaacacaatatccgctgtgattctattaggaggaaaaacagattctttctgaagcatttcgtcgagcaccttgaaggcatcatccacaagtccatttcttagcaagacgtctaccacaacattacgaacctgcgagtttttcatattcgaatcgagtctttcgtatacaagaaccgactgattcaccatacccatacgcccaaaccatcggatcagaagcttagtggcaacgatagtaagaggaatgttcttctctttggcgatctcgtagagacggagaagtttatcacgcgggtccggttcactaccggcgaattcaatgaccgactgaagcgccaaggagagagattcttcacggcgtttcagagactgagacttcgcatccaggtactcgaagaacgagattgctagagaatacgatcctagccgccgcgtgatttgcgagaatactaaaggagaagcagaagaagaagatacgacaagcgcacttagcgactcgctcgacgcccaatcatgttgcggggtattttgaagagttttcacaaatttgactactacaaattcctggctctccgatttgatttccggccgtgggtcaacatcataagaaaaacgccggaggaatcgagaatggttgagcagaatataagagttctggcgccgggaaattgatagcatgatactcattgtctaaggttttgaaaaagacggccaccgggaaaagtgagacgacgaactctgttggcgaattcaacgtacaagaagttgggcccattttaaataatgggcttacacattagcccaaataaacctttacaatattacacaatggggacaaaaatttattttttctcataaaactgaacgtgagctttttatcatgctgattacattatatttataacaaaatgaggatgaatctttatttttctcatataattatcctttacattaaaactccaagagggctttgttgatcacttctcctactttacctttggaacagcaattctgagctcagcctctcgccatttcttctcccatcaagattaagtattcgtgctttacattttttgattgttgaagtcaagctctaaattgagtcccgactcaaaaagcttagttcacctagcatcgagctacattcaaaagataaaaataattcttgcagttaatccgagctcaacgctcgcagtcacacttataaattgagccgagctcaacgcttgctattatgtgaaaatgtttcacaaaaaccgagacctcgtcttgctttaagtcttcaaaacaggataagccgagagttcctcgcaccttaaaaaaaaaaaaaaaagagctcaaaagctcacgtatcttgctaacccaaatgataatggcatgtctgcagctcatcgcaaatgtttttttcagctcatctgcccggctatctcgcagatcgcaagacaaaccatttagcttgccttgcagcttgttagcaagatcatttggtaacctatctcactgctcggctcatcagtcaggtcatttctctgctaggcattcagatcatccaggagagcatcccacaactcaacaactcatgaggtccatcagactacctaactcacaagcttagccttgttttatatcatcgacgcgtgccaagctaaactgacatatcttggagattcaacggatcaaattttaattcgcatcttcctaaagtataagccgaatattcacttcttttaattcggaaaaactccctctttaaattatacataggcctactgggcataagccgagagacgtctcgcgcccagtacacgccgaatacttttatttataaagccgagctcagtctcgcacttaacatctaacccgaacttagacagaaaaaatcggctgtgacgtcaggtgaaaaccagtccgcccgaaagccgagctcaaagcttgcagatggcttataatttagtcgatttaaaacctaatttcaagtttgggaatccgatattgttaatacgtaatcaaccgacgaaggttcacaaaaaaaaaaaaaaaaaaaacatgaacttgttcttaaggacaaaaacaatttattcaaatataagtctgaaagataagagtggtcgacataagtcaaccgacctaaagccttcctagctccccgttcgtctgtagctttcctagcccgcagttcgtctagctagcagctcgtctgcacttcacctagctaacagctcgtctgcagcctttctagctcccagttcgtctgtagctttcctagctagcagctcgtctgcacttcgcctagctatcagctcgtctgcagctttcctagctccctgttcgtctgtagctttcctagctcgcagttcgtctggttagcacctagtctgtacttttcctagctcacagttcgtctgcagtttctctggctagtagttcgcccagctaacagctcgccgacagccttcctagcttgctattgcccgcctaacagctcgtcaacagcttggagttcttcaacaagtcgcctagcagctttcctagctcaacttgtcaacagctaacattttgagctttttctacaagacaagtcaacaatgtggagagctccaaagaagtttacaaagactccaaaattccagatctcaacttgagcagcatcgcatgtctccctccttcgttaaaagttctgaagcagcacaaagtaacctttgctttcgtcatcatgaattctgatcgccaatggagcaacaaaacaactcggaaaattacgatattttctggaataatcagcaacagtcacacgaagccacagaaaaaagcggatcacgatttgaggttatggtttgagagttatgatcgtttttccaagacaattcagactgacaccacttgcaaacgaccaacttcgtgagcaattttccgacattgtacgacgaaccaagagacgggaaacatatccacagattgcccagacagacagctctccatatagtccaatattgttccaatcgaagctatgtgccgaaagttacatgcgcttctctccagcagatacagcaagacgaaacactgatcaaaagttacaaaaccagtcgactttgaaatcaatttccaggaagattccgacgaactgcgtggcgtgtaacctatccacggaatgccccgaaaagtagctttcaaaagaagccaatctcgcctcaatcagaaatttacactgaaggttatgactctttctttgcaacagatgcaaccagcgaaacgcagatgctcactgcacgatcaaccaaattagaaagcaaatttctagcaatccaaaagaattttcatggcgatctgcatatcaattcgaagccccgaggctcagctttctagaaagaccaacctacaccttaacgtcgaattcgacaaagagttatcacagtatttctctctgctgcaaggtaatcactagttgataagaacgactcttcatagacgaacaatgtaactctacctttggaacagcaattctgagctcagcctctcgccatttcttctcccatcaagattaagtattcgtgctttacattttttgatttttgaagtcaagctctaaattgagtcccgactcaaaaagcttagttcacctagcatcgagctacattcaaaagataaaaataattcttgcagttaatccgagctcaacgctcgcagtcacacttataaattgagccgagctcgacgcttgctattatgtgaaaatgttttacaaaaaccaagacctcgtcttgctttaagtcttcaaaacaggataagccgagagttcctcgcaccttaaagaataaaagagctcaaaagctcacgtatcttgctaaccaaatgataatggcatgtttgcagctcatcgcaacttatgttttttttagctcatcggcccggctatctcgcagatcgcaagacaaaccatctagcaacctatatcctagatcgctcgtcagatcatctgatagcttgccttgcagcttgttagcaagatcatttggtaacctatctcactgctcggctcatcagtcaggtcatttctctgctaggcattcagatcatctaggagagcatcccacagctcctcaacaactcatgaggtccatcagactacctaactcacaagcttagccttgttttatatcgtcgacgcgtgccaagctaaactgacgtatcttggaggttcaacggatcaaattttaattcgcatcttcctaaagtataagccgaatattcacttcttttaattcggaaaaactcgagtttagcatttggattttcccgaactgggggggactaattgttgccggaattagcacctccgacaataccggcttaaaccagaggaactacgaattagactgagatttcagtcaaaccggggtatcccggtttagcctgttaatgggccaaaataaggagctcatttgccgactttagcccgaagtagggagaccgtctagccgacttcctaattcgaagaaaaagaagttttctcctttgaaaatagcaagtctttggagataaaggaaattagaagattcaagcctcgaagaaatagaagtttaacaaatcttttaaccgtcttaatagtgtataaatagaggggtttgtcctctatttcaaggatccgaaatttaatactaaaaaccctagttttcttcattgttcttgggcaaaaccctaactttgtctccaagcaactttgttcttcttttcattgaatctttggtcactaaatagcgagagagagttaagtaaatttgtttaccccttttaaacaaatttattgtgtgattttcagaatcaacaaggataaaaataaaataaagagtctagttatgtggcttgatgaatagaaagctttctgagattagaaatcttcatcttgttcaaggtcttgatagcatcatcgactctccctaccttaacataaccattgatcattgctctgaatgttgaaacatcaggtcctgccaacaagtcatcaccgtcaacgtcggcaaacatgtcggcaaagagtttctctgcctccaacatgtttccttgttggcagagactcgcgatcatcctggtataacacgttcttctcactcgctcaaacgggatagtcttttcgccgaaaaaaccctccttggacattattatgccaaccgtctcggaatcacagatttctatcatatctaagaacaattcccaggcctctgttttcctaccgtgctccacaaggcatttcaaaactccgtttccggaaatggtgttgagcaattcagcatgttcgagagttgcgaaaatctccatagcctcctcgtctttgccttgcttgaaccagtagtccataaacgaaacgttgaagattgcaatcgccttgtgatagtttcgccatggaagtttactattcggtcctttcaattcctcgaagatttggctagcccttacgaatttgcctttatccagaaaccctcgaatcagaatgtcgtatacggcgaaatcacagcggctcatggatctcactacatcacaagcttcatctaatcttttagcaccgaccaaggctttcgtcagtatcctgtacgtctcgatccctggagctaaactcccgtcgagcaaaatgtggcggtagagctcaagagcgtggtcgacgctgccttggtcgcagtgtgctttgatgatgagattgcaggagagcatgtttgggagagtctgagactcgttgaaaaagtaatcgaacagagagatggcttcgtcgtacccaacgaatgattgcttggttggtcccttaataagtctgtcgtattatatcgcctccagatcaatcttctgaaacatcagcagtaacagagatgaaatattagtacctttgccagggaatacttaagaatgaacgactctccaatgtccaataataaacaagacccctagaagcatacactttgtgtttgatctactgtatataagccatcatcttgctgcagattgagaatcaaatacaccactctgttcggcttgtgtttggatttcggacgcacacaatctgtaatatcttatttgcatggaaaattcaggggtatatattagggcctgtttatgagagagttaagcataatgttagtttataattgagtttggtaatatgttatttgattattaagtttctatgttatagcaaaaggtggttgtaagagtcgtaactttagtttgggcagtttatcttagtttcaacagtcacaatgtttagtttggtcggttatgtacctaagacctgtacataagtgtgtgtatctagtcgagtaaaacaacaagtttcatttttaataaaacaaagttttgttcttgtcttctttacaagaaaagagacaaatgtctctgagacaaatgtctcttactctgtttttgcttttctctcaatattccaacacataacggatgtacccatttttatagaggtaagcattgtgtctttcactcttacactaaacttccactttttggctctgcagcctgtatgcctttcccattcacttggtgactgcttccttgacccacatgaaccacacttgcacttaaccacacttgcactcaattctgaaaacaatagtcccaagataaaagtgttgttctaatctctggaacaacaagagaatgataacagaggcctaggatagaacgcagaattgtcgttttcagataaaaaaaaaaatatatgccattacagactacagtaatcgcatcaggcagctcagtcctgtcgtcttttctgtagacctgtcccaaagaggttgtgaagaggatattttgcaaattaaagaattaacaatagaacagtgcaaataataaaagcaggagaacacattttttccagaagactaaagtgagagaacataagatgttaacaacatacttgaacactgaattctgttcttctaatattgttggcgcaagctcatgttggattttacaatcagggcaatagtaattgttgtgctgataaccaaattagaacagtcattcgacaatagtctttcatacttacaaaatcaaaacataagatgcacggcgatgtataactgcaccttaaagcgctcattcgtaatgttgtcgcattcagcatgaacccgtcccatacgttacacccatcacaacatacctactacatcaaatcaagccagctacatggatgcaatagtttattactcaggtcagtaattcaccaaacatggtcaaagagattctcacccaatctctatcatctggagggtgccatattctcttgcagatgccacaatactgattggatttccgcaactgttacaaaaatttggattcaattccttttgatcaaagaaaactgaagagtgaggaaattttgataagaacctttgaacagtatttgcataaaagctcttccggctgtgagtctttagtcctttttagagattttaatggcattactgagccacaagcgtcgcgtgtccttatgtcctcatgacatgaaccctacacagtaagtaaataagcaaatcgtttagggggtgtattcccaataactgtacgtccatgcctatgcagtatgtataaatgccttcatgacgtagaacagaaagtatatcaccagacgcagatgctacaggatgcttacagaactgattatgaattatacaggatgcttatagaactgttcagaattgatttacttttgtcttcccaaatcaattagaagagcaaacttgaacatctaacccaaaaaaaaaaaaaaaaaaggaatatgcgtcaaggaaacgtgcctgaaatctagaagcaggtccatagtcctggtcggattccgtcgcagaggaatctggggagctgatttcagcatctacacaattaccgtcgaccccattttctgctaaaactgcttcctctagtgccttcttaaattcacttggcttgaaattgaacaagtttctctgatcctgaaatctgaagagatgaaaggctactaaggaaccagaaacaaagagacatgtgtgaaaaaattggattcaatttaaaacaaatgacacaaaaacgaaaacacaatggttaaaattgactttttattttccgtgacttggttggggtgtttttccaaataaagaagacataatttatgaaattactaataaggattgtaacggcttcgtcctctaccattgtcgctactttgtttgctactgctcgaaccgctgcctcccctatacggtggagaaggcctcggtggtggttgtggcatcgctgctagtccaggctgttgcctattacatttcaacacatcagatcagtaaacgtgtcttacagcaaacacatgagatcagtatatggagtatagataagaacttacaagacgtatcggatccttccatcaggtaacatgattggcatcatcgacattccaccagctgcgtgacctcccgcatgcattaatggctacataattcccacaaaattatactcaattttttttaacgtttttctcaagagataatgatttgattgataagtagtagaaatctcacttgtgaataggcagaagctccaaatccaccaagagcaccaagggactaagagccatgccataactaagaagaggaggatagtttggttgcaattgtgatttcggaatggaacataccatcaatctcatatctttcagtgtttttcaaagctcgcattacgcttgtcctctctgcgtagtgcacaaatccgtatctactgtcttcctttcctggttttgctggtgggatcaccactttcagtattttcccgtgatgttcaaataatgcctttagacgttcttgtgttatatctctaggtaaattcttgatgtacaatgccttgacctgcaatcattccacacagcttttcattgtttagaaagaagaatatttgcagaacacgtctctatgataataatttcttggtagtgacattttgttggtaaggttactgttgctgctactataatttatttgtaagatagattctaaagaagtaaacctgagaggcagaagagtctccttctcctccactccttgattcagcccagcttacagttggggcattatcatcaagcttgaaactcggatttgacatttttgttttgagtattcagcacatacatggttgtaatactcgatgaaagcaaatccacgattccggcccatattttgtggttcctgtgattttaacaaaaccaaatagaaaaactgatcaagaaatgtattaatttctacagaaaattcacttctgtaagttacaattatacgtgaagttgagatgaaagttacagaactaactagatatacactataggctgaaacttatccaagttgcaggagacaaacctttaggagttcgacaatttgaacgactggaccaattctatttgctgctttcttaatgtctgactccatccaatttctagggacattaccaagaaagagacgatgctttgcttaggtagtcgaacattttatccttttaccctattgaataacaataagtaaacaaacaaataagagccagaaatattcggaaacaccaatccatcaaaattctaggtaactattaagaatcaggtcaaagaacttactctgaatacagtgttatttagattatcaattgcttcagcagctaagtccttacatctgaatgttacaaatggataaccctttccatcaccaggttccttttccctcattatctaacctgttgacatcacacaacctgagccacaagcgtcgcatgtccttatgtcctcatgacatgaaccctacacagtaattaaataagcaaatcgtttagggtgtgtattcccaataactgtaaaagagtcagatacagactgtacgtccacgcctatgtagtatgtataaatgccttcatgacttagaacagaaaatatatcaccagacgtagatgctacaggatgcttacagaactgattatgaattatacaggatgcttatagaactgtcaatttatttactttttgtcttcccaaaccaattagaagagcaaacttgaacatctaaccaaaaaaaaaacgaaaaggaatatgtgtcaactgtcaagaaaacgtgcctgaaatctagaagcaggtccatagtcctggtcggattaaggcgcagaggaatctgggcagctgatttcagcatctctacaattattctcgaccccattttctgctaaaactgcttcctcaagtgcattcttaaatttggcttgtaattgtacaagtttgtctaatcctgaaatctgaagttatgaaaggctaaggaacagacacaaacagacaaatatgaaagaatccagtaaatatgagcgtctcatgtacttacttgcccataaattccgtaaatggatacatcaatccttgtctgacccatgcatggtcctgtaaatgaccataagtttcagaaaaagatcgtatagaaatatgatgccttggtcccttaataagcctgtgggatataacctccagatcaatcttccgaaacatcagcagtaacagatatgaagtagtagctgatccggaaacatcatcagcagtaagtcagtaacagatcaatctttccggtcatacgaaaccaatggattttccaaaccctccttctgcaaaacttccatcgtacctgatcttccaaaaccttctgcagcctagaactcactaattccaaatcatcaagacctgatcttctactcaagacctcgtcttcatcaacctctactttcgccacatttccaacagaatccagatagacagtgaaaatgggatttgaacaaataccacaatactctgcttcagaagattggatgattccgtgtgtaggaactagtggtaccaaattactcaccttttctttgtcggatgctgcgatttcatgctccggaaaaccagaatctaccatagccccatacactttaaacagcactgataacatctgagataaaacaatattcaagttactagtttacataacaaaccaatttttacccacaaagaagagttatattatccacaagaaacatctcttaccaataagctcttttcggttaaaaacaaacagtcagcatctcttgcataagtgcctgctcgaactgagctttttagtaataaaatgtccaaccaccatagataatcgtcttccttatcttctccatactcgcggtattagctgacaacagcttgcggaccaaacaactccatctctctcttgagtttgttgagtttcttttccatgaacttcttgttcctctctggcagcttttccattatatcagctgcgtctttgatttcgtcttctgtaatccatcggtctaagtcttttcccatgtctctcataacagctttcacttctggatcagtctctgcattgtacaactcaaggaacccacgtgaccacttcttcgtgtgctgccagtactcctttcctgattttttaccaggtctaacagatccatcacttccttctacaacaatctttggctggcttgaggtaatttctgatgaaggggtgagagtgttctcagaggaagcagactctgataattcctgatgagagctctgttcttcatatttcacaggagatacagatgcagcttttccagaaaacagtgcttcacgctgttcatgatagttattgagaaactcggggttcttatcaagcgaaggccctttccatctcggtatgatcttttctagtggatcatacacactgacgccatctgaataataagaggaagggagatagttgagatatattttgacaagctgattaatgcatcatttgtgtacgtaagatattgagcaaacttagtctcaatcaaagttgtagagaagattacctactctgtagtccaggttttcaacgtttgaatgaattcactgatgcagatgagacagtttctcattttctttctcaactttcttctccaagctttgcaaaaatatagctttatcttcagcatcaatcaggtgagatggatccctaccagccagctcattatctcgaacacagaagacaatgtctcttagcttttcgtccttcatccactcaagctcatcattatattcactgcggtaaagttctgcaatatcagcaatcgtaccaggctcctgagtttctctctctctcttgcagccatataattatccctaaatcctgctctcagtttttcaacaacaggctcaaattcatggtagttttctctatccaattctcctttcctgatggttcttccttctctatatgttcagtaccaccagaagagcttttggctgatttgagctcttctcttttatttgaactcgatcccttaactgcattcccagtttctgagagtttttggtagtcattcttttggggttgagaatcaacatccttccccaacggttcagaagaagtagactcaagtgcagatttcaaggttcaattgacagctgcaccaaggattttatttttgtcaaccaatttgtgttttctagctacaccacgctcttcgtcgctctgttttgggaagatttcatcactgtcttgggccatctgagaaagttcctgagtaagctctttctcaccacttcttcttgaaaggaactctttagcctcttttacagaccgtatgacccgtgactttcgaccagtgctattcttcatcatacttaactgatccttagtgacatcagaagcttggatgactccgtctgtaggaactagtggtaccacattactcaccttttttttgtcagatgctgccatttcatgattcggaaaaccagaatctaccatagccccattcaacatcggaacagcaaaagcagaaagttcagtgttctcactgtcagtcgaagttcccaagcgttcatctttatcatcatcacctacactgtgtgtcaaaccgtcatgtggaagactcttctgtgactgaatgcttatatcttcatcactgtcgcctgtttctttgttcacatcgcgcttctccttttcattaagttctatgccagcttctatctcccgtgctcgcctagccattactttgatttcatggatcttatcatcaaagtccagctcaacatgagaagaattcacgagttccagtttcttctctgaacccttaactttagatatgctactcataagttcattccgatcaaacttaggcttctcaaatgacatcaatggcttttccaagccctccttgtgcaaaacttccacggtacctttctccgacatatccctttcctcccaagctttcatctttctcctcatcatctccttctccaactctgtacactcaacctcattactcttcctatacacaagcaccgtcttcagcaaccagagtccaatgtaaccaaacaaaagagctcttccaatcgccggcaactttggaattaagtcaagacgaagaattgcgttttggattgagctaacgaaacgaaactcttcctctgaagaagaagaagaagaagaagaaacgaacttgagaagagaagtatccttatgggtcacatattccccattctccatttgttcagctaatttcttcgcatatacaagcttagaactcactgattccaaatcatcaagacctgatcttcttctactcaagacctcgtcttcatcaacctctactttcgccacgtttccaacagaatccagatagacagtgaaaatgggattcgagcaaataccacaataccctgttcttcatatttcacaggaggtacagatgcagcttttccagaaaacaatgcttcacgctgttcatgatagttgagatatattttgacaagctgagaaaacactgatgacaagttcccaagcgttcatttttatcaaatacttcactgtgtcgcgatgtgcaaaacttccactgtaactgatcttacaaatccttgtgctgcctagaacttactaattccaaatccccaagacctgatcttcttcttctactcaagatctcgtcttcattaacctctactttctccacgtgtccaacagaatccagtgaaaatgggattcgaaccaataccttaaaactctgcttccttgttataccgagcaacccaatcttcgagctcattcagcaaattcgaatcgtcagcaaccctatctttcaatccctcggaatcatcactgtgatcgaaattatggctttcgtttagaggtttcgtaccttgcacaaaacattttggagtcaccgaagatctttttggagatgggcaagttgaatcgatgttggtacctcttgttagtgaatcgaattgggacgagaaagctgaatctgatttccactttaagtagtctcttggccttcgtctccgccattttggtgactctgattggtcagatcgaagaaaaagaatcggtcagatcggagggagacagagcgagcctgagactgtacggatccgatcaaatggaagagaaaattaatggagaaaaaaacagaataaaacgagtctatcgagagacaaggaaggaacagaggttcgagagacagatgcaacagaataggggacagacaggcgttgataaccaagacctcaaaagcaacatgtatttttgacttcaaagaaaatcatgaataccatttttaccatattactcatatatacttcaaagtctttttgccactttattttttttcctaaaagtattctcttttgttttaaaagttcacacatggcacatcccatttgttttttttgttttgtcaatttgaaataataatttcatttcatctgaactacaacttcagtaagactctttatttttaaaaagtaactattttttatttctttcttttatgtgtttttttagatttcttgtttcagttttccccaaacatttaaaaaaaaaaaaaaaaaaaattgtttcctagtatctgtctaagtcgtataatactattccatttatataattaagttacatgtaaaactttatgtgaagtactaactatagggacttgtggggggtaaaaaatgaagaggtggtggtgaaagtatacacttttaaaatacttggttgcagattatatagtgaatcaactaacgctttaggaatgattgttatccaatgtcaccaccttttctaatgctcggagactctcagataaaatattctgccaataaaaatggtcaaacccaaaaaaaaaaaaaaaaaaaaaaggctcagagaggatattaatcccaacagtgcaatgatgagattcctttttctcctattatctctttctttttgtttaacatttataaatatcttagtagtatttacaaacttacaaccacacaaaaaaacaaattgttttatggttaattcggttgaacaaataataaaaacgaaaattaaaattcgagttatgctgatgtgtcgattgaatgggctccagtctctagggattgggaacgaagggaggagactgcgaattttgtggcgtacaagagcgccaagtcgaaaccttccttttgctcaaatcccacgtggcgatcaattaaataactttctcttttctacttctttttgtcacaaataatgatgattttcaattcatgtagtcattgttttcaagtcataaacttttaggatgctaatagttgtgttcctagagttctaatttgaaaggtcaaaaagattttccatttaagatgaaaatttataaacaattattcattttttcaactccattttacattacttgaaaacaaagaagataaatttctcaaaacttccatccagatcagatgaataatttatttttcatttccatttatttttactaatttttttaatcctattcacttatagtaacaaccatttgcactcctagatactacagtattcattaaaacggagttttggcaattattgtatctataaaattatatgttagttatatttcacacagttatggtgcaaacagccaaacacacttgggaagtatgtttctcatcgaacattttggcattactattcgtaaatgtgtttttacttttcaggaacaacaaccttcaaaactcactcacatgacaacaaattgagtcattgacaaaaaaaagaattaaaaataaaataaaaaatatcaccatgtttctctaaagtataaaccaagaccgatttgaaaccccaaatcggcaaatatatattaatattttttcgttagatgcagtttaaaaaaaacgaaatatacacatgctctttttgccagggacagaagggaaagataaaggttacatattgtactatttcatttttgcttataattaaatttgatttttttgggtttgtctggtgggacatctctgtgcgtgtacgatcctgctagactttgggaacttggtgtgtgtttctctgttgcagtaaagatcatacaatataatcttttgcatatctcattgcagctttgcttatttttttttattttttttttttgttggtttatttatgatacataaatagtttgttctgaattgtttttttttttttttcactgaaaggattataatgattttccagaactgataggttccctttacaaaagattagttagagttaccatgagatgttatttataaccataacatcacaccaaaaaatgacgacaaagattggagaagaggacaaggctagctagaaagagaggttctctcaacctcaaagagaccatgtaaccaatgaggatgccctgctgcgacataagactgagtcctgttgtccctcaccacactctgagcaattagagaagctcccttgtttgcagctaccttttcctccataactttccaatcaccaatcttacccaaaaaatgattaagctctgaaacttgatacgcaaaagacggccaagctttaggccttttgaaagctgaagacaaatctccaggttcaaaagcaaaaagaaccttagtgatcttgtgactgtgtaaactttcaacagcccaattgacacacctcgacaacacatcttttttggtgcattgatcactaaacgcctttctgctatgaagaagcacttcccccagatcgtttcgtaaaacccaggcgcctccacctagcctttttttccccgaccacgcagctcctatgttacacttaacccaacccgagtccggcggttcccatccaatagctgaaggagttgataagcgaacctcctcattaacaatgttctgagtttgagtgtttgctaaaaaccattcagcggtatcatctcttatcttctccatagaaatgagtggacaaaagatggaaccttcgaagaacaacttgtttctgtttttccaaagcctccaaagaatccagggccaagaccttcttatgtgaagaggaatacaatctcttccctgcagttcaaagagataatggatattggcaaagattgatccatcctgaaaacctagctccggcgaaggtactctagaaagagcccatacctgcctggcaatggaacaagtaaacaaaacgtgatttatagactctccttcactgccacaagattgacatcgagaatcaatggacatccctctacgaatgatctgatctgccacaggaagagccgcacaaagaattctccataaaaacattttgatctttggagctgtttttgtagaccaaacacgttcttttagagcatttgttgagggttgaaggcaagcttctgagattaactctggtttatttgattgaaaggccaaccaataaccagagttaactgaatactcccctgtttttgtgtgcagccaaacccagaaatcctcttccatcacgacaggttgcctctttgtaatgatctccacatcagctggatagaacaaatcatcaagagtgttcctattccagcatcttccttctaaatcaatgagatcagagactttaagacttaagttgacagagaagtgtctctgaagagggagtctcggtccgttatcatgaatccaaggatccatccaaacattgagagaattaccactaccaacttcagttcttaagcctttgattagcagctctctcccatgacaaatactcctccatgcgaaagagggacgaatccctatatcagcctctaggaaatcatcttcttcaaaatatctacttttgaaaaaccttgcaaagagacaaccaagatgctgcagaagtctccaagcttgctttgccaaaagagcttgattgaaactctcaatgtccctgaatccaagacctccctgctctttagtgaggcacattttttcccagctcacctagtgagttttccttttactctcaagtgcattccaccagaaacttgacatagcactagtcagattgtcgcaggttgtctttggcaacttaaaacaagacattgcataaaccggcatggctaacgccactgctttgagaaggatctcctttcctcccatagacagagttctagcaaaccaaccagttagtcttgtcttcagtttgtccttaatgtaatccaacatctgaacttttgatccactaaaacactctggcagacctaaataggagccaacacctccttcattaacaatgcctagctcatcttgagtccattttttaatgttagcttcaacacaagaaccaaaggtaatggaggatttgtcaaaattgattcgttgacccgtggcatccccatacactttgaaaatgttcttgagcactaagatctcctctttatcagctttacacatgaacaagctgtcatcagcgaatagcaaatgatgaatggctggcccgtcaggggagaacctaataccacttattagaccttgattttcagctctattcatgagatgagttagaccctcggagcaaagaatgaataagaaaggtgacagcgggtcaccttgtcttaaacctctagagggtgtgatatgtccatgagctttatcattaagtagaaccgtgaaggacattgaggtgatcgtgaacataatccactgcacccatttctgatgaaaaccaagagcttccagcaaggctcttacatagttccattccactctatcgaaagccttggacatgtctgattttattgctatgaactccttcgacaccttcttatgagttctgagactgtgaaccacttcatgtgcaattaaaatgttatccgagatcaacctttcagagacgaaggcagattgattagatgataccaattccgggagaaacggttgcaatcttctaaccaaaatcttagatacaatcttgtaaagcacagagcacaaactgattggtcttaaatcagacattttatccggtttcttcttctttggaagcaagcatagttgagtaaaattccagtctctaggaaagttaccagtcctgaagaattgttggatttcagctgttacttgatcccctaagatgctccaatatttctgaaagaaaaagcctgtgaaaccgtctgctccaggagcactagaaccctttatggcaaaaacagcttcctttatctcagttacagaaactgaagcaatgagcacattattcattccatcagtaactttctttgggaagtcagagaacagctcctggaagttgctatgatctgatgaagtgaaaagctccttgaaataagcctctgctattgctcccttagacacttcatctttatgcattatgccattaacgtccaaaagctggtctatgtgctgtttccctctattatccttgactgaggcatgaaaaaaggacgagtttttatcaccactgtgcatccatttcgccctgcttttttgactccagaaggtttcttcttcatgatttgccttacagagatcctcctttaacgagttaaccactaagagccttggaaagaccgaagattgttccgtctctaaggctgctctggcttgaaggatctttgtctgcgagttgaaattgttctcctgtttccacttacttaaaacttttctgcacttcttcaattttgtcaagactgtaggaccctcattaccactccaagcattgaaaatcgtctcttccactcttggcttattgaacattctcttctcaaacctaaaactgcctctgttcatctcttttgttgaagaaagtctaaccaagaccggtcgatgatctgatcctcttttatctagaaattcttgattagaaaccggaaaatgtctataccagttcttgttgccaaaacatctatccaatctactctggatatagagatcacctcttcttccaccccaagtaaagggatttcccgtactaggcagttctaacatgtcacaaacttccagcatttccttgaaaggtaagaaagaagagtcaccctttcttggaccaccaatcttttcaccattatgcaatatggcgttgaaatctcccaacatacaccaaggctcctttcgctgaataccaatccttttgattttctcccaaacattaggacgagaactaaaagccgggtctccatacacacaagagacaaagaaatcaaaagaaccaaattgaatttgaaaatcaatgaggttcttgtccgcatactttatttgaatatctacaccttgtttccacagcaaagctaacccaccactaaggccaatcggatttactgtgaagattctatcataacccaaccattcttgcaggtcaacgacaacattactacagttcttagtttccatcaaaaacaacacttcagggaaatgagatctcctcatctccatgagtctaggaattgtcaattcatgagaccgtcccagtccttgacaattccaactgagtagactcattaaacgttggacggtccctcaattgggaccaccatttcagggttaagctttgtgaatttggcagtgctttgacccttgtcaattgcttttctcttatccttagtacccaccacagaaccttcaactagacttggaaattgaacaccactagaaggaacccttggttttggcttaggaggtatgttcctctgcttggcctttttcagagtagtcccagtgatagctccagtctcaaagaaaccagggctatataccgtcgaactatctggaaaaggttgagagagtgcaaggaaattacccgcttcagtgatagacagcgaaggctcagcttccacaagccagtctctagcagttgacggagatgcggtgatacttgatgaaacaaccatcttgtttttgtccccactactcgaaggaatctcatgatcatacccaaaaacaattcctttctctttagacaaatcatgatggaccactggaagagcttcgagacgaagaaccgatttttgcgtgaaaggatctttttcgcttcccttactgattgaatgactctatccactcttattaatttctcctcttcattcgccactctaagatattggcgcataccttctaaaacctcttgagctattcgtggtctgccagtattgggatcaatacccacttggctttctttgagaactccaaagagaggatcagattcactaagaactggagtcggaggaggctttggaataacctgacctttacgacgagcagcagcttgatcttgtcttgccttaaccaagattggacacacgtctttctcgtgggtaagcctctgacattcgtaacatcttttttggatcctctcgtaatgaaatttcacagtagcagtctctccattcctcagattaacgaccttggactttctcaaaggccttgatacatcaaagagaacttttacccgtacaaactcttgaatctgagattggtctgggttaaacacaacctctctaacctctccgataagctctcctaaggaagtgattgctttttccgtgtagtagttcaccgggatattccaaatttgaacccaaatgaacataaaccttagataatcatccggaggtttttcataccacctatccaccacaatagcccattcactgaacgtttggacacctttttctagcacttcttccagatcgtgtttcgaatcaaagatgaattggaaacgctcgctagttagagccacacctttgactcttccttccttctcccattttctgggcatattcctaatcagatgcttcataggttgacaagcaggattgaggactcttccaattaagcttaacttatttctttcacatgacatgtactccgacagatccggcatgtcaaagggctcatctttttcctccagtgacatttccatcagcgctctatccatagccgacgacatcacttgaaccgaagggaactgagaacaacttatttttcgaactcgagagcaactagaaccggcaaaaaatatagcacaaacttgactgagaaatcgaaaactagggagggtagcagtgaaaagcggctgagggaaagagggttatccggttctaagctctattcaaacctaatgaaagacacttagggagaaagcgggttctaagcccaaaagagggattcttttgacgaattgaccaggtggttctccatagtaattctgaattgttttagaaaaagagtttgatacaggggctatatatttgtgtgtatgtaagtaaaatttccaatcattgcatttataaatattgattacaaacacatgatattaattactagtagtaaatgattactccttgtgtaagtactagtcttgaaggtaagaagagtattattaattatggtcttgtatcaacgattcaatttctctagtcatttttgtaggtttgttatcgcagctttatcgtaataacatataatgtaagagaacacgcttattttgtggtgctctcgtatgagtgatcgatctcacatgttggttaaagattttttttttaaaaataatagcaagaaagaaagcattggagtgggttccacgagaaaccattcccaaataggaaaaacatttggaagtgggtcccataaaaaatatgcaaatctcagacccgtctctcaatgaaacatttggaacgggcggctgacttccgtactcttcttatttcgttttgcatacgctacgataattacgtttctacccttttctttttgagctatggtcgagttttttttttttccctttctaataaattaatacagctataacattcaaatagttaaggatttatactatatacacagacgctaaatgtttacttaattttatttagtatttggtggcgaaagtaaacatttataatactcgcgcggttgcatattgtgaatcaacatgtattattgaagctaataacgatttcattaagacactcgtgctatatgatactaaaaaaaaattcaaatagatacaagacgttacttttttttttttttttttttatacaagacgttacttagcttgttcaaaaaatagtactcacatgacagagattctgatgcccccatactctttcacttttcttagttttatttttttggtcaaatatataatttcatttggctaaaaaatttagaaattggagatacaaatatttgtcattacacaagtaacatgtcttgtcactaactaaacaagaaatgattaaaatgtatatttatgaaaaagctaaaccacatatgtgggttgatactttccatgggttgattagttttgacaccgaaacataattaaaaaaacgagtcagttaaaaatataaagtcggattacttggggtttgaaaagaattctgaaacgctaatcaaactacacatatgtgaacttaaaaaaaatttgggttgggattttttgtttttgactttaatcaaccgttgtatttttataatttgatctgtgtgttgtataaaatgtcttcgataaagaggtatttatatccaatatccacttgtatctctacgatttctctaggttagagaaaataatatttattgtaagtttcatatttaataaaataatatttctacgatttcatataaaccccaaaaaataaacaattaaatttcatgtactactatgtaagcttttttagctctctctctctcctccgtgcaccatttcccgatcatcaccgccgtgcaccattttccgatcattaccattgctctctctgtctctctgtctctctccctctctctctctgtctctcgtgtttttatataaaagtacttcagaaaaaaacaaaaaaagaaaagctggttcgtcgttctcacacactacacattcggaaaaccatttatataagctctctctctctctctgtggacggaagctctcgctctgatctcacaatgtaagctctctctctctctgtgttgtgtgtttgtatttctctccgacgctagatttctccatggttcttatgagctgagcaccgccgaagctttcctctgcattccgtcgtccctctcttttgtctctttctccgaccctagctctctctcttctcttccgtttatcaccatcgccgttagcccgttaccattctctctctctcttctccgttctccgttaacttattcacgatctactaaggtttttaatttttgtttgttattattataggatgcggatttctgtgatgaagcccgttcgccaccaacaggttcttcttcctggactcttgaagcgtgcggtacgtaatcataaatctttcaatcaaaaagtttagggtgttattagctttgggtaaagtttagggtgtaaattcaaggtattggagagaatcgaaaaaatctctgtttgtagcagaatacaactataaaaggatgatgcttaaaaaaaaaaaaaaaaaaaaaaaagtatgatgcttctatcctctaaactctaaagtttgtgtgtgttagagcaaattaacaaacattgattatttatttgacagctcaactgcatagctgcaaatcaagattgtgaagttgatccaaaaggtactttctgctgataatctaatataccttgtagtaatttgaattgattgattcttgttgtttaaatgtttgattcgttggtaatttctgctatcaggagacatgactaaaattgatctcaaggaccaaggcaccaatgctgttgagactggtcgcagcagcaaagtagtatctacagtcccacttcatcgcagtatcttctctcctaatggtaagaaaagccattttacttcctacatttccatcaagaaaataaccaaacatgctttaggaatccttaggtcttgtacacagggtgtgatattcaatcaagttttaagtttatgtgttctacctaccatctttcccatttgtcttcctgtatccatactctaaccaatttttttttacttaaaatgtttgtaattgtgaatttgacacttgtcgatcttcctgggctgacaaaggtagctgttggtaagtgactttgcaatgctaaatttcatttttttttttgttttaggaaacaaagcaatgatgagttcaaaagccgaagctcgggatcaaatgccattagttatacaggtattacaatttcattaatacatcaatatatgcatcgtatattctataattgaattattcttattcatattgaaagagagattacatcagtatatacatgagtcgttccagggtattaggttcaaagttaattacaattagatcccttaactttttacatacttatatttctatatattctaaaacgattgaatgattattattatcattaaaagagagattacatatatacatgagtcgtctagggtattaggacaattagatcccttaacttattacatacttatacttctatacaccccctcaagatggaggaaactgtgtgactccaatcttgacacaagcatgatgaaattgtgttcttgggagaggtttagtgagtgtatccgccaattgatcattagtgaaaacatgagaaacacgaagaatgccgtcttgaatatgattgcgaacgaagtgataatcaagagctatatgcttcgtacgagagtagaagactggatttgcgcagagataagtggcgccaatattgtcgcaataaataaccggggcagctggtaaccggaccttcatctcgtatagaagtgagcaaagccagcgaaactcagatgcagtgttcgccactgctcgatattcaaattcagttgaggagcaggagacacctcgttgtttcttagatgaccaagatataggatttctaccgagatatatcaagtagccattagttgagacataatctttcgtgtcgccagcccaatctgcatcagagaatgcaagaagtgttattggagaagacttgtttagttggataccatgtgtggatgtgccggcaagatagcggagaactcgtttagctgcatgccaatgtgcgtctgttgggtgttggacgaattgagaaatcctgttaaccgcataggcaatgtctggtcttgtgaaggagaggtaatggaggctgcccacaacagaacgatattgcgatgcatcacggagtctttctccggtggtgagtgtgagttttggactggttgtaacgaggttgacactggcttcacatcgagcatgttgttctttgtgagaagatcaattatatatttcctttgcatgagatgaagaccacgagatgagcgtgtaacttcgatgccaagaaaatagtgaagatctgttgggtctttaatagaaaagcgatctgcaaaagaagctaaaacttgttccaccatcatgttatcatttcctgtaacgagaatatcatcagcatacacaaggacatatgtaattgtgtttcccgaactgaggatgaaaagtgacgtatcaaccattgagtttgtgaagcccgagtggaggaggaattgcttgagtgccatgtaccaagctcggggagcttgtttgaggccgtatataggcttcttcaagcaacatacataggatggtctattgttgtctacaaagtcgggaggttgggacatgtacccttcctcggtgagttcgccttgaagaaacgcgttattgacatcaagttgttttattggccaatctttggatgtagcaacgtcaagaactaggcggatcgtggttgatttgatgacgggactgaaggtttcggcataatctttcccgtattgttgatgaaaacccttagcaacaagtcgcgacttgtagcgttctagaagtccattagaaaagtatttggttgtgaataaccatttgcagccaactatattttgtgttgcggcaggaggtacgagatcccacgtgtggttacccataagtacatcaaattctatcgaacatgcccgactccaatctttatctttcaacgcttgtttgatcgtagtaggttcggtaggtcatttttgatttgcagtgataagaagactgagtttctatatgggtttggtgatattgtttttggccctggttctcattttgtgggtattttctggtggctggattatttggttctgtcgtttattgtacaaggcttggtgtggtggttgggtttgttgtggctgaggctaagttgtaggattcaactcatattaacgtggagcagtgggctcaattggagacgatggtgattgggtcgaggtttgtgacccattttgagaatgagcagtgggctcggagaaacaaaaggatgaagaagggatagagtttgatacctgagagtttgacgatcgtggtgaagaggggtgaagatccaagcttggggtcccagtggcggcgttgaggaaggagccgttgcattcgtcgagtccgtggaatggaaggcgacaacaacgaggtagttggtgcacgatgttgagcattgggaagatgagttgagtggtgttgctgggtttgggccgaatttagtgtcaatgttgggcctagttgaatttggccaacattagtgttggagatatcatcgacttccacacgtgaactagaagtgcgatcatgaggagcagtagagttggtggtcggaagtgatacaacagttatcggcgacgatgaaatcttcgctggtcggagatgaaaaatgttggagagtgatgaaggttggacactttcattttcgcaatgatgagactcgggctgcttaaaggggaagatttcttcattgaattgaacgtggcgggagaaatacactctgtttgtcggtagatggagacataaatatgcactttgggaagtgtagtagccaagaaacacacaccgttgtgaccggtcgtcaagtttgttttgtgtgtaaggtctcagccaaggaaaacacaaacaaccaaagacacggagcttctcatagtttggtggcgactcgaatagcttgtgaaacggtgattgcatagatagaaccgccgtgggcattctattgttcaaatacacaactgtcgaaaaagcatatgtccagtactgtttcggtaccgatgcggtggacatgagtgtgaggccggtctctacgatatgacggtgtttgcgctcccctagcccgttgtgttcagggatgtgtggtggtgtggtgagatgagtgatcccatgagtggcgaggaattgccgtaatgccacaaatttacccccattgttagagaacaacgtgccaatgcgacattgaaatttattctcaacaagggctttaaacgctgtgaatatatcgttgacatcgaatttgcggacaagtgggtacaaccaggtgtagcgagtgtagtggtctactaacaaaagataatatttgtggttatcaatagagtgaatgggtgaagtccaaacatcagtaaagacatattcaagagggtgatgagagacaattgaagtttgtggcttttattaacaaggcaatcagaacaagaatattgtttttgtttttgtggagaagatgaaataggaagcaaaaatttggaaataatagattgcgaaatagaagaagaaggatgccccaatcttgaatgccaattgataagactagcttttggaccaaaagaagacaccatcgctactggttgagaagatgtaacaagctactcatacaactcattcctagttctgccttggagtaatgggacccccgtgctgagatccttcacctgaaaggaagaagggaaaaaattccacggagactttattagtgttacacaaacgaaacacataaataagatttttctgtatatcaacacataatattttatcaagaagtaaggagcgagtttgattaggaagaaaattggaacccgtgtgagagatgttcattccggaaccatgagcaataagaacgtcatcaccgccattgtatggttgatgcaccgaaaggttgttgaggtcggatgtcaaatgatgagtggctccgaaatcgaagagccaattgttggtagtgtacggtgagcctacaacgaggttagctcgtggctgccaagggcggaacggagtggaagccattaaggacgtggatgtttgcagcgattggatttggggacatagtcgagcactatgaccttgtgtgttgcagtattggcaattttggtattggttcggagtccatggtgtgttgttgttgttcttcttgttggtattgttgtagtggttgttgtgttaattaccggagttgttgtgttgagcaacgttggcagagacaagagcaaaaacagatggagcggcctgagttttagcaaggagcttggcttcgtagttcagcagcctttcttaaacttcattgatttgtggtgttttgtctttggctgcaatttgatcgatgataagcttgtactcctcagggagaccttcaaggatgtgctcgatttgatcatcatgttcaaggtcactgtcacggaaagccaattgatcgagacggattgtcatcccttcgatgtactcgtcaatggacttggtgcccttggtgtacagcttgagttggtctttcaagacacgaatatggattctggatggattggcgtaggtggaggcgagtttggtccagatcggagcagcagtggtggtgcgaccaacaatcggctggactgaagaggagatcgacccgatgagtgcattgtggatgagtcggtcttggcgacgccatttcgtgaattctgggttgggagaggttgttgtcccaaaagtgatggtttcaaacggaacttctttggattcatccaaatgatcgacaagttcatacccatcaaggagagcatgaacttggagcttccacatgaggtagttttgtgttgtagctttgagatgttcgacatgttgatgttgggaacaacatttgagttgacagcgctggtgttgtctcaagacatggtgacggcgtgagagaaaaaagagaggaaaaaatttaggtcttaggagcttattgctctgataccatataaggattgaatgattcttattatcactaaaagagagattacatcaatatatacatgagtcgtctagggtattaggatcaaagttaattacaattagatcccttaacttattacatacttatacttctatatattctcaatctgaacttgttactgaataatgtttttttcttacaaaatttcttacagaaaattcagggaattgtttctacttgggagagcgacatcagatatagaattactcaagctcggtatttacaagacttggtggatcttgctactccctcagtctgtctacgagatatattccgagctgctagcatcaaatcaagtttcgagctccctctccttgagcagagattggagaagttgatgtggtgcaatgtggatcttaccctcttagtctggtttggtgagcaacgatctttggtattcttattgttggccaatgactatgcacatgacatgcgttatcatccaaagagtagacaactccacggtttagcaatgaagatggatctgctacaagatgaaagcagcctctgcaaagtcatgatgctctatttattagagggacgatcgctgcagtcaatagagtgtatattcagatcttccaaaacgaaaggaagactgatatataacaccatgatctcggtttatgggaacattttgctgaggatgcacacgggctgtttttggagatggtcaacaacggaattcgtcccaacggtcacaccttcaggtatctcctagaagcatggaccgtagcgtgcaaaccacagagggctctccaagtctttcattccatgaagctgcacggagttgagggtgaatcgtttcactacggggcgattgttgactcttttgcaaggatgaggactccagaatacatccacatggcgatatgctttctaaagcaacatcccattgcacatggccaatatgccttcaatgcaattttgagccgatgtgtccctgagatgaaaccttctgaagaagacatagaattgaaagagatcatcaaggagaacatttcacttgctcaggagatggtaatctactttcatgagaaaggcttcagatatgaagttcttgagaagactcattggaggttaaagaagagtggcttgaactggcctagaaccgtgaggtactgattggtgtagaaggcaggagggatgcagaggcttgagtaattggccgtttctaagttcaacgcttttataattttgtcttagtcttcctctttgaatagaactcttaactatttcctttactatgggttaaacgttacagtttgctttccttttttcattacctaattccttactttgtgtaaatgagttccaagtttaacgctttcataattcaggtttgataaagccatccaggcacgggttctacatgtcaacttttggatttcaaaaatgacttaaattgacttaaattggataaatgagttccataacttttggatttcaaaaaatgacttgcataggataaagccatccaggcacgggttctacatgtcaacggataaagccatccaggcataagtattataaccgagcagaaagaggagaaaaacaaaaaaaaacgcctcgggtccctagtcgagatcttcggatgggcggttatccttggcagggaggagcgatccggcttgatctgtaattcccgcctcgtcggctaatgactcgaccgacctatgaccacccggactcagaggagcgggctcgggagctggagctttgaggtcatctttcaattcggccatgaagcgattaagatttacctcagcatcggcgaaatcttttaaccactcatcaacctgctccttctctctctccagaactccgccaccttcgaggacctcgatcagctgcgcgttggctcgcgcctgggacaagtacatgaatcggtcattgacctcatcaaggagcgatactttgtgctcggcggtcttcattttggcaatgaaggtctcggaaacctcccgcctcgtcgtctgaacggcccgagccacctcgctgtcacgaagccccctctcctcggataacatccgcttaagacggacgatctcagaattcgccttgagattctgctcggccatcttaatggcattctctttattcacgtaggccatcctctcgacctcttccctttccagcttcgctgcagcagcttcggagagtgcctcgttcttctctcgctcgatggcctgaatccgagactccgcctcggctaatttaccagccacctccatgttgctccgcatagccgaatcatacgaatgtaccatccggttcatcgaagcgacagcctggaaaagagaaaagttagatttacaataacaccaaaataagttataagcaacaaagctcatacccgcagaaagtgagatgccgtctcggcatacttccgagattccagaagagtatctggaggaagaagcaaggggccaacacatcccccgagcagattggccgaggcagtacgatcttcaaaaatattttctccgcctcggcatattttctccgcctcggcatattttctccgcctccgcctcgtaactccgaatcaaaatcccgagcagatgtctcaaagaccgcatcgtgatctgggaaagagcgatctgatatgatgtcacatattccaggaccaatctcgggatcggcagccataagaaacagccgtagaagaatccctcgtacaaagtatagaaacctgcaggaggactgtcggctcgctcttcagggctcggaacacgcaaggttacagcgccaagaccaaatcgagccctaagatccgagagagatcgctcggtacacaatgacgaaccgggaggatctggcattaccgcctttttcttctttttcctcttctcagccttttcgaaagccttctgctcgttaagacgcaagatatcctctgtctcattcgggccgaagtaaagaaagtcctcgatcttaaccgtcggcatgaggggctcgggcacatcttgccaattggatgtcccagcttcgtcgaccggagcaaaggacctccgaacgagaggcggctcgggatcgtcgggtaaatccaattcccgagcgatgtcggcattggtgtcttcccgagccgtgaagggagtcgtctgctcgggggaattcgatgaagaaacagtatcttcagaagacgtccaaactgatctccgtttatagatcggagaaagatcgtctggatggtttgaatcgctagaatcgataaaagaagcgctcgggatcgacggtgattgcgaagaactcattctcggctcgggacgttagacgagaagggaaacaaccggaaaaccagaatttcaatcccggcaaaatcaaaaataacaagaagaacgacgggacttcaccggaaaaaaaaaaacgatagaaatatcaagatcagagagaaggaagcaaaccttgattattatcttcgaaaacttcaaatgaagtattattggagtggctcgctacatatatataatttttcaaaggcgcgtcggatccgcattaaacattcaaaacgcgttcaagcgcgtgggctcggcagaagaaaaagatccgcgtgatcctcgggaacaagcgaaaaacgtttctactccacaagaatagtcggcgacacgagacagaagtttgaccgtccgagaagatgaagcgacagaactagaaggcgaacagtcggctcgggaaatccattcatgaagctcatcatctttctgctaaatcactgagctggggggcaaactgttggggtcggatttcacccaggatagcgagccgaccacacctccgcctcgggaaccatcgatgaaatatcccgaaccggaccacaaaacacctcggaggtctcttcaagaatccataccgaggcgatgtcaagaacgcctcggagcccccgacccgacctcgaaacgcctcgggcataagacttggcaaatcgtccgaggcgggctccaagacacctcgggagcttgtcttcgaataccgcggaccgagcatcccgatcatgacccgaggccagcttaatcacgactcgaaaagatttcgggttagacgagggaaaacttcaaaagacttagccgatgtaagttcaaaacacttcacctccaaaaaccccggaagagataatcttcaaagatatcaccggatatagaaatcccagaatcttcgaaagataaagacaatgactttgaaggcgaaaacacctatttctcatattctaacacacttgtacgataaaattattgctttctcattaatacaatcaagaacaccgtccgcggtaatagagaattctgttgttctttgagaatctcacaaagatccgttctttgaagaaacccttaaaataaattctattgtgcgagtttcgactctcacagtacccacagcaagaatttgttgctctgaagccactgatgcacaaacagcatcaccacccaacttcttctcagctctaatactctcagtgtactttaaacctttcttattcacagagcatactactagctgcccatccgaatttaacacaaacaataacttggaacgagtgcaaagtgcacagcttgcaaattctctccttctcgcaacgacttgtcatctctcatatactttcccaacctcactcgttgctaattgcgggaaaatcaaacaaaaagctataagttaaccaactctagactccaattactaggaaatgcagagagatgatgataaagcacctgagaagaaccccaaagctccaggtgagacggagaaacgaccagcaatagctggccggagagcttaaggtacacgactcgctgcaaagacggacacgatccaggtagaagcgggatcacctgcggccacccgtaagccatatacatctttggctacctcgaattgaaatggctatctctctctacaatggatctgattacagattctgctcatacacagagatcataggaacatttgttggaagaagaagaagaagaagaagaaggagaagaagaagaagatggatctcgcagtcgcagatcaataaacggagcatcaaaattggaattgcccgaccggtttatgttgatcggattttaattttgcgaatataatcggtttgggtgatacgaatctaattttatgaataaaccgggaatcaattattgattatccttggccttctcaaccccaatgcatttcaattttacgaatctaatcggttttggggatacgttgatgtaagcccaaatccaacagaaacagtttcagcccatcaaacaataatgactagaaattgcccagattaattttcagctcatgcatgtgtgtgattacataattgaaaactctagttttcttctctttttgtaggttgattttttatttgtttaataaatttaagaatttagtaaagtaaacgtatagaactagtaaattcaccgacaaaaaaagaactagtaaatttttattatagtttctatagatattgtttttataagggtatagattaaagtctgttccgcacaaactattgactatctcaaattcttagttaattattttgatataagtccaaaaaaataatcaattatgaataaatcgggaatcaattatgattatctttggttaaacgagaattctctctcaattttttctcggtttactcaaaccattttatagaccattaataatagggattacaaaatactagtataccttcgtctaaatttttaataattaataacacaactaaacttttgttctttttgtaatcggaagttcgatgtttgataagtttatactaatttatgataatcatatatatgaaagttggccaactctctccctatgagtgacacatcatcacacaagaaaatgacatgtgtcattctatattaattaaataaaaaattaatacaattaattgagaaagaatcaaaagtcttttgttgtgttaaaattctctataatctctttttcaaataaattttcttaaaacattcaataaataaaaaattataataatatatcaagtactactttcattatattctacttattttttaaaatatttttatcaatagttatcaatttataatggctaaaatttactttgtgttgtagttaaatgtttgctacctaacctcatattaattagtaattttagttagatattttcttattattacgttatatgaatatgatttatcatatgaccttctttctgtttatttttgtgcgttctgataacttggtaacattgatatacattttttacgtaatggtcatccgagacattagacatacccacacaaaaacacgagattctatatggctatatgcaagggaagagaattagggggtgttattggttcctaatttacaaggaattttgatgacttcaattaaatccttgaaagtttaaagaaacgaaagattttaaaggattgttagagagttttttataatcttgttgattagtttttcataatcttgtaaagtttctcaaacaatctctcaattttgataataatttccatgacttttcatgacttcattttgtgaagaaaaatgtaggaagtcatgaaccaataacacaataatttaaatcattaacaatcattaacaatcaaagattcttttgttttaattgaataacacaaaacttctaatgactttataaaagtattaatctaataacccaaaatttataaagattttagattactttttacaaatcttaaatgaataacacaaaactttaacatacttttgaaaaatcttgattgaataacaacagattttacatgacaatttaaatcactaaaaactcttttgaaatcataaacgaataatacccccttaaagtgttgacttgaattactagcatatcatgatgtggttagtgtactagataacgagagaatatatggaataaaaaattgtttgttacaattaaattagacaagtttcaaaatacataagtaatataactacatattaatatatcatataattttgttgtatgtgtttatgatagtgaaatatttgaataataggtttataaatattcatattatagtaaaattgatatttcgaattatagataaatttaattataaaaaattataactctataaaatagagatgactttattacttacacattaacacacacacaaaaatgaatatcaaaatcaacaaaagaccataatcatatattccgacaattttaaaaacaaaaacccatacgtagcatgagttttcatttagaataacaaattaactaataataacaaatatgtaggtaattttataaatattgtatatataaatatcataagtttatatattatctatatgtggtgtaatcatatatatgaaaattggcaaactctcttcatatgaatgacacatcatcacttagcttttaatttgccacatgtccacttaataattaatgtaagttaatggtttatagtgatttattatttaattatatatattattaaattttaaataattaattgtataaataataattttcttttattttgtatgtctttttcttatattaaattatttaattgattttctcatactcttaaatatttttccctaatttttataattttaagttaaaatatgattaaataattgtatagtggattagctaatagttttcgtaggttattcttttttctatataatatattaaaaatggtgagaagtacttgagaactctagcatcaaattcttggactcaaatcctctagcattttgtcttatttatttggtttaaggttaacacaaatgaaatttttttatgaaaataatgtttactgagaaaatattttgttagaaatctaaatgcaaaatgcaaaaacaaattgttgatttatggagcttagtatcaaataggaattttgtcttctagcctattaaaaaactaacctaaattttacatttagatacttttaaattatgaaatataaagtgaaagcccgcacgtagtgcgggtactcatctagtgattattaatttacgatattactagactatatagttacattagattttcaaacaaattattattttatcaaattatgttaaatattacattgatataactcattgatataactcattgatatcaaattatgttaaatttatatagttacattagaccaaaaaaataattaatttatagtgattactaatttatcgagtgttaattgatagaggttctttctccgtacaaaatatttacaaattaaacttcaatttacacatgtgttcacttttttccaccttatctatttggatgttgtataattgctaaattatgttcataattaacgtataactactatcttagatttaactttagtgaatatgcattagacaataacaaattttcagttgattttcaatatttaaatttgtcatgttatattgagagagatagagaaaggaagaaaggtgagaaagggagatttagaaaaaggtaaacaagagagagagaaaggtgaggaagagatatcagaaaagaggtaaacgagagaaaaagagaaaggtaagagagagatagaagaagaacataagcttagatatcaacaataacgaaaaacaattaagatggactcttttaagctctgaatgacaatgtaaaagcatcttatgatcattgagttaggaaaaaagagtgttatgtgaaaccttaatttgcattcgaccacaatttatttaaaatacataatacttttaagttcaaaacgatatttgtacaaacatgatcacacacaaacgcattcacctccccataaccctttttcgttgtctcacttgggtgtgaaagcctgtaaaaaaacacaaaagctagtcatttaaacgagtggatgttatgaatatttaaaaagatatgttttgattcggatcacacttacagcgaagatggtggcgtgaccaggatcagcaagatgtgcaaaaaggttatcaataggaccagtgccagtgtagatgtgttggaaccaagcacccatcactgccaacatcgccaaccttccgttcttgatctccttggtcctcaactccttgatcttagttgggctaccggatccccaacccaacgggtcgaaccataacccacctgggtaaccaatgtctgtgcccgtcagtttgttgtttgggaagactgggtcagtgttgacgctaccgggcttgatgatatcggcttatgcccagtagacctatgtataatttaaagagggagtttttccgaattaaaagaagtgaatattcggcttatactttaggaagatgcgaattaaaatttgatccgttgaacctccaagatatgtcagtttagcttggcacgcgtcgatgatataaaacaaggctaagcttgtgagttaggtagtctgatggactgataaagaatgacctttatctgagctaagaacaagtaaactaaaacaagcaatagagaaatgcgcctatttagacggagagttagatgagaagagaagattttagactcaaggtcgttgatagttcattgataacaaaaccctaaaagggaaggttccttaaatagcatctactgagactcaatacaaaacgcagcatttcgataacccaaaagtaaaacgacacagttggcgagctggcgagctgtctttctgtgccttagccacttttaaatagaagcttcctcaggaacttctcacgagctctgcctttccttccatttgatctcgccctacttctcacaccagccaacggcacccgtaacctattatggacctcatgagttgttgagttgtgggatgctctcctggatgatctgaatgcctagcagagaaatgacctgactgatgagccgagcagtgagataggttaccaaatgatcttgctaacaagctgcaaggcaagctcagatgatctgacgagcgatctgggatataggttgctaaatggtttgtcttgcgatctgcgagatagccgggcagatgagctgaaaaaaacatttgcgatgagctgcagacatgccattatcatttgggttagcaagatacgtgagcttttgagctctttttttttttttatcatttgggttagcaagatacgtgagcttttgagctcttttttttttttttttaaggtgcgaggaactctcggcttatcctgttttgaagacttaaagcaagacgaggtctcggtttttgtgaaacattttcacataatagcaagcgttgagctcggctcaatttataagtgtgactgcgagcgttgagctcggattaactgcaagaattatttttatcttttgaatgtagctcgatgctaggtgaactaagctttttgagtcgggactcaatttagagcttgacttcaacaatcaaaaaatgtaaagcacgaatacttaatcttgatgggagaagaaatggcgagaggctgagctcagaattgctgttccaaaggtaaagtaggagaagtgatcaacaaagccctcttggagttttaatgtaaaggataattatatgagaaaaataaagattcatcctcattttgttataaatataatgtaatcagcatgataaaaagctcacgttcagttttatgagaaaaaataaatttttgtccccattgtgtaatattgtaaaggtttatttgggctaatgtgtaagcccattatttaaaatgggcccaacttcttgtacgttgaattcgccaacagagttcgtcgtctcacttttcccggtggccgtctttttcaaaaccttagacaatgagtatcatgctatcaatttcccggcgccagaactcttatattctgctcaaccattctcgattcctccggcgtttttcttatgatgttgacccacggccggaaatcaaatcggagagccaggaatttgtagtagtcaaatttgtgaaaactcttcaaaataccccgcaacatgattgggcgtcgagcgagtcgctaagtgcgcttgtcgtatcttcttcttctgcttctcctttagtattctcgcaaatcacgcggcggctaggatcgtattctctagcaatctcgttcttcgagtacctggatgcgaagtctcagtctctgaaacgccgtgaagaatctctctccttggcgcttcagtcggtcattgaattcgccggtagtgaaccggacccgcgtgataaacttctccgtctctacgagatcgccaaagagaagaacattcctcttactatcgttgccactaagcttctgatccgatggtttgggcgtatgggtatggtgaatcagtcggttcttgtatacgaaagactcgattcgaatatgaaaaactcgcaggttcgtaatgttgtggtagacgtcttgctaagaaatggacttgtggatgatgccttcaaggtgctcgacgaaatgcttcagaaagaatctgtttttcctcctaatagaatcacagcggatattgtgttacacgaggtttggaaggaaaggcttttgacagaagaaaagataattgctttgatttcaagatttagctctcatggtgtctccccaaactctgtttggttgactcggtttatatcaagtctatgcaaaaatgctcgcgccaatactgcttgggatattttgagcgacctgatgaagaacaaaaccccacttgaagctcctcccttcaatgcgcttttgtcttgcttaggaaggaatatggacattagtagaatgaatgatttagtcttgaagatggatgaggtgaaaatccggcctgatgttgtgactttagggattcttattaacactttatgcaaatcaagaagggtagatgaagctctcgaagtttttgaacaaatgcgtggaaagagaactgatgatggaaatgtgattaaagctgattcgattcattttaatactctcattgacgggctctgcaaggtggggaggttgaaagaagcagaggagttattggtaaggatgaaactggaagagagatgtgtgcccaatgcagttacttacaattgcttgattgatgggtattgcagagctggaaagcttgagacggctaaagaagtcgtttctcggatgaaagaggacgagattaaacctaatgtggtaactgttaatacaatcgttggtgggatgtgcaggcaccatggattgaacatggcggttgttttctttatggatatggaaaaggaaggcgtgaaagggaatgtggttacttatatgacattgattcatgcttgttgcagcgtcagtaatgtagagaaggctatgtattggtatgaaaaaatgttggaagctggttgttctcctgatgcaaagatctattatgctttgatctctggattgtgccaagttagacgggatcatgacgccattagagtggtggagaaactgaaagaaggagggttttctcttgacttattggcttacaacatgcttattgggttgttttgtgataagaataatgcagagaaagtctatgagatgctaaccgatatggaaaaagaagggaagaaacctgattccatcacttacaacactctgatttcgtttttcggtaaacacaaggacttcgagagtgttgagagaatgatggagcagatgagagaagacgggttagacccgactgtcacgacatatggagcggtgattgacgcttattgctcagtcggcgaattagacgaagcattgaagctctttaaggacatgggtttgcactcaaaggtcaatccgaacactgtaatatacaacattctcataaacgcattttctaagctggggaatttcgggcaagcgctctctctgaaagaggaaatgaagatgaagatggtgagacctaatgttgaaacttacaatgccttgtttaagtgtcttaacgagaaaacccaaggagagacattacttaaactgatggatgagatggtcgaacagtcttgtgaaccaaatcagatcacaatggagattctaatggagcgtctctcaggttctgatgagttagttaagctgaggaagtttatgcaaggctactctgttgcttcgccgaccgagaaagcttcacctttcgatgtctttagcttgggataatgttcttttagatacagtaaccattactataatgtttttaataatttcttgattatgcattttatataattacacaatcgctatttatttatgtatggttatttgctaaattttgttaaaataaaaaatccagctttctacaattctcaatgcagtaacttaagtaagcccatttacttatgggcctcgtgtatttgaggtccccgagacttggacagacacgtgtcttgaattgaatggttcttcgagctgactagtagcgaatcctaaacagagaatttgactcggctttctttttttcagacaactaaagaagcggaagtcaaagctgccatttgttcaacgagttgattagttttgttttaattgttgactaatcattataactcccctaaccctaggggtcacgaccgttagatcttcgcacttaaatttcattagtgtataaatcacgatttattaaatgtacacctttttcgccctattgttccgacttattacgtgcgcacattttattatgttttgaggaacatttgtatattttctacgtaaaactaaaatattcttctcgaatcttatacaatgtggatatggaaattaagaatacagattctctttcacctcttgagcttttgttacagttaaccgtcagaattttcaagcgccatttaggttttgtatcatgcgtcaaataagaattgattttatgttacaatctacaactcacaaccaatttgacaaagaaaaacatcacatgcatttacttaaactgacaactttggaagctgaacctctagctttggttccgatcattggtcatattgttagtcacgatttaatgccaaaagcatcacatgcatttacgaaggaataagaatcaatatttttaaagactaaaacaagataaaaggaagttggtgtaattaatatcacagtcactgtacgtgcgtatacgtattctttttccctacaaatacactctaagaaaacgagtaatcactccacttagatacatacagcgtgtccatctagttttagtcttttcgatctccgaccaattcaatctaaggcaaagattaatgtagagagagttttactatgtcgtaaatctggaaagccgcccgaaaagatctttgatcgccaattcagtgggctgctccacgggtcaatactttttcacatgttaattttgttggattactataaacataatgaatgaccttgaagaactctttggagctaaacccaacgaccaacccattacggcattaccattctctctacatgattttcttcctcttaaactaatttaaaatggagaaagacaaaatttgaaattttattttcacgtgattagaccatgattacgtttcggtcgacacgcaagtaattttaaaacttaaaacatatgatttgaaaaaggtaaaacaccaagtcatggtaaactgataacttccgtttgaaccgtttccggaattagcacctccgacaataccggcttaaaccagaggaactacgaattagactgagatttcaatcaaaccggggtatcccggtttagcttgttaatgggccaaaataaggaggtcatttgccgactttagcccgaagtaaggagaccgtctagccgacttcctaattcgaagaaaaagaagttttctcctttgaaaataggaagtctttggagataaaagaaattagaagattcaatcctcgaagaaatagaagtttaacaaatcttttaaccgtcttaatagtgtataaatagaggggtttgtcctctattcgggggatccgaaatttaatactaaaaaccctagttttcttcattgttcttgggcaaaaccctaactttgtctctaagcaaccttgttcttcttttcattgaatctttggtcactaaatagcgagagagagttaagtaaatttgtttaccccctttaaacaaatttattgtgtgattttcagaatcaacaattggcgcgccaggtagggggacacaaacaactctcttcgcatattactcatccaagttttcggtgaacgctcatcaagccaagacaatccaatccgtttatttgctcggcgatttcccgtcaggttccaatgaaccgggtgacgtgttcccggattgccccggagatcagctttccagggagtctaaccatggttcaatcggatatctattctgagagttatcaccgtatttgtaaagccgatgctgtctgtttcaacacagatccgtctgaatagaccagtcaacctcaggaccgatttccttagggaggaggcgaaacagatctgcagtgacgagagcaggtacaagggctataatggcggagacggagtcagagtgattggccaagaattcaggcagaagaaactaagagtcaaaggctttgaggatctcaaacttggtggaggcgacaaatccgtcgccgaacacagccatggcgtcatgacgttttgacgatgaggacacgtggcagttcttggtggaagagctcgtcgccatcattgcgtagtgggagatgcgaaattgatctgttttgttttattataaaaacattgttttcaaaattatctctccggttgtccgatttcaatcggcatcgtgagaggtcttactttgcttcgcatgggtctttgttcctttttgtgctcttgatttgtttccggagggatgatttgtttctgtttcacgtggcgagtggagaaggatccgccgtgcaggacggccggtcttctcgtggttgtttctagtgcttctatctccactgcttgtagacagcagtgtgccatggtggatgttctattttctggccttagcatctcgcatctcaagcagtggagcgagcctttgtttgtagatctgttgtagatcgccttcttcccggtggtcccgattatgagtttcgagtcccttcactttgcgtgtggttgcttctctccttatcggttccattatttccaagtttatcttggtctttccgctacgtgtccgcgcgtatctaccagagatttgggcttctctgtggcggggtttgttttgaggacaacttcctccttcacgtctgaagcctctgtcctctccgtttgagtcgatcgtgtgttggagtccgaatcgagaggttttcatttgctgtggctgattttttagccttggttggtgtactccatcgactcgttgtagcttatgttgcctcggcctctcttttctagcccttcttcgcttaggtactcagtgattggttactattggtgctttgaatctcgtctagctttcaccgtcgagtctggattttggcgttctacgtctctgttggcatcttctacatgtggacaatagcagaactattaggagcatggtgtcttgtggcgtttaggctctctcgttgttctggatgctctatgtctcctttttgtagcggctttggtgtttgataggttgtggcttagctatcggtggtagctagtcccccacttcttttgaaagctctttagttgtatcatccctttggttatctccaggcatgttctaggttgtggcttcttttgtttgcctttgttttgaagatagttttgctttgcgtttttctcttttttcttgcgtttggatttagctttagaggaactagtagggctgatggcttttggtgtggtggtgattggttttatttagctctgcgctgctgacttcggggaatgaacttggtattgagggagctcgcaccttttgcattttttggtgtgtgaagttccggttttgagatagctcatggtctacatcaaaaattcattttggagttgttaaccgttgacggcttggtctcggacctcctgcggaaggcttctagcgctcttggtccgtcgcatttgggtgttttaacaattggctaaagcccttatgctcttgcaacacattctggaagaatagctttgaatgtcatcgcttcatcttctcatgcagcttcattgcttaggtcgagaagatggatcgaaaatttggttttaattaaccgattttatgtgtcattcttttttgccatggattcatacttttaggtttcaaattatgtttgtaacctaaactgttttcattttgtgaaatatttacaatttagcggaaaaaaaggaaaaaaaaaattcttttatttttttcaggttacacaataacacgacacgtttaatccatccacacaccataattcaaaaatcttcaaaaccctttttttttgttgggtcacaagcaagattccatatcaaaccagaaaagcaaaaagaacagagcatgaatcttctacccataaatatatacaagccacaccaatccgcgattcaaatgttgtaaaagttcagtggtggccttgtacattattatcttcaagaaaatatggttccaaaaacttggcacatgggttaggatcttgatgcataatccttgcagcttgttcgaactcttccctcaacactctctgatactaaacttgacgaccacccgacccagatcatggctcgtctcaaacggattctctatgcatatcaagtgcctatcgttccccacccatctcattcagtccttctctcgctttttgcaacacacacatattcatgtttcatctctgagattgttgcttcacagatgtttccttcagcttccgcctcctccgccgataagaaggtacaattctggtttatagatgattcaattgtaccttgtagacggttttctagggcttgtttgtgaatttcatgtcggcttagtgaggttttagggtttcgtgtttggattctggctacgtaaatatcgtcttataactgactggcttcacaaaaatttgtagttggatagtttgaaacgaaacaggttaaagaacataacatagaaagtatagaaagtatagcccatgtaataacataggaaaaatagtttttaaacaacttgggctgggctaatctaaaatttgttagaacatagaaagtttagttttaaaaaaatttggattgggctaattttaatttagttttcataatagaatgacatgtacaaatactaaagtttgattggtcaacaaaaatgatctatatttaaacgaaatgttctaatgggttgttgattttgtaaaggtgtcaagctgatgttaactgaaaaaggtgatgtgtcagcacaagagagacttttagtgtttttatgatattgattgattacaagcccaatccacatacatcaaaccggacaaaaccatcaacttaaaattgatccacgatcaccatacctaaataaatcggttaagtaagaaactctaatcttcagtcgaaatacccttttgaagccgtagccctagaaactgtgaacttttttccggaacaggacctccggcgaatcaggatgacacaaaccgagcggagatggtgacctaggaaccgtcgctatccgccaccgtagagccgttttgaggaggaagaagaaaagctgatcttacatttttcgagaagaaaccatgcagtcttgagagacaaaggcagtagggagtaaatatggaatctctcaacgggggcttagcttcatcatgccgtaaatgatctcccccgtcaagcgacaaccctctaaaacatcctgcagctatagtctccatatctaaacaccttcctctttcgtcactcgccgtgaaatctcccttttccactctgcgatgcaacaccaatgatagaactcttaccgccagtgtctcgcagaaacttctcccatgatattggttggataacttttccgagaaggttgagcgaatcacgattgaaacaccatgaaccatggggtcctcaccgtcaccaaaatcgacggagaacccccaccgactgcgcaagagattgtgattagaaagagaaaatttgagagaaaaatcatcctgaatgagattcgaaacactcgatttctctctttaatgttctctgaagtggtcaaaaagggaagttaagttcattactaaaaagagtgacacacataagctaaagaccatcaagaaattgcatgcccgataacataccctgacttctacaaatatacttcactctctttgttgttgtgccttcacgcactcacttctgttaattctgatatatatagctctgaaaccatgtaagattcagaattcttcgtatatattataatgagttctaatgtttacatatatagctcttttatatgtttacaaacatggttctagtctatttatacaaagaataatatttactaggttcaaattgattttaaaagtggtaagtatgatatttataaaactgcatttgtaccaaagtgatcaatacttggtctgattctttcttggtaactagttttctttcttaaatcaagatgggattaattaaacacctattagccataaagtaaattcgtgcattatgcaatcacagtaataatcacagtaataaactagagacttcttcaaaccgatgcatcaagtcgagcccaacgagtatatatagaacggtctgttccaattgctttcaaaattccacctttggttaattagttaggttttgttctgttctggtatatcttgtttcttggacagtagaagtaccactctttcttcctcatcgccgcaagctctttttaagcatcgattcaagaagatgcaagaaaatcaaagattttgtttccataactttggagaaaattcaaaatttagaattatgtggcttacttgggaggccccatggatcgtatttgtaaatgtagactcttgatgagttgagagggtagaggtttggtaaaaatcttctattatttgaatgaatataataaaatctaatataattttgatcatatagtaaaacacttactctttaattatatgatcatataattaatcacttctattaaatgaatgaaactctcacagaggaaatcacttcgattaaatgaatgaaactctcatagaggaaatcactttgctcaaccacaaaaccgaaactcataagtaatatctaataaaatttttgatacaaaaccaaaatctaaattgattaaaattaccaaaaatataatttaaaatcaaaattttatatccacaatttttatgaattgatgctaaagtctcttaagtttctatagctaggttccttacaatcaaagtttttgcagccaaagttcatgcaatctaaatttgttcgtcaatagtcaaagtcgttaccaattggcctctaaaacatatttattagtgatacccaatatgtatgtctaattcttttatataattaatgttattgatttaataaaaaagtctagaagaggggataagacctccccctatggtgttggagacatttcctgttttagttgtgttttggtttacttataccttactctttgtttctcttgtgtaaaatagatttgagatataattaagagtagggtgagtcgaatataaacaagaaacagatataggaagatgacaaaaaaaaaaacaggtacacgaacaaacaagaaacagagtcaatttttaataatttttgtataataattttcaacttcaactataaaagatttgaaaatcaattggaatttcaagatttcaaaaagacaataaagaaggagataattaagaaagattagcttttaactaaggtctcaaataatcaatagttattgtttattttcttcttaaaataactcttttaaaaaataaataaataatcaaaactcattttcttatgagtattattttcaacatgtaataaaagtatatgagagattaaatttaaatatatttatataaattattaataataaatgttagttttagttaaatatttaatattccataaaaaaaaaaaattgaaaatgtatctttcctcttcaatgttataatgtccatactactataaatatacattagagtagattagagaaaataccgtttaattcaacaaaaccataatcatcataacatttacacccaaaaaacctatagttggtattggggagaatgtggttgctagagcgacgattgtggttattggagcggcgattgtggctgtggtaaataatgcagttgctgctggtgctgagattatcgttgtggctattgatgacaaccatgttgctggagtagatgttgtggatggaggtatagagaatgctgctaatgtggaacaaaaaaaacaaaattaaaactaaaaaaaaaaaagaataaaaagtatcaaaattacaaataaaaatttaaattaaagagtatcatgcaataaatcctaaggaaatcccctaaaaaatctcaagaagtgaaccgaacaatatctcttccatattcaagcgagtagtaaacctaaacaacatctctaaagttcattataataataactgaataaaaatcatttgttgagactaatatacaaccaaaaccaaaaaatgacatttatttagagtatataagatatctatatgttacttgtttcaatttcacttcaaagtgaaccctttaaaaaaaaaatttgaacaaaaattacacactctcgttgcaattatgtaatatgagtgaaaatttgatatgtgtcatgggacattcagagtgatctatgaacatgtaaatcaaatgaaggttagaaaaattagtttttaaacaaaggtaaaatatcatacattttgatatggattaaattaaacatcagataagagatggttgtagtagttaaattaagagatggttgtagtacttaagggtcggatttacaaagctcttttgttcacatagaaagttataagaatcaaaattaagctaaatttaatatcaagtaaattaaaatatgaaaagcaaatcaaattgattgtaaattcagatggattgaagcgacatgcgtagagaacttctcagaaaaagataaattgtagatctagcaattaattagaaattattcgctaaccgttctcaaacttaaaagtcacaaaactataatcaaccacatctcgtcggtattgactatctatgcttagtagcatgaattccaactctcatatctaaatccctaaaactaaacaagcattaacgataaggtttgatatgttcacaaaagtatctaaacaaactctcgtctatatttagctacttctgcccacctaaaacaattacgataataatcatactctcatgtctaacttattatcataagatgaagttctagttagctactctagaactagcattaagaataatcaaagatgaagaactctaaagacattatcctaacatgttatcaatatactaattcatccaaatccctaaaactaacaagaggactattcaaaaggaatagagtttcagaaaatcttctctctacaaggttgtgaagtctctgaaatacactccaaaaaaatctttgggaattgcgaagtaaaatacaatgaaaaagataggtctaaacaatgaccctcaaatctatttataagatattacttaaatcacgagctttaaagattaaactaaatgaataaaaaacaagataatcatattagaattctttaccgaaagaaagcttgatctttcattagggtagtctgtatttctgtgttggattcttggtggccgccaaagaaagcttgatctttcattaagcttgatcggtattgctaacatgaatcacacactatgtattacaatgctcccacatcactttctaacaggtaggtgaacaaacttggactttaagttggttttcttcctcttgatgatgttattcgagatcatccttcagagttgttttgtccatcacgccatcaccaaggtattgtaacactgttgattattcttcttggtttcaaagcttacgactggagatggattgatgggacgaggtggagatagaacgaacctgtatgtttgagtctcataaacacataagaaacgtaaacaagactaaataatcacaccaataaccaatagatttgaattgacaaggacacaaaagactacacgtatttaaacaaaacacaaaggtttattgcaaaaaaacttgaacgatacttgggttttacaatggggaaaacctgagcttaatcagcattctaaaatcctaaaataagaaactaaataaagaaaacaagccgttggagttttaatgtgaaatcggtcgagataaggaaagtatgtttagtcttgagagcttgagtgcgaagtttctttggatatctagatgcactgaaaaagcatccaaaacgcatgagagatgcaaaggaaagaaccgttggtgtttgaatgtgcttggctccgtaaaaggcaagtcttgggtctgaaggtttcccatgtgttaaggtacagtttggctcttgtggggaggaatcttgtaaactggctgtcttggttttaatgtatagctctcgaaggcacacaagggatgagataggcaactttccatatatgacacaaaactaacgcgtttggaaaatgggtggtgtcttcatgttccggtgggcttttcatatctatggtttttggattcacgagagatgcattaatatactccaagcggttttgggttgatttgatatgctccttcaggggtacatatattgcttgaatggcatgtttggtggatctctggttcagctaatggggtgatgcattcatcataccttcgctcttcaagaagttcctcgaaacttatttacctaaacatagataattcaagttagtttaagtgtataaggatttagaagattacatcaggtttggtcaactggttgagcatccgaaggttcttctttgatctgaatattttcattgacaccttcatcatctttgatagcagcttcgttcaacattggggtggattcttcatggtattgaatcttgtcgaagaagacctctcctctaatggaagcttctcctcggtctaattttagtttctttgtacatgtatccatagccgatcctaggattatatggacgcgaagcattgttcttaaaaaggtcttaattcaaatacaaaaaaattaaaagtaataaccaacataatcctaataactaaaacaagagtaaaacccagaatattgctacaaaatcattacccaagctagcataaagctttatccataatctggataaagcttgcctcttgtgataaaaccacacttcctttcactctctttgattcttcaccataattcctttttattttaatgacccgctttacttttttttggaaaatacagcctcaatctccatctaaactacaatttgttcagttaccaattttgctttctcaaaacctgaatctctaacttttgaaaataagaaacaagctctttcggttgaaagataacaacatctatgttcatatctgcagattgcaaactctttctaacaatggaaaccaataactcaaaatttccaataccacgtattgcacttgttgcaagacatttaacatcgcttagttctcacggatcatcactactctcaacaatataaactaaagcgtccattttgggtgcttgaattcgtattgcgttaacactttcaacatgactctcccatcgagtatgtgataaaggcttgagtgttagacctcccacctcatcttcaaatatttttcaccgcttatttgaagatgaaaagaaacaataagttcgttgaatgattccgaaaaatggtattacctttgaagaagtggttgccatatcacaaagcacaatattaagaccatgagcaccacaagctgtgtaaaaccccctaggattaatctcaagtaacattttctgcaatcctttatgctttcctttcatatacgagccattatcataaccatgatatctaacatcatcaatttttaactcaaaagcaccaaacacatcttggagctcacagaaaagtccatctccaaaagtatcatcaactttcaaaaatgtcaagaagaattc

SEQ ID NO: 1462 - DNA, 80472 bp, Arabidopsis thaliana
gtgtaaaaccccctaggattaatctcaagtaacattttctgcaatcctttatgctttcctttcatatacgagccattatcataaccatgatatctaacatcatcaatttttaactcaaaagcaccaaacacatcttggagctcacagaaaagtccatctccaaaagtatcatcaactttcaaaaatgtcaagaagaattcttctatcgtagttgaagtggctgaaacatctacaaaacgaatgattaaaatcatttgttcgtgataactaatatatggagtgcagtcaaagatgacaaagaagtactttgcatcttgaattttcctcataatcctggcttttatctcagtagctaacaaagctctcaactcatttgaatattgttgttgagataatgacaacaagcttcaccatctttatatcttctaacatgttctatcatcaccggatcaaaatcaccaagcatctcaataaaatttaagaaattcccattactatcttcttcaatctttccattgcttccacaaaacgctagatttttttagcaagagttttaaccacaacaattatcctaagcaaaacttgcatccaatgaattctctctttagtcattttttcttgagcatatttctgaattgtctcatttttctccggcctccgttttaattctaccctttgattcatgcaaatattatgttcatgactagattcatgctctttaagccttttccaaatatttctccaatcgctgaatctcatagatgccaattgacaattgtctctctggttgaacaatttacaaattacaacaaaattaaaaaaaaatgttaaatgcttttgagtaaactaaccaacaccaatctttttttcttccatcacttatttctcttgtataataacaatacgagaaatgtctttaagaccatcttttgaaaaactaaaatccatcaacaatttttttgactgaccttctagaaccataaaatctcatggggtcaactgcaatgacatttataaacaagtacgtagatatttgatcaaaatcatataggttgaccctagtgcccattgtgaaaaccaatcttttgaccccttaaaccatcctataatattatttgggaagtacaaaatacagaataaccttacttttgtaagtaattagataggtatgtcattagaaataaaattgtaaagagaaaatgaattcatctcaataaagataacaagtcaaatactaatttatgcaatttaataaatgtaattttaaaagtgaaaatacattattaatttccaagaaaaaatgaccaatcaaaatctacatataagatttcatatctaacttaccatattaatttttattaattattatacttcacccataatctttttgtgattctatttttgtgaatcaaataaataatcatatcatccgtataataaaaaaaaaaattgtttatgtatatgccaggatttgaattttttcttaaaaatatgaactattcaatacatgaattattttttgtagtagtcaaaaataaattcaagaaaactttcaacgaagtaacaaataaaaatttgaatttttacattcaatttcatacatttcatatactaaaataaagtttatttttttttagttttggaacatttaaaaatagttctacttgatatttttaaaagatgtcataaattcttaatagattttttttttttataaatactctaatttgttttcttaaaagatatataaaaaatatttataataggaggcgattaaatataatgtattatatgatggaatgagttatgagctttataacccttataactattggaatatttatattcaatttcctacaatttcttttttgaaattgagaattttatatactacagtaaactttttatatacttagtttggaacattttaaaatagtttattttaaattttttaaagaatataataaagttttatagataaaaaataaatactctattttgatttttatacatatatatttaaaatatttatatcaggcggtgggttaaatgtactatcatgttaagattatatgatgagatgggtcaaataaggtttgatatctcacaattttgaaaatagcgaatgatgaattgcataagaaataatgtttttaaaaacgatttgacactcctaaatatcttataatttgattttgcatgcaattttaataacgaatgatggattgtgtaagcatttttttaattaggattatgaaatgaaaatatagactctagtcacgagttaaatttgatattattatatacaaaaaaatttataatatattttattaatctctatttcaacaaccgaagaataacaaattgaaaaaagaacttcctaaattaactcaaaataataactaatttctaaattaactcaaaataatctacgtttcagatgccattaatttataatatttagatttttgatttaactcaattatatgaaatctcattttgtggttgtcaacataaacaaactcattttgaaaactatattaactttttaataataatattactttttttttcatatcttaagaaaaatgatctataactaaatattatatttttaagacacattattcattctaattttatatataagggctaaaaaatatatgtttttcacttcttactataatatatcaaaactctattctaaaaacaaattataatatataaaattttgtatcaatagaattcaacctttacagtagtacgggttatgatctactttaatttttaatattgcaaactaatatgctccataaccactaataaatctatactatataaaagttgaggctatttgcttctagaggcttccacgtgagatttaaaacaactaatccgcagttgagacatcaataattaacaaccaatcgcggtattaaataggattaataaattatataggataataaataagatacatatagtttttgtataattatcttatttagtttttccaaacaaaaacatgtacttttaaggacaaagtaatcatttttcctttcttctataattgatgtaaaatttcctgtataattgattgcttaataaattatacaggatttaaaacaaccaatcgcggttggacatgtcattaattaatatttttagccattagttagtttacatttttaaattttaacaaatttttatattaagatatttatgaaaaggaaaaaaagatatgaacataaaaaaaatgtataattcacttattaaaatatagaaatattaatatcattgttagtctcactatattagcttccaaataaattaagaaaaatcataattctaaaataatatagataattagaattggaaaaaaaattcaaatataaaaagaagttttctaaaaattaacaaaaaatagtaataaacaactaagcggaagttttccgaaagtctgaaaaagttaaagtttaaacgaaaaggaaagcttaatgacgtaaaggaatacttcttcgtaacaaccaaggaaactaataaagtcctaaataataaagcaatggcgtctatataaataaacatctatggatcattgatagtcaatcaataattttattctggaaagttcaaataaataatttattgacttaaataagctacatctcgacgagcttgaaaaagactttttactaataagaaaaggaagggatttcaaaaaatatgtatgaagcatgtgaaaactttggaaggtaaaacatgtactgcttaaacaaaatcagaagaggatgaaaagaaataccgtaggaaagaagtatgtgaaatctttcacaagaagatgaagtgaatagggattaaggtgtgtttggtccgtgaaacattaaagtttggaaggacatggtgtcatggtggtgttcttaatcgtatcaacttgaataaagtttcagaatatataagtcgaggtttttcagtctcggaagcgtgcaggtaaagaggatctaaactgcatcattaaaggagagaagtgataaagttaagaaccaatttagaagctaaaacctttttttagaataatagaaaacaatatatagcaaaacaaagattttattcttgagaagagtttattgacttgactaagctacctctcgacgagtttgaaaaaggcttttactaacaagaggaaaaatggattttctaagaagaaatatggtgcatgtgaaaaatttggaaggtagggatgtactgcttagacaaaatcataagatgatggaaagagacattgtaggaaagaagtatgtgaaagattttttcataagaaggtgaagtgaagagggattaaggtgtgtttggtcagtgaagctttaaagcaacaaggtcatggtttgatggtggtgttcttgatcgtatcaatttgaatcaagttccaaatatataagatgaggtcttttagtctgggaagcgtgaaggtgaagagaatctcaactgcaacatcaaaggagagaagtgatagagttaagaaccaatttagaagttaaaactttttatcagaataatagaaaacaatatagagcaaaaataaaattcaaaagaagagtttattgacttgacgtagctacctcttgacgaggttgacaaaaaaatttactaacaaggaatagaatgaatttccaaaacaaaatatgaaccatgttaaaattttggaaggtatgggatgtactgcataggcaaaatcataagaggatggaaagagacaccgtataaaagaacaaaacaaataaaacgagtgcttacaaaaaaatagaaagattgatagctcttcgaaaaagttgtttaaacgaatatttatatagatattaaaagaaatgtgagaaaaatatgagttgttaaaaaaaaagtatagataagcttatgaatatatttgtgtatagaatcttatttttagaaaagctatacttactaatccattgaagataaacgaaaaaacaatagtaaatttgcggataccaaaatgagaaagtcgtcgaaaatatttctcatacaacaatttatttcatgagactgagactcaataaaaatgtcttacctaaaaaaacttgatcatccaaaatttgtaaacgtttacaacatttatcaaaatatatgagccaaaaaagatgttcttttgataattgttgtaataagttgtattagagttatttgtagttatatatatatttaaattgaattatttgctatgctaactttaaaactcaagaaatttaaattattaacaataagtagatatattaaaactaggggtgtcaaaatgggtcaaaattcatgggttaactcaactcaactcaactcatgaaccctaatgagttgaaaattttgactcaaatgagttgatgggtcaaatgagttattgggtcaattgctttgatgattaaaatgagttgggttgtaatggttaatggtttcaataatttacccaattaacccatcaagttttataaaattgaattaaactaactaaaatctctaaaccaatgtcaatttaagtttaaccaacacatctaaaccaatttaataaaataaatatttttccaaatttcttaaatatacaagcgatgaaattgtgaagaagtaaactcgtaatttttccaccaataaaacataaacccgtaattttccgtcaaaaaagtaaacccttgattttcctgccaataacgtaaacccaaaagttttccgccaaaaacaaaaaacccgtgatttttcccgccaaaaacgtaaacgcataatttttctgccaaaaacaaaaaaccgtaattttcccaccaaaaacgtaaacccgtaatttttagtaaatattttaaatcaaaccaaaatttattaaaagttttaaaaaggcattcattttacgcgtagcgtgggttcataaactattatatataaatttccatgttttaatttgtgaacagttttcatgtgcttcaatagcctatttctttttttctttaattgttatgaatttacttacttctataccacgatctggtttatttttattattttttcttttacctttttctcccatttataattgtcttttatgaatatcaattatcatgttttatacaaaccaaactcttttttttgaaatatcaaaatattattttgtttatttaataaaaaataagaaagaagcataagctatatgcaatcaatataattttaacaaacagcagcatctattttattgaaaataatttttatattttaatctcgataattaaaaataaattctagcttcgccattcggctcggttttggttacaccctctcttatgtgacataacttggcatggtgtccctttccttttcacactgtaacaagagttattttgaaccttaggtacatacgactttccttggtttccaattagatttggagtttgtttttggcttaagattgggtgttttggcttctcggatggttggtgttagaaggttagtttcttggctctgttgattttgaatttgcagagaatactttgcacacatgatccagtttaggttctctcacgttctgatctttggcttatgttcatatcatcgattgtactcgtcttgatccaccacctcaaagcgttaaccatgacttgtccaagggcaagtgaaagattgtcatcgtgtggtgtagaatgataatcgaagtagtaattcatattttcttcccactgtcgataatccaatcctgaaaagaaagagtttaggtacataagtattaaatccattgttcaaaaatattctgattttggatttgcgagtgggctagaaattggtagcccttgatgatggattccatgaaattgatagctatgcgtggtatatcgagcttttatatccatcatcatgtcatggctccacataacctgacctgtaggtgctcatgttttgttcatcatcttctcattggctctaatctgctttataagagtaagactcctctttctccatgtaggccattaatgctccgttttttcttgcaaaaagaacagaataagcatattaagttcgcaatcaacaaatatggaaagaattatggatttgttttcttcttttcttttaaaacaaaactcaaaaaacttaaataaccaaaaaaaattcagtttttttttttctgtttttaataaataagaaaatttagtaggtgattggtttggatttaactgtacaatttgtgctgtagggattttgttgtagatatgttggttgtacctataacttttgttgctttacaattgttactgtaagtttttgactttaaatatttataaaaaggattagtaaatataatagttgtaataaaagattttttttatagtaactaaaatgtcttgtattactaatttaaataaacatattatgatggtataaaaaaatcctatgaattattgataatttcaatttcttgtatttatgtcaaaaaattcaatttcttgtatttatctaatgaattaaaatttctacagcaaaaaaaataggtctgcgagaatttactctactacagacttaaaaaaaattggactgtaagtttgaaaaaaaactacaacacgattgacatgtattcgaggctttaagaaaaattaaggttgtaagattaatttacagcccaaccaatcatgcataattaaaagtaaatttttatataattttctgatttttaaatgggaaaacaaaacaaacagaaaaacaagatggacaaatcgaacaatacaactttatggcttttcctttttagaatcaaaacaagaattcaaataacataattttatttttcctggtttatgattgcaagaagcaaataacaattaaaaattcaaaataaaacagatttttattttggttttagattttataagacgagaaatcgcaaaacagaaaattagaaaaaatatagggaacaaattcacctggatatataggagatcgtaattagttttgataccaatgctacaaaacattagagtcatacattggatttatgattttcagtttcaaggcttcattcgacgactgatttgatttatgatatctacaaaaaaacaagtattagcgatttcattcggcggtaatgggctttctaagcccattccaacttccatttagtatgatattgttctctttgggcttacatgctcaagcccgcaaggatttgttattggactccttcctaaaaggccttatactagttagagttggacttggcttatatattagaaactctttttctaaacttcaaatgtggaacctttggtttgtaccaacaatcttcccttcaaaccaaactccacgaacttgggcctcctcttcaacgaaactttggcacccttaactaggcaccttcttattcgtgaaattcttgaggcaccttcttatcgtgtcatgtttgagagattctcccacaccgatcataccccaagccataggtccactttttcaacctaggctttgataccattgaatgggctttcattccaacttccatttagtatgatattgtcctctttgggcttacatgctcaagtccgcaaggatttgttattggactccttcctaaaaggcatcatactagttggagttgtacttggcttatatattagaaactctttttctaaacatcagatgtgggacctttggtttgtaccaacaggcgactgattaggtagtcgttcattttggcgactgaataatgacgtattagcgactaaatagtctagattatacattagtcgataatcagtctataatgtgagacagattaaattagtcgctaataggtctccagttacaactacaatttagcgactcatatattctatttgggcattaaattgggcttttatcggctagatccaataacgagagcccatcagcctagactatataaggtcttttatcgactaaatcaacaaaccctaaccctaaactcctttcatcctctctcgacaaaccctaaccctaatcctaatccccttttgcgatcgatctcaattcttcttcaatcctctcaatctctcatcttttagcttccaacgatggctcctcatggtagaaaaggcaaaagaggaagaggaaggggatcgaagacatatacaaatcgcccacttcttcctggaggccgaatcaaaatagtcttcctagcaagtaagacttcacgccgacgaaccatcaagccccacttccagatttagagcagaatccaacgggacctagtctttgagactatcctcctccgacacagcttttctagtcgggcaaaggttctccttgagggtctggatctttctgaggctctggatctccttgaggttctagatcaactccatttcgagcatccggatcgactcaatctagatttggaggatatgttcgtctagcctctagatagaattaatcttcaacaccgattcaacgggaggcgtcgattcagactccagtcgtgaatcaacaaccaccacttcctcaacctcgacaccctaattttcgcatcacaactctcaatctcaaaactcacacgaggaagaagatgatgaagaagaagcgaatctgagaaggatgtgttaagggagccaattttttcggaaaatatactcgctactttagatgagcttcttaggacgcatgaccttgaggaatataccactatcatctctcccacattggatcctaaaacgtttttgtaagtttgccatgaattagtgtcattaggatatgaactgtacgattaggtaagatttagttattgtttgtggtttgatttaatgataagaactgtatgattttgtttgatttagttcttggtagtggtttgattagtttaaatttgtttgtaggtttggtaaggacaagggtaagctaactcagaagatcacaaagatttttacaaacaagtttgatgggccatattacagttggagatgtgtgcctactggaagaagagaaagatacttcctcgaattcgcagatcttctacttttgttttgattattgtgtaactaacatcaaactctccttgttttgtagaaaacacacacttgggatccctcattgaccggtgattgaagctaaattctagaagatctgtcaactgcgtatgaaaaacatagtttataaggcagcgaggttacagcaacaacctccttggattgagaccacactgtgggcagtgtgactattgggacacaaaagaagccaacgcaaagaattcaaccacatcattagcacggatgtcttggtcctcacaagcatgtatcggagccaatgtcgttcttacaaatcgaggtagagatggtaagttcttttagctatgaacatttgttttctttacttatacaatgttaagaagttcacttgttttgttttcaacatttcaaaaagttgaattgggaagaccgcctactattagtgaagtttttctcaggactcataccaaaaaggatgacatttttgtcgataggaaggcgcagaaggttcatgaggtatataagaagaataagggagctaagttggctgtttttgagaatgatgaagggtctaatggtacttcgcatcgatcacatctatctcaagaggaagatgatgagatcttcttttaggtaatgtggttaattctctgtacttttgatattatcgctttgaaactgacaaagactaatcctcttttcttttgattatgcagtcaactatcataaacgatagaggggaatactatagagttggaagcttagggagcatcaatgggaagcgaaagtacccaggaaggaagcagttctcctttcacaaccctgcactcacagcttgaggaagccaatcgcaaaatagaggaacaagctactctacaagcatatcctgaggcagaggctttccaggttgcagctgagcaagcagaggctttccgggttgcagctgagcaagcatagatcaagcgggttgaaaatgggcaacaagtagtgatcaagcacttgaggatggtgaagaagtacttcaccaaaactgacccaaattttctcgccttcctcgagtcttctactgttttagaagatccaactgaggatttcccttagcttccctacttctcttccctgactttgaaaacatgaacttgtgtttgtttggcggtttacttaaaaacttgaatgttgaatgtttttttgaatgttaaatacaagttttttgtgaatatattcgtaattacaatagaattatgattccaaaaaatagcatgctaaattgatagttaaacctgtcaccagtcgcgaagtagtagcaactcagtcaccaaaactataaaaacagtcgccacgtagtgacaacacagtcgctatatcattctccaaatagttgccttatagtggcataaatgtagccaaacggtcgctaaatggcgactggttggcgaccttctgcagtcgctaatcagtcgccaattggcgactgtttggttacatatcaatttagcgatacgtggattgccgactactgttttgccaaatagtcgtaaatatagatttagcgactgtttagctacttatagtgtagttgctaatgccatgttttcttgttataagatggattaatggggcgatggtggagatttgttgtgtaatcatgcaacaatacgtgaaccagaatgtttgaggaatcacactagtaggctttgaattgacaagaaaacaaaagactacacgcttttaaagaaaatatgaaggtttatgaaaaatacttgaataatgttataaacagagaaagagatagaagaaatgagtgtgttattccattgagataaaaggttctttatataggagtacaaggaaagggtaaaaccctagaaacatctagatgatggacttagatgatgggccttataatgggcatccatctttattcataacactccccctaatgaccattatagtatcataactcgtaaagtatttgaaatgctgcctcattaaaaaccttaccaggaaaacccaatgggaaaaaccatggttaagggaaaaagagtgcaacatacaattactcccccttatgagtatattcgtcgagatctttgagacggcgtaatccgatacgatagactaacttcttgaaagtagcagtaggtagcgccttggtgaataagtcagccagattatcattcgaacggatctgtagaactcgtacatcgccgctcttttgtagatcgtgtgtgtagaagaattttggtaggatgtgctttgttctatcgcctttgatgtatccgtctttgagttgtgcgatgcatgctgcattgtcttcgtacataattgttggagtctttttccctgcatatataccacagtcttcttgtatatggtaaactatggatcttagccatacacacttgcggctagcttcatgaattggtaaaatctctgcatgattagaagatgtggcagagaataaacagtatttgagaataagtttgccaaattttctcttgaacaaatttctggataaagtacaacgccattcttctgctcatgaatcttttagatgattcatcttgaccatcttatttatttctctaaatatcattagtgtataatattcatttggatgattgatagaatttcttaatattcatcaagtgtattatttgcgtgttctttaatgtctcgttaaaaaccttgtcatagaaaaatcatgtgggataaaaactatgataaggaaaaagggtacatccacgcatatcattcaatctccccctcggaaacatcttcttcaggagatgattttcaatcaaatacaatatctcgttggaattaataaccataatcttaatgatcaaaattatatggttttcatatagacttataaatatcattatctagtgatattttatcatacattattgcatcgtattacttatgataactctgtaggagttttaatgattttcaaaacaaatattagtttgatcaatatattttgacaaactcaacataaatatacatttatatgattatatgccatgttacatatttctttttattcgatcgagtagagttttagagaacataattctcatataattaatccttcagagattatatctttcaagaatttcatataaatgtcatatccagtgttccgtctcttattgccagactttagatacttaaaaaaaatattacatccaccacaagagaatatatctcttcataatacatttcttatctttgtgaaaatctcattaatttcactattctttcacataaagactcatttattttccactggttttacacatcatgtgcatagactactagtccaattatctctactagagattataattatatgtctatttcttcttttccatttttggctaatcattactttgtgtacacttttcaatagactttctttcatgatcctcctttttgtccataatatcaactgctcatagcatgcaaatatattacgacgtcgatttgcttttgattccattatattttgacatgacatagctagctagatctcttcattgtcaagtacttgaatgtttcatttgtcatgtttatgtctcttttagagatcattcactctcttcaagagatcatcaaaatatttatttcctcaatttggtcatttttaattttgtgctccttcacttttacgaggatatttatatttggaaccaaggtctattacacttcatgcgatcttaagactcaatagcagtttgaaattggtccttacaggacattcattatattctggagcatttaatttacaactagtataagtgacttcatcactttatttgggtcagcaaatgcgtctggcaattacaacgctaaattctgtaattgaattatcttttggactcttaatatacattctttactccgaggatcattgataattcatttctatttatctttttcaccagctgtatacattctcccccttatgttggaatagctgactatataatatgatagtcttcaaaacgagcggtatataaatccttctaggatggcttagttatcattcatatccaacatgtattcttatcctcctttgaggattcatctctgcgtgctgtggtggagcacttttcacattcaaagcttttagatgaaaactatttggtttctgacgcaaaaccaataataatggggaaaactattaattattcattggcttgatgcgtatcgatgttactaaaccattttgtgtatgaacatgaatttcaaaatgttaaacactttcccaacggatatccaataatggttattataaataaacactgaaatactcttgtactttaatcaagaaagtaatctcgcaaactctatgttgcgggtttataacaaagataaatatgaccttcttgtcgatgcaacaatcgattcaatgcgtccattgaatcgacgcatcttttacaaccattaggtatctaaatgtcatatagtgggtgatcaacccataattatctccttgtatatacttacgaatagataaagtccaaattacttacactggtaaaaatcacattatcatattgctttctgagcaagtaacatttgataaatcattagggagaatcttctggtttttcacctaatgtccacataattctcaatactttcacatcatcattaaaccaggatgaccaatccggttaagccaaatatactcttgaaacttttaattcttttgaaacttgtagttctttcaaaacttctaatttacttttcattgcttatcagttactcccttaatgagatcttataatcaaaattacttccatgtattttaataatcaatcatatgttaataaaacaataacgagataataattaaaattttatattctaatataaacgatattaaatttgactaactatgtaagatcttatattcacttcagaatatgagtattacttatcatagataactcatatgttttcttagcctttgaaaaacactcgatttaagtttataatagttctcaaaatttctttcaaaatattgtgtctacaagacaacaatacttgcgtaaaagtttaagtgtctgttttaccatctccgcatcagagatattctcttaacaatgtgagttatattcacaaaaagacttcaagtcttgaagttttagtaataactaattataacttattttatctaataacacattcgtataagaattgctttatacaacttttagatttttagtagtcaaagattgaacataatcttctggatatgtcacttattatccatgtgagattcattacttctcctcctcgaaatgatgaaacttcaagttcatccatctcgtattgaattccactctagaatcataatgtatttatatctcatcatattaactttgagatttggagaactataccgcatcgatgattttaattttgtattcccatagaaaataatgtatatgttctcctagagtcttttaataagattttatactacttgatatactagattatttcatcgttagatttttttttttttttttttttttttctcaacttctggtgataatttaagttcttaaaaaaaactttgaccatcaaaaatatgatatcttcttaagatacattaaactagtcattcatgaaaatttctataagtgattatacctttaaattaagttatttatcaatcaatttatttcataaaataatcaagtattatatactaatacaattttaatgcaatattgtaaaaccaatcagaataaaactattttgtgcaaaatctggattttacatatatcttgacaaaacttttatttagggtaatatgaattcgtgcaagatttgggtaaaatgatttcgtgcaaaattagggcaaaaccatgaactatttttctttttttttttttttttttttttttttttttttatatatatttagataccacaaagatttagagaaaaaaatcttataaaaagaaaaattatcttgcaacgtttttagtaaaaataataataacacaatcaaatatatggaaatcttataaaaagatttagataataataacacaaagatttagatatatggaatcttataaaaaaaaaaattatcttgcaacgtttttagtaaaaataataataacacaatcaaatatatggaaatcaaatatttaatatggaaaagtcaatatctaaaagtgataagatatgtataacgttttaatcaaaggagttaaataagggatatcatatcaatcataaatagattttagacaatataatatttataaaatgatattgaatatagatgcaactattcaaaactggaatgctaaaacattattacatggttgcatcacccaccaccgggctatgaatagttacaaaattagttatataattataaaattggtaatttatatattcaatattgtaatagtaaatcacaaaaattaacaattaacaagcatgattctcttctttaacgattttctttgtagaatcattgaatcatgcgatagtaattatagaaacaaatgataagcatgattctcttctttattgaatcattgaaaacatgcttttaccgatctatactataatcatcgattggctcatattgttttgtttcaataatagaaaataagtactatgaaccatgagtcgataagtaaacatggttcttaaaaaaaatgtaagaatctctatatctaccttttagagcgtgttgataacgtgttataaacagagaaagagatagaagaaatgagtgtgttattccattgagataaagggttttttatataggagtacaaggaaagggtaaaaccctagaaacatctagatgatgggcttagatgatggaccttataatgggcatccatctttattcataacaaataataacttgttgttacaattggggataagcttaaattatagagaggacttactcaaggttctaaaatcataaaataagaaactaaatcaaaaatttatattaaaaactagtttagagcggcccactggttgacaaagggttaattaatgcttctacttcatgaggtctgagttttgagtctctaatactacgacttattaataaatttacagattaatagagacaagtgtacatgaaatctcaactatgtataattagagccgttcgtcgtgtatctacgtagagaggtaagtgacattaaggcgtggatcgttgaaggtgtccaaaacataaaaaaatattgtatgttatggatctaataagggtgggaaagaattatccgtggtagaatcgcctaggtaatagttctcagaatttacaattaataatagatccagacgttaaaaaaaaaaatctagaccaagttgaacacttgatgaatattatgaatggtaaaaagtagagggtgaccaagttgttttctattcatcccctcaataatttgggtaaagttcaacctcataatacatattttgggtaatttggatagtttcaaaaaaatttgaaaaatttccagaaacttaataattttcagaaattttttaaagtttaaataccaaaataaataattcaagtattatatttaacttgtttttctatccgttaaaacaaaataagtaactccaatgaataattatttataccaaaacatttagaaatatgaaattttgacagatacaagttatgttggaaaatctactttcgttggacacacattccggtttagctcattaaatggtggttaactttcttcaaaattgtttgagcttggttataataacttgctcatgaagctgcgtgagtattatctcaattccgtaagatctgtgactctccatacaattagatgtataaatatattttttcctaattgtaaagatctgatatgtccagatcttttctttttcaaatatatagtcgtgtatgtagtgtttcacaattcaacacagaaaaattgtctacctctgatatttcatggtatcagagcttgaagctctcttgtaaaaacaaaaagggtccttttcttttctgatcaacaatggtgaaaaaagaaaatccaggaaatctgaacgacaacccatccgtgaacctgacctttgctgacaactctggtgccgtgaattcccatcccttgctgaaagggaataattacgatgagtaggcatggagaatgaagacatcactatgctctcgaaagaaattcggcttccttgatgggatgatttaacaaattgaagatggatctccggatctggaagactggtggaccattcaagcacttcttgtgtcttggataaagatgacgattaattaagccctctgatcaaatatctcgcatagagatctggctaaggattattgggatcatctgaagaaatggtcctttattataaatgagccaaagttgcagcaaattaaagcgtagttggcttgttgcaagcaaaggggtcttgcgattgagaactactatggcaagttgatgataatttgggacaatatggtaagtttttgacctctacttacatgtaagtgtggaaaatgtgaatgtgatcttggaactgtccaagaacaaaatcgtgagaaagacaaggtttattagttcttttttggacttgatgatactttgttttgaactgtgcgatctagtctcatctctcgcgtgccggtgcagccattggaaaagggtacaacatcgtaaggaaagaggatgatttgattcgcaatggtgctaacgtgggtgatgaacagcctaaagtgagtgttggtgctgttcatatgcgttcacgttagaaccagtttcaaatgcgaagcgatgaaaaggagattggagtgatgtgtaagcattacaatcgatgtggacattcatccgacaattgctatggaaacccagagtggtagggcgagagatctcggagttggtatataaaaggtcgctatcgtgaagtagctagctctagtggaagaagagaacgttgaaacacgacctatgaaaatcgtgttcatgtgttaaatcaggacacaatagagcaggcatttcatgtggtgatggaccagaaactatgatggtgtgagtggtatcacggacaatcaatggcattccatccatcatattcttcatcttggcaaggagttcataacggacaaattagcgggtaagcctagtttttccaattggattatggatacatgagcatctcatcatttgaaagaaaaattagatatactgacaaatgtgagagatatggctccagtttcgattatcttggctgatggtagagaaatagtatttgttaaagaaggaatggttaagcttagttcgaagttaaaattgaaatcagtgtttttttgttaaagagtttcagtctcatttcataattgatggataaaaatcaatgtgtgttgcaaatatctgattactttcttgtggtgcaggaccacattacgaggtctttgattggagcgggaacaagatagtaggaacatttcactttcgcagcattagtcacaacaaaagaggagaatcattatgagttgtggtatagttggacgggtcatccttctacaaaaattgtcgggttactagctacaatttttgtttgtttcttcttccaatttgaatatggcgtgtgatatctttctccgtgccaaccaaacaagatattcttttcttttgagtatgaataaaatttaacgagtttttgaattaattcattatgacttatgggggccttatcgtacaccattacattcagagaaacattagtttttaacaatagtggatgattacttagagaggggtttcattatatctgttgacggataagactgaagctcctcatcatttgaagaatttatttgctctaattgagcatcaatttggagctaaagttggaacagtcagaagtgataatggatcttaatttatgtgtttagccacattctttcaagagcaaggaattgcacatgaacgcttgtgtctatcgacgcctgagcagaatggacgagtagaaagcaagtaccgacatattctcaatgttgcaagagaattgagatttcaagccaatcttccgattgatttttagggtgagtgtgtgctcactaccactaatctgattaatcgaacttcaagttcagtgctcagctacatcactctgtttgagcgcctgcataacaaacaactcatatttgatcatttaagatttttttgggagcttgtgttatgcacatcatcatagacggaatagtgataagtttgaatcaagaagtagacggtgtatatttgctggttatctatatggtcaaaaaggttggcaattatataatttagagacattaaatttctttgtgtccagagatgtggtcttctgcaacactaagtttccatttcagaaatatccatcacttaaaccttctgtcgtcgaagaagcagaaaaagagtggtggtctccaatttcaattggcccattcgaagataatggggacatcactattacaggcccgatacttcatcaaggcccaacaaatgtggtttcagcccaaggaaagatgcaggctatacaagatctcgctttgtcatctcttccctccgatattggtccgatcgtccctgagcttaatcaaaattcaattatagaggtttttccttcacctttgattccctcaacctccacagcgacgtgtccgactaatcgacctaccgtgaaaatgaacttcaaaagctgtcgcaccgataaatcatcctccgactcgataaagaaaaagaaagagagaggctcatgtaacattgcacgattatgtgttcaattccgcataattccgcattcaaccttgacatgttgctacgacttctcaactagctgttatcttcataaaacctattggcagggatggcttcacatcgtttcgagtcaagctggcataaaaaattctgtatgctccacctagagggggtagggggcacacattcttgtttagctgattaggttgtggttatatctcttcaagatgtttgatctcggttataataacttgctcatgaaactgcgagagtattatctcaatcccttgagatttgtgactctccacaagattagctgtgtaaatatattgtttcctaatttggaagatccgatatgtcaatatcttttctcttacgagtatatcgttgtgtatgtagtgtttcacaattcaacacagaaaattcgcaacctctgatctttcatcttctcaaaatgcacaagcccagatttgttattgtaaatttctaatacaacttttggtttttgttagtttgttataactactattttgtcaactcttcctacgctttgtactttgaagtaagataaatttcatagcagaatcacaaaagacattttacttgcacaaccaaatttagatattaaacaaatgaatcttaggtaacgaaaaaaaacaaaggtatggagcaaacaacaactcaagataatacatagaaacaaggataagtcaaacacagagtaaaattattacaaaacctagatggaggtaagacttgagagtaataatcataaaagtatagtgagaacgaaaaaaggaaattaagaagagaaaaaataagttagtttcttgaaccatatctgaagatatcatcgatgaaaaattgctgattcgttgcctcgtcctcactctagtttttcaatccaaatttactttgcagctatgttcatgtagtttccgttagcgctttgagaatccaatggtagttttcctagttttggacacttctctacatgattttttctcaggtttggaaaagggagaggattccagtagacactcattaattcgttcaactcctgaaaaccaagatagtttagtttttcaaagggtataaatttttgatgatacacattcattaggacaagaactttcgctttcttaattattgtttctatctgcggagacttcactacaagtagatgggtgaggttttgagcaaaaaccagccatgtcaaaaccttcaaactcctacattctcttaaagtcacaatagagagattatggaagcatggagtagtgagacttttagggaagtccaaacatggatcacttggacggtaactgatacccttattaagtagcaaagattcaagcaagtccgactaggtttggcctataagaaagtctagacgtggagtaactgaacttacaccctctatggtgtgtcatctgcgtttatctctatctcagagatatcagaactctggaactcaagacgatgaagatcagccaaaactaccaacattaaaatcacaatatgtgccaacattttattgagagataaagcttgagtacaacttgccaacctttgaaattcttacaagctatttaaacattaacattcattagtgtgattggtaaaaggtttagatgctccaatgattccaacacttccgctaattcaatatcattaggaactcctgaagaaaaaatcttcaagacttagagacttagtagatttaatatcccaccaatactttgaagtttagtggtataatcctaattcaaatagatcagtttgcttaacttctttaaactatctgaaaaataacgtatccttgtaagtgataagctaagataccgcaaagagactaaactcaaaaattcatctcgctatgcggtgcgacttgcgttccaagatagatcccataccacaagcattgacctatatgtaaaaaattctccagcgatgtgaaccaacttgttttgtcgtaagaataaagttgtaagttgagaatattaggaaccctttaatatttttgcaatcagattattcattataaacaaccttctcatgattccacaactgttagtatcgatctggaaagtgacataacattgaccatgtcttcacaataaatccttctttttgcttcccaaagctagaagctatccaagtggtcataacctgaacagagtcgtgcctatgtgcaattaaaatggcatttgtttcaggtaacagaaatataaagattttttaagacccccaaatttcatcaatgtagtgtatcagaatggttttagcagattcattaatggctaagcaacccaagtttgaattcgttagataactttttttttttgcatttatacacaattagacttagaataaggaaattgagaatttccaaaccggtaaggaaactatctcaaaccaaaaaagtaatcagaatcctaaattgaaaaggattcgagtagagtttataaataaattttttgatttaggttttagaaagacagagaaatcaaaattcccaattagttcttattcttccaagttctaagattcatctttttcttccacagttctattggcacggtgattaaatgggtgatatctcatattcttcttctccttcgttggtggtaagtctctttcctctgtttctttcatatacaattttataatcctgaaaaagtgacgaatttggtttttatggtttgtttattcactttcttcctttgagaactattggaacatccaaacatgacagctttttgtttattaacttgttttttatactagctttgtttatgaactatcattggcgctgatttgataaattgtttatttttcaatctttagaaacatgtcttttagatcgtatccaactggatcacaaaaaagacagaagaaagataaagatgatgcgtttgtgaagtcacaatcaggtgctatgcttaagtttctaaaaaacctgaaattcctactgaatctatgggaataaacgatcagccggatgatccaatggagaatgagaatgaacaagatgatgagaatgttaacaaagaagattatgagaatgttaacaaagaagacaatcagaatgttaatgaagaagatgatggaaacgatatgaatacagatgagaacaatgttgaatctaaagagcatcatggagttccagatttttatgatcgtggaaactggggaaaggttgagtctggactaagaattattatggttgaaaaaggtcctgctgcaagacaaccaattgatttcacttttccaagagagaaggttagtggtcgacacttctcgcattcatactaccgacgaattttgagtaatggagagaaacaagaccgtcgttggctagtttactcaaagatattagataaaatcttttgtttttgttgtaaattgtttactagagacaaaaatcctagtcacatggcatctaagggattgagtgattggaaaaatattttggaacggcttaagaagcaggagactagtcatgagcatattaaatgcataagtcaatggatggattttgaatcaaggctaaagaaaaatcaaactatcaataagcatgtgcaacaagaactcaggaaagagaggaattattggatggatgtgatgcttagaatttttttgttggtaaaaactcttgctaaacaaaatttagcgtttcgtggaagtaacgaaaagctaaaagcagatggcaacgaaaatttcttaagtttattgacatcatggctgagtggaatccggtaatgagggaacatgttagacgatatgaagatcgtgaatctcgttactattttctcagcaacaaaattcagaatgaattgatcaaaaagatagcagatgagatcaaaggtatgatcattaaaaagattcaaggtgcaaaatatttttatgtcattgttgattgtactccagatattagtcatcatgaacaaatgactcttattctttgatgtgttgatgttcaacatcttcagctaaggtagaagaatattttctcacgttcttgaaagttgatgacacgtctagagaagggcttttttgtgagattcagaatgtgttggttgctcttggtttaaacattgatgatgtgaggggacaaggatattataatgggtacaatatgaagggaaaacataaaggagtgcaaaagagattccttgatgtcaatccacgtgcattttatactctgtgtggtagtcatagccgtaatcttgcactttgtgatatagcgaccacttcttaaaaagcaattttattttttgggataatccagcatatttattgtttatttgcatattcaattaagcggtagaagatcttagaagatatgatgggaggtttgacggttaaaaatttataacagactcgttgggagagtcatgttgaatgcgtaaaggcaataagatttcaagctcgaaaaataagagaagctttgatttatatagcagaaacgactgatgatccaaaagcacaaagtgatgctgaatgtcttgcgacaagtgaaacacatgggattggtcattatgaattcttgttgtctatggtaatttggtacaaacttctatttgctgttaacaccgtaagcaagagtttgcagtcagaagacatgaatattgaagttgttgtttcccagttaaaaggacttgtttcttttttcaaaagtatcgagacacgggttttgagagtgcaaaatcagatgttcaacctatagcagaatctatggagattgaaaccatttttcttactaggaaaaaacgtgtcatcagaagaaagaagtttttggcgaggaacctgagagagttgacgaaactgtgaatttgtctcctgaagagtgctttagaatttcttatttcatccaagttatggatcaagctctatattctcttgagaccagatttgagcaatttgaaaagtatgaacaaacatttggtttcctatttgatttggataaactgaagtctgcaagtgatgatagtttgatggcgtcttgtgcaaatcttgaagaatgtttaaaacatgaaaatcattcagacgttattggggatgatctgtattttgaactatcagttctaaaagatgctttgccagaagattgcaagagacctatcgaggtgttgaactttttaaaaagaatggaaggttgttatccaaacgaatggattgcttatcgaatattgttgacgattacagtttatgttgcctcagctgaaagaagcttttcaaagttaaagttgatcaagtcttatttgcgatcaactatgtcacaagaaagattaaatggtttagctatcatatccatagagagaaaactagttaggaacctagattatgagcatatggtgaaagattttatcaagaccgaaggaaggaagatcgtgtcttagtgttttgtttgtttcttatttcttttatttttaaactttatcgtttggaattttcttacatttattttatttaaaagttttgttacaaaaaaaaattttggcccccaataaccctgggcacgacactgctcctgaatcacgtcatgcatttttactcttcttaccaaacacaatccatcaataaatgtgcatgaactaatgaactaattatatcatggcttggtttatcagctccatcatcgtatcctctataaatctttcacatatctaaaatctatcaactcatctttccttatttcgtaatctcccaaaaatagagagcaatataggaagcacgattatactctttcatcgttcaaattatcatacaaaacttcagaatatgaagaatcttatcttacgtacttggaaactgaacttaaaacttcgattcctcgaccccattcttctatcgtctttttatatgatatcaccgtgccaataacattaagagcaagttgcaagcaacaacatttttgactaatttttcttgtaagtttgggaatatgtggatgacttctgagtgcgacttctcccaacgtttctttgaaacaatttccatgcatcttctggtgccaaacaactaagttccatatcatcatttaccttcagtttttttacaaacttcctcttgccgagtggtcaacaatacttttcatccattttcttgtgttataagtggaacactgatcttatttagatccacctcacttcataaatcgtccaataacaatataaatctctttctactaaggatattatatttgtcaatagccttttccttttctgtctattgtcaatattccttaccaaaccctagtattttgccgatctgttcttgaatactctcaatctgacaaatctttagacaccacaacccaaatcacaatatcaaatcaatttcttgaatcaaagtattgatctgaggtagggttgtgatcttgcctactccacccataccgtaaaatcctagagttattacatcatctttcaagagaaggttccattcccgttgaaagaccatttccaaaccaactactgtaggtgaaatgtacttcttctccaacttaggaattacaattttgcttgtaaccactacaaaatattattctttagctttaagatttttgacttctttcaacttcctgaatattgttttactgtaaaaaatgcttaatttataagttttagaacaaatactacacacaaaaatgttcgatttcgtttgtgctggcacttaacaaatcattcacttgagactccataccttcgaccctcaatagccattactagacttgagcaaacttttatagaccgttatcttcctcaatcttaactattgtcaaaaaatcatcacgtacctctacgagctcttgcatcaggaacttcaatgactcgatattctcctttttgtgagtgtgattttcataaccacataatcttccactaatatgatccaacacttgatcacatgataattgtaattgtactcaaagacaatttcacatattttttaagaaatctggaactaaacgcaaagatgggacatgtaaaaaggagagagactaatcggtatatattgtagtaccattatttttttaagacatagttgagagatcgttttaaaacatcacattagagcatctccaatggtgagaggccccaacggattctcagcattttttaagaataaatttttgaatttgatgagattagagcttatgttgttattttttaattttgcaaattccaatggtagtcactctttgtggggttctcgggtaacgaaataaataaaaattttaaaaattattttaattcataaaactgaaagactattacaattcataacatattaaatatatattaatttcatacatttgaaataaatttgcaaaaaaaaaaaaaagagaaacaataagttgttcagttggattgttgcgaaattatgtccatataagctcaaccaaatcaattttcaattattaatgcatattttgatcacaaacttgatttcgaatgcccatcatattttcgagattttgaggcgtacctgtagaatacgataaatcgatttgtgaagcttggtttccttcaacatgtagaaattctaaaacatcaaacttgacgacatactttcataatatttttattatattgcggcgtagtagtcactatcttcctcttcttttcctgcgaggactacattgatgacaaaatcgctgtggtcttggtcaaggaatctggcgttactcaattcattgtagcagtcaaggtaataaatagcttcctcatggttgttggacaaaaacattatttttatcttattctgagtaaaagaaatggattggtggtatttactcaggagaaatattacaaaaagagaatagagaaaggagtggtaaaggaagaagatatggagttttacctctttgcctccaagccttcaagtggtgctgccatcttcaacctctaaacacatctctctccctctttattaattttatttcaaatctgaattgtttgcagcaattgtgcccattgaattcccaacttgctttcgtattaatatttctgaataatatgtaggagttgacgacgataataaaatgaagtttcattcacaactctttttcagagttttatactataactagcaaagtacacatttccaattttaatataattctctaaattttctgattttccctgttaaatccacctgatacacattaatttagtaatttacctaatcccattatttctctaagttgtaaactaatagagaaaatataacgggatccgtgtagatacgccgcccgtacagtgtataagaaatcgagaggttgacgggatccgtgactccgtgtagatacgccgttactttagaggcatgtacattgtataagaaatcgagaggttgatcagactccggcgattttgtcatcaatgtcgtcctcgccggaaaagaagaggaagatagggactactacgccgcaatcgcagtaggaagatagtgttgtacccatctcgtttgtcttctactatcatattgtttaatataatatatacttcataatatttttattttttttccttattcaaaacaagagttgggttgttaataatttgaagcgagcttgcaatactccaaatgcacgctcgacatctatacggaccgcttcttcatgtgtagcaaataaagttgctttccgaactttgtggaagtcgagtagattgaataaaagttgtccatttcggataaataccatttgtgacatagtaaactaagagcatctccaatggttcaaaactagaactctccccattgattctctgattaaaagtgtgaaaaaattaactagaataatttattatagagagagttgtctctcttgaaagagattttggaaggcatgggagacatttacgtgtcacgttataattggctggatcttttgacaaatcaggattttttttttttgcctttttcgatcttccccgactcggaattcactaagtcacaaacattgttgctcggttacaagaatctctctctctctctctctctctctctctctctctctctctctctgggcgagatgatgcgacggtgatggcggtggagagtgacattttctccgacgattgagggtagaaatgaggtggtctgtatgttgtatgagtagtggttgggccagattcgtcatttgtagagccgctggtcacaatatgcgctgagtaatgattgaaaccggagatccatatccacctcaggagagtactcgatgaaggaatcttgtaatgtgtaagaatctacttcttttatgcagtttatcattatttaatttggaaaatttgatgtttgttttaaggttctttgaattttttgaatttagggttttgttttgtaaattaggattttttgttctaagcattgataaggttttttttaaataaattggaggctatgtgtttgttatttggcatgattgaagtgaggatgagtcgttgaatgtttgtttagagttcatagttatggataaacaaattagggtaaattgaaaaccatgtgggtttctttgatatttttttgtcaggattgaatcgaattgagtcattgaatgtttgatataaagtaaatagtttctgactaacaaattatagcatctttaatggttgaagttgaatatatttggggattctgttatagttctttgtcatgattgaaatctagattgattgtttttttctagattgtgtcgaataatcattctctatttggaatcaataagcagtttgaaattgatatgtatatctcttttatttgcttgaatcaatttgaatttttaatgtatgatgtgtatgctaataagaattttttgtgtctgttttggtgagcttaaatggagtgcttgtttatacgaatgtcacaagtggagctgacatagatttatcagctagtaaatcaaggtacagttcaaagtggttgttgttttattgattgtcagtttgagtttggtatatagttaagtgtatagattagttaactgagcatcaaaactaattgtttttactgttatctgtgattaatgtttggtaaatgttgatgaggacagtttttttgagataaatgtttggtatgttctttgagataaatgcttgttatcaatgcttagttggtttagattaggtaaatattgttatcactagtgataaattcatcttcattaaacaaagtctaacattttcattcttcttcaaccttcagttttctctgaatgtctcattttaactcccacaaccactaaaaaatggatgatatgaatccattttatgagttttcgagtttcatcaaactattgcatagtaaacaagaagacatcaattggtatgcgagttgatcatttgaagtcactacctttagtgcacaattatctaatgaatgaagtgaagatgaagccacattcatggtaatgcaagttcccaaccaatcaatgttgaagatgatggaataatgagtcgcctccttgtgtgaaggcaacaaaagcgaaaggaaaataattatccactgttaaaggagaagcaggccagtcagtggaataatttcaaagtttatggaagtttaagaagaaggattgagatagcaaagagaagcacatcaagcatcagatgcttgaaagtctactttcaagaaccgatcctctattagacattaacttggccctaaagaataagctaatcacagatttttggtcctaaattttaagttttaatttggagctccttctttgttaaatgtcttcattagttttcaatgtctatgtagtctattgtctgatgtagtatgattatatatgatgttgttttagtgttgcacttgtatgatattgcattgtaatgtatgatatgtattttgtgttaatgcacttgtcttgatatgtcacaagttaatatttcacttgtccgcatatgtaacttgtcttgatatgtcacaagttaatatttctcttgtcttgatatgtcacttgtcttcatatatcacaaaaaaaaaaaaagaattcttaaaacatcacttattatgaaatagagtgactttagattttggaaccaaaataaattattttgaaacaaattaatataacatataaatatgtactaccaaaaaaaaaattacatcgcttattttatatatttgcatcatttataattgaggcaaattagttttaaatcacttatataagtgattctacaagtggtggtgcaaatattttgcatcgattagtgtactagtattaatatgcatcagtcgcaaaaaggtaatgttatttttgcataagttaatagaaattgtgttagtagtggtatcaatttaccaaaatcacattaatatttacaacaataataattggtgatgttaagggtttatatcaattccaaataattaatgtttaattaataaaactaggccagtgtagcacgggtattcatgctgtagttagtttataaattttacttatgtatatattacgaatttcatgtatgtttgtctgtaaatgtttacttgtataatttataaattttaaaattttatcaatttattattggtatcatttaaacatagatactattaaatttattacagaattgatgtgtccctttgtatatataattatatatttagtatatgtatttgtatacatggtgtatccggggtatagtgtattttttaacatgtaaattaattataaaatttgaaaaattaataagacaaatataactttttattaaaatcagaattatagaagaaacccttaaaagaattattaataaactacatacttctttaatcgtatataaaaaagacaggattaaaaaaacgtaaaaacaatggtcatataataattattgcataagttagtgttaatatgcatcagtcgcaaaaaggtgatgcattttttaaattaattgatagaaattatgttagtagtggtatcaatttatcaaatgacgttaatatttacaacaataataattggtgattttaaaggtttatatcaattttaaataattgatatttaattaataaaataatattcaatttgtttgaaagtatattatttaatttcattaaccaatataaaggaaaattattaatttttttgagtaacagttatcacaaccaaaaaatcaagtcactattttcaaaaattaataaacaattgtggcatgcacaagtttttacttatagaaatgaaatggaaaaaaaaaaattggtgaccttcaacgtttgggtcttttgcaaaagtagccattttggaaaaagtaattaaatttctaacacaataatatgagaaactgaataagtaacatgatttgtatttaaaaaatctagtttgtccttttcattcgttgtaggagggcgtgtatgagaaaataaagaaaggtaaagaagatgtatgtataagagtggaagaagagagagaataatgatgacacgacaaaattgatattatccccaaataatttcaatgttgaattactctcataaaaataactagttacatcttctaattttttttaataaaacatatattttttctgttcataacatgatttaaaattttgaaatctaatacaaattattcaaaatagtgaataatatttgactaaaatacacaaataaaatattatagaatgagaataaattgtatagaacgaacattacactaacaaaggatcgagttaaaccgatctgatccaaaaaacctataccctatgagataccacattggcaacccaagaaaccaagaaaaattgtagtggtgttgttgacggtagcggtggtagtggtggtgacggtaacggaggtggtgatgatgataatggtagtggtggcactaacagtgacgttgacggtggtggttgcggcgatacggttgtggtattgacagtgaaaaatgatggtgagttggtggtggatgtgatggtgtaaaatatttagaatagttatgatatgagttggagttgcagaaaataagttgcagtaaaaaaaattaagtataggaagaggaagaatgtgggttacaaatagaagttaaagttgtctttattacatatattatacacaatattgtcttctaatttttgaggtgttagttttcaaattattaaaaaaatttaggttttaattacaaatttccctaaatgttttggcgaagagagaagatttggcttcaggatttacgtaggtttttttgctgatgtggcatcatagtgcttatcttgtctacatgggtttcttaatatcgatttagcccaaaacacatgtaagtggttctgtcgttatcctttgatgtagtgtgtatgggcttcttaatagcatatcagcccgacaaaccacagcccaacaaaacgggcttgtcattaaatgatgtgattatgtagcataattttagaaagtttgtgaacgctgatgtagatggtttgagaagcttcaatatgcttcttttagtagtgactaggcgagtgcccgcgctacgcgcgggtttttgttgtagattttttataaagcatcttgaatctttaatttgtaagaaatctttgttttttctggtatgtggttggattgaatcggatgatcagctatgagactgattaccacacggaagttgatttgagtaggccgtgacggcttccaattgatttatatagcaatccgtaaggtgtttttaaattttatttttaacgtgtcatggcttactaaatcttgaaggtgatatgccaaaatgatagagagagatgtttgtttggtgtccgtcgagttggttattgtaattttagattttttttaaaaaaatagaaagaatctaaatgcatttatttgtaaaatgtaaattcagtagttgttctaaaagaaatcaagctatgtagtttactttttctaaatggtctgagatagatggattcttattccaaacatatcttgtatcaataattctatcaccgtccaatttgacacaagtcaaaacaattgtgtgtctactaagataaattatagatttttccgtagcgtaccttgccaaatcctgtcatccccatcttagctagaaggtacaaatcaacagcccatactcctaaacgtaactataggaagccgatttctcagttgtagtagaggatgaagcagcagctcgttaagtgatgttgatgcctttgttaggttgttgatatcccaaactccaattccaaatacgatattcaattagaaagatgatctgattgattatcaaaacaattgcttagtcaaagtctcacaaagaactctcacaacatcaaagcataatctctctaaatcgatatctctccttatttaaactcaaacagagtttgtgaaagatatttttagatcctaagaatatatttttcttcaagcaagcttccttttcatgtgtctcctcacttgcacgtgacttcttttgctttgtctctcattcacatgatacaccaatatcgtaccacccttgaggttgcaaagctacaataacagtacttatattttgtactcaacgataatgtcagtaataataatatgaaaaggaaatattagtagtaggacccttcaattcatacccctacctttgtatcagtttctgttaatctttgttgtatgcctttggcgattgaaaagaaaagatttataatattgaggtttgtttttgcactctgcatctctttagatcacatcgttaatctaaagaacacattaatgaaaatggcatatgtgttatgtttttatctaggtccccgtcttaaagaatttgattctatactcagctaaagcttagcccttcattgttggggcaacctgaagaagaacaccatcatcattatcctacaacctaaaaatcaagaaattaaactaagcattcaacttaagaatatatacccttttgctgtcatcaatgtcacctttgtaccaaccaatcttttattaacattatctgaggtacgttgctcgaagttcttcatccagttcctaatgtctattgaaagaatcgtattcaattaccacaagtctgatgacaatcccattttctaaaaatgtcattgtaaaaatgactttactttctaaaaatgtcattgtaaaaatgactttacaaagtacaaagaatatcaagacacagaaaaaaagacaacgacatattgttgaaggatgactcatctcttacattgtcggcatggagtatacccatcactcccttgtaataatatgctgcaagagaaaatatggttaaaaacgttttaaataaactgcataaacaaatgaattatcttttacttcttgacagtatcaaaatattcaacttattattgagagaagagtggggaatcaatcaaccaatacaagtagaagcattagttagatataagaatgtgcatgcatagtaaatatcgttcatgacttctaagcaacaacgtcaaatcagccttattagttatggttatagtatgaaaacgttcttgaccccttgtgtcctataattgcaacttgatacacttcccatcaagtgcaactattcttatcttcaagtcaactgtagaacttagtcacacaaatcaaacaaattacacaaacttagtcgcacaaatcaaagaattagacaatctaaagtaagccactattgcaaaagtaaacatataaaatggtaaataatgaaacttgtagtcaaagaacaacttttgcatgaccaacgttttaacacaaaccataaaatctgaaattagtacaacacacattagctaatctcttaacaaaaacaatcataaacgaagaagacagacagacaaaaccttgaacattaaactcttggtgctactgctcatggtgccaagaaagtttagtaacaaaccataatcataaatcttgggaaaagcggagggaaaaccccaaaaaacaaaacataaaaagtaaaaatcataaccttaagtggtcgatgacaacagagcattgtcagccaaaagttatgctctcacgagtactcgtgaagtcacaaagagtttgattttacaaatccaacaaatcgatcttgcgccatttgacttcaacctattgttaactcctctcaggctacaacagaaccaggaaatccacggtatttcatcaagttccaaaaaactcacttccaatccgccgattaaggttttagaagcgaccagtaaaaccaaaggaagattgagaattagaaaaaagattcgacagtgatcgactcaagaatcattacaaaagaaggcggagttaatccaatggatatgatgactaaaaaccctaggaacgatatgtatcaattgaaattagaacctacgttttgtaccttctaaatgcgagagtcaagtcctcttcgagtggtcgctcttccaacacgctttcttcttaagaaaatcgagaattaggatcttaacgcattagatcaatgggttattaatggagaaataggatattgttattgaacggatataaggaagctttagagaatcaagtgtttgagaaaagagtgactaagtcttctcgccattggatttacgaatcgttgggtgatcgagcatgccgatgacccgtgaaactgagaattagcattggagcatttatataattttgagagttgaggtgacggtctccaatgtttaagcttcctagcttctcaaaacattttacgtagaagaggaggcgagaagttaaagagttatttcaaaaaaaacatgtgtcattttcttgtgtgctgacgtgtcattctctgggagagagttaaccttcattcatatatatgattaatgagaaattaataaggttaaaataatggatttaaagaatttaatttaaaagaccaacaaataggtaagcaatagctaattcgctctaaacaatttctcccaggcacaaaaactaaggtagccgcaaaccttggtcgagatgagtttccttcaccgctattgctcttccgactgccttcgtccatgatcggtactactcctaaggtgagatctctctagtgaatctcattttccggtgacgttaaagttttcgagcgagcctttcacttgagatgacttctctttttctgtcgaatgcgagccattctcgtcgcttaccattgtcattggtcggtttcctcctttagaggtcacctcgtgcaccaccaccggagccaccatctccaccaactccaccggaaccaccatatccaccagactctccagctttgattggtaacacgcataatcgcataatggccttttcttatgcgagtatgcaagaacttggccaatcaaaaaaatctgcacaattgtgttagaaaacgaaaaacgcaggatttgtattttcgcgtaaaattacaagtaaaaatttattatgaaaaaagtgggtatatagttgcttatttgcataataaattgttattattctatacatactaaatattagcaattataaaagaaacaaatataattgtttacacaaaaataatatcattaataatataagaaaacatattcacaaatttttaataaaattttaataatcttctattttttattataagatattacttaaaatttatttaaaatattattttgtttattaagtataaatatacatacatatgtatataaatatattattaatataatattttagtctatcattttgcaaaatatatccaatcaacatatttttaaaattatatcattctataaatttttattctgcaaattttcattatgcgaattgattctacaacttatattattatgctattatgcaatgttaccaaagagagcctcagatctgcttcacttttgttttttcttgtgatgagctgtcaaactccctttccctcccagcgtttgacttgctcgtcctccatctctcctgcgcaatcaagcaaaatttccctttttgttggactctacttcacgacaagtttggagatcttgaagctcgtctttggtcgccctcttctaccatagagtcttttagtgatgttcactatctcgccaacgccaccatcttactctccgtcctataattcttctaagatggaagcgtttggatgttggtaaagtttgtggccttggttttgtggaatcttgatgtagctcatttagttttgatgggcttggatacttttgtatctacacttgtactctcttgtagcacctttctcgctttgatgcgatcatttaccgtaataggcagattctttcttgatttggctatgttaaaagttgtttcgtcgcagcttcgacacagttctttgagttcagacaactgaccagtttttctagttcattgaggcttctatagtcatttctcctttatgaagctttttattgtgtttagtgattgtatgacggaaagcattgtgtgcaagactgtcctgcttaaagtagaagcgaggattgttgtttaagactggcctctttcagcttttactgattgtttgacgttagtgtctttggaggcttcgtttcctcctcattgtggtttcgacaaggccttccaagctaaagattgcattattggatgctcttggttattgctcttttgggaggatcgaaaccgggttgggagtttcacccttcaccaaagtttcccctacccctataccacaaatgcttgggctattgtcacaaattgtcaaatatcttaattttgtgattgacgttctatacatatttttcaacattcttaagtgagtttttgttttctatttatttttactgaattattttttgatatggtgttaaaaagacaccaagaataaaaaatgaaagaaaaaagattgatgatcaagagaataaaaaggaaagaacacaatagaaccaaagttttaaagtgcacatatatcttccaattaaagatatgtataattagttttttttgttaataatttctcatgttttcgcttcgttccttcattttttctgtcattttgttatgctcttcgaatcacgtctttgtgttttacgaatcatggtcgtaaagaatctaaggatttagttttgagtttttcaaaatgtgaatttttaattcaaagagcataacaaaatgacagaaaaaataagacgaagttcttcctggaaataattaggtcaccaggaagctgttgaaggtaaaatccaccatctttttggttgtagcttcgattgaagttgaattgttggggaaaaatgaggaaattaaatttgggggattaagttcaacatatttcctctcatgtttagattgagtattaccaaaatgagaaattttaagaatttggttactctgttttatcatttatagattagcttttcaggatttgtgcatattttgccattaaaagtttcatatttaaattatttttgacatttttcttaaactttttatgagaaagctgaaaattgcgtaaatgacaacaatgtggcttattacactatcaattatcaaatagtgtaaatgttatgaaaaaattttagtctatccttaattaatatttaacatcctattttatcgaaagtacatttcaaaatataaacatttcgtatgcgtctgaatgaatacagaatttcaataaaatagacttgaagaaatagaaatttattggatatagttacttataaaaaccttgttgcgagaaaaaaaacaaaaaagaaaaaagcgttacacacatagttagatttaaaaaaagaagtaaaacagtctaaaatttatataaaattattgtaaaaagaaatgatacaattatttctgtcattttattgcaattttttctgtccacttaaatatattcagttccaaaattatcaaaattaattataagataattatcttagtataaattaaattaggaaacgggttacgaatcctaagccccattttgacttgataaaacaaaataatttcattagtaatctataacaaactcggaaatctatcccctattcctagtaatcagcttgaatatagttacatacacactgtgtgactgactttttccttttacttcttctctgcaacgaatatataaacactatcaaaagcatttttcatttcctctcaaaccaaagaacaaaaaatggacgtcgaatcttcatcaccatcgtcacatgctcttattaagaaggagaaaggaggatggagagctatcaagtacattattggttcgtttttactatcttaattgatgtttttttggggtttaatcttataatatagtgttttattcattcgtttttgtgaagcaaacgagtcttttgagaagctggcctcaatgagcttaattgggaatctatcggtgtatctcatgacaaaatataatcttggtggtgtcttcttggtgaacgtcatcaacatatggtttggttcttgcaacattcttacactcgctggtgcttttgtctctgatgcttaccttggaagattttggactcttctactcggttccatcgcctcctttatagtaattttcctttcctttgtcgtatttttcatatagtaaattcggaagccgaaaccaaaagtgtctttcattgatagggaatgggaatatttgctctaaccgctgctctcccgagtttaagacctgatgcttgcattgatccatcgaattgttcaaaccagccggcgaaatggcagctcggggttctattctccggtctaggtttactagccattggagcaggaggagtaagaccatgcaatatcgcatttggagctgatcaattcgatacaagcactaaaaagggcaaagctcaccttgaaacattctttaactggtggtacttctctttcaccgtggctctagttattgcactgacaggtgttgtctatatacagactaacatcagttgggtcattggtttcgtgatccccacggcttgtcttgcactctccatcacaaccttcgtcattggtcagcatacttacatatgtgcaaaagctgagggcagtgtgttcgcagacatagttaaggttgttactgcggcttgcaagaaacgtaaggtgaaacctggatcagatataacgttctatataggcccttctaatgatggatcacccaccactttggtccgagacaaacacaggtttgtaattacttacattagaatgtttatagttgatttggcctttgcatatatcatcttataaatgaagttaaaataatacttttatcttatgaaccttagaaaacaagaatgatttaagcaaaagcttcccttcactccaactctctcttagagaattaggttaattgttggagctggatttcttattaatcaatagagactcttatataggtcttcatacaacttagacataacactaatgcataaaagaaaacacttacgtataaaggaaataatgaaatcccaaatcataaagtaaaccaccacaactaattaactaaaacgtcctaaccggtggcctaatctacctaattgtatcatttttaatatttaaaatagtttgttgatttgcatcttgtaaaattgttttttcctaaatcaatccacaatttttcagacatgcaaaaaataaattcattaatgtaaattttaatgttaaaatatggagattacaacatacacgctagacgctacaacatacacgctagacgcaaacagtttatgtttgatgtttgcatgaaatatgagtgtaatatagtttgtgttcttttgatgttttggtgtgacagattaaggttctttgacaaagcatctatcgtaacgaatccgaacgagttaaacgaagacggtaacgcgaagtacaaatggagattatgtagtgtgcagcaggtgaaaaacctcaagtgtgtgacagcaattttaccagtttgggtcacgggaatcgcgtgtttcatactgactgaccaacaaaacatttacgggatccttcaagcaatgcagatggataaaacgtttggaccacataacttccaagtcccggcaggatggatgaatctcgtctccatgatcactctagcgatttggatctcactttacgagtgtgttatcataccaatagtgaaacaaatcacgggtcggaaaaaacggttaacgttaaaacatagaatcgagataggtattgctttttttttaggttaaaagatttacaagatcatagtttagtttctttgctttatatttagttttctaacattctttgtattaggtatagtaatgggaatcatttgtatgattgtcgcgggtttccaagagaagaagcgaagagcatccgctctaaagaatggctcattcgtgtcgccggtttctattgtaatgctccttcctcagttcgctcttgccggtttaaccgaagcgttttccgcggtggctctgatggagtttctgacggttaggatgcctgagcatatgagagcggttgctggagcgatcttcttcttgagctcgtcgattgcgagttacatatgcacacttcttataaatgtgattgatgccgtgacgcgcaaggaagggaaatcttggttaggagacaaagacttgaacaagaacaggcttgagaattactttttcataatagccggcattcaagtcgcgaatcttctctattttaggttatttgcttcaaggtatgccactgaaaacaaaaaaggacactaaagatgtttagataagacttcagagaggttaggttttcagtttctttttttttctttaaactacctgagacttgttttccataagaaaattagattttcaaaggatgttttatgcaaatttttgtgtattcatttgatagttttataataccatcaaaattctgatgttagtcgaaacgcttagtaactgttggtttggtaaaattattaaactagctctaatataactgactataataatttgtattttattaagaaattattttcacggcgaacacctatttgagtttttcttccatgaattagcaaagtgggttaggccttccagcatttagccatttgagcaaaattagacgaatttgcccttaaacgagaactgctgaaactggttacttttggtttcagttttttgttttctctctctttaatgtcttataatatatttttgttaaacaaaatttttttattgaaaaacagaagaagaaagagaaaaagaatcgaagaagaggtggtattaaatcaaaagaaaatttcacgttataacacccttgtcactttttctttcacaaataggcaaagtgggctgggtcaaccacgttttagccattaggcccaaaatggccgaatttgccctccaacgagaaactgacggaggcggtttcgtttcgtggaaccggttcagtttccttaaccgttttctggtttcaaaataatttaaatatttaaaattattaattttaaaactgaaaataaatcaaaaactgtcttcttcgagaaagcagaacagttccgtcgaaacgaagagtggtttcgaagaaccagagaaattccgacaaaactgaatcacaattccgattgaggctctgttcgagttctagtcgttgctaaagtggagaaaatttcgatagagttcgtgttaaagtgtggaacaataatacgctttttgggtttatcgattaactgttcatagaagagctctaatggcggcgacgaggaagagtagtcggcggcgaggagtttcggatattgatgaggcatcggcggcgacgacaaatctgggttagttttccctaacttcgtttggagaatgattgattcaaaatctaggttaattttagagatttcaactcagaaattttcaattgacaaagggattttgtttttttccgccaaaaacagttgattgagtataaaaggtttcggtgtacgtgtatatgaaaatcgagtttatgttagttggtatttggatatagtgtacgtgttaagaacttcttcgtcttgctcaactttcaggaagtacttctaatgatccgggtgaattaccacagaggttgtttgcactcgatcactaccctagcaaggcgaagataaatgtgtactccagagcggagtacattggtcaaatagcagctgcgcttaaggacacaccagaaatgacgttccttctagattctccattgggtgacctctttaggatccctactaacaaggcatccttttctggtaaacttgttcttggattaatatgccgtcagttagttacaaataaacgttatgagatgtggatggtattcgctggtcatcctattaggctcggattaagagaatggacacttataactggtttggaatgtggaacctatcctaaagataaggatgtagaaagtgttatgcagcgtgaggaaggtgaaaatacagtgtgggctactctgtttggagatgataaagctaagccaacagttgaagaattaagggatagattgatttctgaaactgacatgcctgcatggaagaaattagctctcgccctaattatcattgtggatggtgtgctaatatgtgacaagtctcctcctttgagaccaaatgagatgacagttgagctgacgaagaaccttgatttcttctgtaaatatccctggggaaggacatcatttctgcttactttggagcgtatcgcaagtttcaaaggagacaccgacgttaaaaaactccggagtggttgcaagcaacattcttatgcactccatggcttcccacttggactccaactccttgcattcgcaactataccgtctattgctagtctcctaccttctgaaggagataccgccgtgtttacagagaggactattaaaaacctttccaaattgcgtccaatcaagacatccaccatattggcgtgcgagtctgctgaacaggtttgtgcagttgttgttgtacgtacattggtataaaaaatgaagtacatacactctgaaattaacaatgatcgtctatgtaggtggatatcacatatattgtggacccagcagatagtaattgcccaaaatcttttgtatggaggaaagaaaaagaggacccaagagttgataacattttaaggatgttgaaatctgagcaggagtggaatgaaaaaatgtgggttggaggcgatgatgcgcctaagaagcaagtccggccctcagcaactggagagagaggtaaccatatcttttcatcgtataacttatattagaattaggttcctctaagagtagtaatgcatgatttaaccgtttaatatagttattttgaagaggcaaagacgggtgtcagatcctgttgaaaacaaaaaaaaggaaaattagtcactctgatgatggtgaaggtggacccagtggtggtgatggtgaaggtggaccaagtggtggtgatggtgaaggtggaccaagtggtggtgatggtgaaggtggaccaagtggtggtgatggtgaaggtggacccaatggtgctgatggtgaaggtggacccaatggtgctgatggtgaagttggagacgaagcgttcgataagtatgcgggcgaattgaggagtttcttcaagaggcaaacacaacttttggataaaaagtttgaagatttaaaagtatttgtccgtgaagagatacgtgctgctctacagtcccaggaccgaaaggaagaaggcccacgatcatctcacaaatctgattcaccatctgagaaggttgagagggtgaccaaaactgttgagaaggtgaacaaaagggttgagaaggcgaacaaaagagttgagaaggcagctgaacaggtacagagaaaatctgtaaagaaatccaccaaaccaagaaaatttgttccaagaagatcttccaggttgaacaatactcccaagaaggctgcaactggtagtcttcctgttgaggtacgtctacagcatgtaccttgtgtaaatacaatcgaaaaaaggtttttattatgtgtacgtacaaccaaatacttaggaatgcgttatattggtgtttattcacaggaggtaccaggcaatgatggggatggcgaagtttcagcaaaacataccgtctctgactatgatatggaaaacatatatttgggtggagcatcatcaactgaagaggtaactcacttgtgtaatagtcatgttataatttatgccttattatacgtacaaaaagaaatattactgaccaattgtatggttttgatttcgaaggaggaaggagggaactcggagattgaagaagattcttcaaagttacaccaaaatgtatctgactctgtaatggaagacaatgtcgatcgtgttccatcaccatctcaccaggtaacttgtgttcttattatttcattattgtatgtacaaaatattttatgttcttaatgttcttacttttgacataacagcccgaacatggcattcctgatggtggtaactttgaacaacttttgcctgatccaatactgtctgacccagcccttgagaaaatgtcagatgatgtatcttcctcgtcccatcaggtacagggtacgtactactaatttttgtgtacgtacatattatttctaatttgtatgctttgcatttgtataggacgttcagaaaggacttggtggtaatcctgaagaagaagttgttgctcctgagtcacaacagttggaggagccacaatcaccggaggtcaaggttaggcaagaatttgcttttgaagttacagaagatggcaatcccagtgtacgtacaatgtttttgaaatctgtttcgcacctttgaatgttttgctgtgagtttgactaatacaatggccatccatctccatataatgaggtcaggctggaacaatttgtggggaaggagaggaagctttgaaggaggataaatctccaaccgttgtagatgaagccttggaggtatgtgttactattttgctctttgtaacgcttatttgccaattagagatataaccaattatttggttactaaatatgaaggacactgcgttacctggatttgtttctccgacgactgtaggggattttaattatgaagcgaatctcagtgacccgtcttcaccaaccgtagttgttagcaaggtaagttcctaactaactataacattaaagtcggagatatcatttgatgtttgttatattgttttcattaggtgcttactcaattgaaggacgatattctcgcagaaaatgtatctaaaattcctgagaaggttgccgtccctgaagaggtaatttattagctaactattaataacattactgtcggagttataatttgatgtttgttaaattgtttttattaggtgcttactcaattgaaagacgatgttctcgaagaaaaagtatctgaaaaggttgccatccccgaagaggtcagtatattatcccgtgtacatattaatatttcaactagacgggcatatagtgtacgtactcttgtagctgtttccatgaccaatctaattatatgattttgtgcttgcagacaggaaaggaggacgatgttgtcgaagcgggtgtctctaaaactgaagcaatcgttgctcccgtcaatgagaaagagaagaaaagtgtaagacggagagttaccttctccgatgacaccaaaaatgatgataaaaaagatcctgatgtaacatttgttgaggagagagaggcaggcccggaggttttggttaaggctggcgattcgttgtacaatcctttggagaaggttgacgaagctaaattccagaaattatgtactataactcaaggagaaaaaaggtatgcatctgtgcattcacacaattatctgattgtttgtcaatcttatatcaatcctaactatttcatatgtcttactaatttcaggtgccatactcttttcggctttcggaaagtggacaatgaattcttcactactctagccgaggctaatgattgggttgtcattcaatgtaactgtaatttccccaacaatatctccatccgtggttattaaatgagaggaagaatttgacctcttcggagtatctcatttctaagatggtcaatcccactatttcagacgacttgctcgctatgatagctaagaaagtggcagacaaaagctggttggaccttaagccactgatacgatccggcactcgtggaagagacattgtctaccgaccggatgtccttaaagacgctaacatctacagcttgtgccgtgttcccgatgatttccaagtaggaggtggccataatccaaccggaccccaaggagaaggccgcaatcgactatttttcaaaaggtgccttctcgctaacaatccgacggctgtgtataacgaagcaatacgtgttctaattcatgaaactgacatcaatggagcacttaagctcatgcagcgtcatgcacccgtccgagcagatgcaaccatcgcctgcgccatcatattcatatgtgcggggtatgattatatgggtgggttgtttctggacctctacacacgcaaccatcatccattggattccgatttcacacgagatttgtgtgaggagttcctcgaggagataaacaagtttaacccgccgtacaataatacttacgctcgttcgttctgttatcccagcagccatggaattaaaatgccataatgcgcctaccattgtttcatggtttctggtgcataccagaacgtttgcaacaagtgttacctatgatcgtgtgctaggcgaattagccgaattctctaggtctctcatttgtacgtgtgtttggtgtacgtacactgtcacgtgtttcaagtttgttaggggtttggtcctatgtattttgtttttgcttcatccacaatgcgcctattatgttgttttgtttccgtttcctttaaattcctatttacaacttctgtgtctttttcatgcggtttggttctatctgtcatgaataatatatttctgttgtcaaactaaactggtaggtgtacttgcattctaacaagtacttacattataataagtacctatattctaactataaatgtaatagtaaatgtaaggatatatgtcagtgaattgaataagaatgtcagtcttattcaattgacgtgccaggcgttaattaataaatacactcccacttgtcataattgcaagaactttagtcttattggaaatatacgtacacgtgtaactccttattagacgtacatatatcaattatttaatttaatttccttcggattagaccgcaaatatgagaattatatatgtacgtacactgttactctatacgtacacgtgtaactccttattagacgtacatatatcaattatttaatataaatttccttcggattataccgcaaatatgagaattatatatgtacgtacactgttactctatacgtacacgtgtaactccttattagacgtacatatatcaattatttaatataaatttccttcggattagaccgcaaatatgagaattataaatgtacgtacactgttactctatacgtacatttattggcaaatttattgtaaacgctatctccccatccgttatcctccctcctcggttattaaaaggacaatgatctgacctcttcggagtatctcatttctaacatggtcaacccaactattcctgacgatttactcgcaaagattgctaagacagtggcgcacaaatgctggtgggaccttcagccactactacggtcaggcagacgtggcagagatgttgtttaccgtccggatgtcctgaaaggtgctaatatttttagcatgtgtgaggatcccgacgactaccaagttgatggcagccatcatccatccggcccacaagaagaaggccgacatcgagcctttttcaaaaggtgtgtggatgctggcaatccgactgccatgtattttgaagctcttcgtgttttaacgcatgaacgtgacattaaaggagccatcaacctcttacgacctcatgttccatcacaagcccatgctacatttgcttgtgcgatactttacataattgacgggaatgattacatgggagccatttttctaaacctatttggacgcaatcattatcctttggggacagaagagacacgggatttgtgtgaggagttcctggaggatttaaagaagtttcgccctccatataataatacttacggatcgacgttctcttatcctaacagccgtggtattaaaactccagattgcgccttgctttgctacattgtatctggaccgttcaagaacgtgtgtaactgttgttacctctggtggtgtgctaggcgagttagccaaatgctctagtcatataaatctactagttatttgaagttgttatttaatgttatcgtctaagttatgttcctagttcttctaatgccgttatgtttctatttcgttttatcctctatgcgtgaagttgttcaagttcttgtaatgcttctataaagttatgtttcaatttgtgcttaacctctggtttacaaggtttatcggtttaagggtttattcggatgtaagcaataaatttgaagtttcgtaatccatacttctttctgtacttacattataactttaaagttactataaatgtaggaataaacatgattggattgacgcaaaaagacagttttgtgatagacgtggccaggcataataaatacaaatttcaatatagatgtgcacgtgtaaatctgaacgtacataaaccaataaactcgaaaattgtaatttgaagtttcggttttaatcggaaatagtttatagtttactattttcatgtaaacacgagttaatgtccaatattaataccacctacaatatgtaagtgggacgtgaaacatttaattagttgtctcctcgccattaggtctatataacatgtactcctcgacaagtcatcttctccacacttttcattgctcttactacgccatatataacctaaactcacaaataaatccctcagtctcggcaatggacgtccccacacccccaccggcggaaatttacctggccattcagctacctaacccactcagcatcctcgtcaactacttacccgtttccgtaactcccattgaaacactcagaggtctcgttagcacgctggagccgaccgctatcaacatggatgagtttatgacgtggcctgatttcgtgttgccggaaacacctttccgaacatacttcaccctcctgcttgaacgtggagcaaggccggcgatttaccttgaaggggttcgtttagcttgcaatttcgttacggttgctcatggtttaaccatgttgagttctatctcgcccatcgacgcttacgcatgtttctctcatggtctgttcctcaccgcaactggcaacggacgagaggttgaagccgtgaacgcgactttctgggatttagtgccatcattcgaagctgcaaacacagtgggggagttggttatgtatcacataagtcgactgcatgctgaaggaactcgtttgtggaatcgttcatggaggttcgtggtttcaccagactgcttgggtcgttgcagctacggagcctgctgccgcaattgcttcttctactggtatgctagggagttgtgcatattttattaaggaaaggcgttcgttcagcatctgatttcccattctatgcatcggctataatttcgtgttgtttgtaaagcatatgttttcctgttatatgcttcggctttattaacatggttgtatgctctactcggtttgttgttatgctttgtatttcctactcttattttaacgtttttttatttccttgttttattgtttatcttatgaatggaactaagtttgtttacattatacatatagtacacctatttgaacgtacaaaaacataattgtacgtccatggaaagtcattacaattaggctgtatttgtaataagtaaactgtagcaattagaaggtaaaactttagcataaaagtagggatatgtttaaattcggttacaaatctgtagttatttagaataaaagaaacaacaattaactaatagaccacgactctgatttcttccacttccggtatatccggattagcaatgactttggagatggggccattggtcacagccttcagtttatgaatcccggttagacgccaggatacgagtgcgataatgttttgaggaccagttagccgctggaagaatctttgaaatttgaaagcttggtcattttgtgcttcacattgaagaacttccttgctacagagaatatatattatacacaggatataacaaaccctaaaccctaaataattaaaaataaacaacttactgtttatccattatcttaaaaggaagcttccgtccacggtagtcttcggtcaagttgccaacctcaatgagcgcaccaataacatctagtgtacgtaatggaagataaaagcattatgtgtacgtacatatttacaaaaatgaatagacagtcaaatatactaaccgactaacactccggtagaaactgtcctctcgatgatgtagtcaaaaggagtaaaatcataatacggtattgcaggcaatcccgatactttggtaacaatggtctgatccataaaacagatccggtagtcatgggacgttgcgtgtattccctcgttgtggagacgaactgagaaagtattgataactatccactcattttttcggatacggtcagagtaaaatgaagcaaggcgacgattaatggtagcctctatgcgggaacgcattccctacaacaaatcatcatgattagggacatgtacggtatgtgaaagtaaaaacgttagaaagacgttgacgaaatattactcgattatctgccaagatgagacccaggtcgaactcatttatgcccacgcatttttgaaacaccctgaccacaaaagcgcgtatactccatcctgtgatcatgggacaaagttcggaaatggcatgatatccatcatccatgatgacaacaacaaaaaccaaaatgaccgactttctgtcttatgtgtgtgatgggtgtggacttttgtttaaatgaattaagggtgttatcaccagtttcttaaatagattttagaaagacgcgatgattggtcccaaattgatgtaacagtatagcaaaaaaatgtaaccgtcaactatgtataattagaagtacccaatatacgtacaaatgaaaacgtttaccaaaagtacgtacagaaaacaacgggattgacaaaaagttgaaggataatcaaatacaccgataatacgaggtccacttacgtacgtacataaggtaacgtacagacaaaataatatgtcatattactacatagactgatcaaaagatttccaaaaacgtacgtagaacagcttccaaaagtacggagacgtaaactctaaccatcgcgaggcctaaatagggtttttgcatgtcttcttgttatgccccgtttgccgacatcttgtacactgattaggaatgagtcttttctgcctctttttctgaaagttaaaaaatggtaaggcgcctaaaaggaaggaaaaattgcatagaagtgaggatgggggaaaatcttacccggttttccccagtagatggtatcctcttggtgggtggtctcccaggtggtcgtctgctgcgtggaggtatgagaatcatgtccgataactcttgaggaataacaacgtcttttgggtccggtataggtaaaacgggttcttggaaagaatcagaaaacacttgaaggctataccacaatccaacaacagccttcgggttgatgccaaaatgtattgcagcagctagagcatgctcgcatgggattcttaaaattgtgtacctaagacaagtacacgtacactcatctaggacaacgtgaaaatgctcaccagtctttgaagtaacttgataactccaaggcccagacatcatgactgagaactttcctaacgcaggcaagtcttgaaggaaacgttcatctacctccggggtgaccaaagagttacacttcgacacttttttccgccttgctgcaaaccatcgcatgatgacctctcggatgaactctagcatatagacaattggatacgcttttgccttgcttaagacattgttcattgcctcggagttgttgctcgtcatgatattgtaccgctcccctttgcagtatgccctagtccaatgctcaaatccaacatcctctaaatactttgcgcatccggggctccgacctcttaactcttcaaagtatttttcaaaatctctaacccgatacgctttagcggcgctaaagaataaaccagacacaccgtaccttgcgtaagacaccgatatgtttcgctccaggtgtactatacatgctccatgattggctttcgggtacaccacactaacgcctttatatatggaagaatgcttgtccgagacaatcatcaaatcgtcagtatctggaacaatctctgataatttctcaaagaaccaaatccatgaagcatcggtctcgccgtcaacaaccccaaaagctaatggaaaaatttggaagttcccatcttgtgcacatgctataaggaggcatcctttgtaacgaccgactagctgcgttccgtctacaacaacgactttcctcatatatttccaaccttttatagacgccgagagagaaacgaatacatatttgaagcgctggcgacctttatcttcaggagtggagtggagatgacagattgtaccgggatttgctaattgtaaaagatacagatatgtaggtaaaaacctgtaactagccatatcatcaccccttatagagtttactgcaacctctctagctctccatgctgaagaatatgagatccgaacgttaaggtcatttaagaccaatcgaggcaaatctacagctctaggacccccttgcgaagaactatatctattcttcataacctcgcctaaaagcttgtaagttgcatgtttacgataatcctttcgagtgtcgatcttgcaaacatggatggatcataccctgtgattttgaaacatttggaattgggtatgacatgtgcagtcaaatgccacgaacaattgcgatctacgcagaacatctctaatcttttagggcatgaccgagtttgtttgtagcggaagcactttttgattgcaacaagtcgcatggtctgctgtatgacttgcttgtttttaaaaacacttcccacatacaacggatgacctgacgtactcaattcaacttctgtcacatcgactcgaacattggctaaatcatcgaatacaggatccgcatcagtatcgagcaactcattctcagcattatgcaatgtagaaaaccctttatacacttcgtaggcttcacctgttgtcactagaccgtcgtcagattcaatatttaacccacttgcagaaaccccttctaggacgactataccatcatctccagttacgttctcagctatatcatccgtgtgctcaactaattcaccttcgcatcttgtctcctctgcacagactctagtgtacgtacattggtacaaaccatgttgacacgtcggggatggagcagaggttggtgtacagtcaaccaaaacaccagtgggttctacatgaggtacatgtgtacccgtcgacgtacacgatgccaatagacgagtgaattcccctgggggttccacggtatgttgagtgtcattcacgacgccctcctcaacatgaccatttccatattgttccacaatcatgtcaccccatttattgtaatcgtattcttcgctactaccttcactaaagtctactgtaggttcgagtgtacttccacggctttcaccatcggtgtcatcgtcatgtacatccatatcttcgtcctcttcattatcctcgtcctcatgttcatcctcatcaccttcatctatgtcatcctcctcatctacatttatatcttcgtaaccattatgggctgcatcaacatttgtaacctctgtctctgtattgcctccattgccgatagggtaaaaagacacaaacaagttaacagaaggatcgccattacgaatcaacataaatgtatccaggctgatttgattctcaatatatactggagggcgattacttgctatcatatcagacatctttccaggcatccagtaacttattatagggttccattcactaaacttatagctgaaaacatcacatattgtacttgccaaatccgtgtacgtcgttgtgtctataatacgtacacagcgtccgaaacttcctttttcagcttcaaatttccaaccttcttctttgtatatccactcaccaaccataattaatacaggtaactccatacctgcaacataaattcctcaggtcagaccaacattaaataaaaaaaaatcagatcttttttgaaggatttcatttatgtcaacgaagacaaaaagaatcttaacaaaacaatttatgtacttataaatttaactaaacaaaacatagagctttcatttatatctacaaatacaaatagaatctccaacaaaacaatgtatgaacccagaaatttttaaaaacgtatcattcaaatcacgttctcaagtgtaattaggattaacacgaatttcttacctagaacacagattgtctccccttcaatccttcaaactttgtaaaacagcaactgaaaacttcagattcttcaccgtaacacaatttcgattttcgtttcttcaccttaacagaatttcgatttacgttttttacccagaattctaatctaaattatcaaaatatcttacaatataatctctattataataggtaatcatgagttttactcttgtcaaaactatttagcattaaaaacttctgagcccaacgaattttaaattttttttattccaatctcaagtgtcaacttcgccgaaacccagaaatcatttaatgcatttctcgtcgatgaacagcgtacgtacgaacccggttcttttggattccaacgacgcggtccgtacgtacaaaccgggttcagtttcgtcaggtcgtcaggggcattttggtcagtttttggcttaatggctaatagctgaaaggcccagcccactttgtcaaaatctgaaattaaaagtgggtcaatggctactgtgtgcaatttacccttaaatcaaagaatttaatagaaagtacttgaattgaattaaagagctaattaaggatttataaggaatcgtttgggtagaatagaaaatacaacccagacaacaaatcatcgtaatctctacgaaaccaactaaccaaaagtcaatgactaatcaccattgttgatcaatttcttttttctttgtttcttaaatctcacttccatccattccatcacaaaaaaatctctgattcaatctcttctctgcttccaccatcgttgtcatgtttccatcatcatttctatggcaaaatccaattaaaatcacaagatccataaatgattactaacaataaatagcagatccgaatctgagaatggagaaaggaaatttcgtcatggcctagcacacacataaaagaaaaagagggagaatttcgtcatggagataggagaattctaggataagtggtaacaaatgcctgcaaaattagggttacagaggttgaagacgattacaaaattaccattataccctttaataaatttcttatgtgtacgtatttataatttatattatacgtacatgtgaacatgtaaatatgttagattatgttttattgtaaaagcggcaaacacaactatttgttgagtttttacattagaaatctttggttatttcgtttaggtgagatatttttggggattttctcattaataagataaaagttttggaaaatagacaagattttaaactaaatccatagacgtacacgataatattgagacacacgtacacgtgtacgacctcttcaaagagttacatcttaaacatgcgtaaatcacataagtcttatactatgtacgtacacaaaaatatatattggagcgtacatggtacaacattaatctaatttttttatatcaaaattaagttatttgtatgactatatatcttaatataaattatgcaaatatgatatttcaacaaatcgtactctgattaaggtaaaaccgattttccaatacttaattgtagatctttcataactatatgtattcatgtacgtaaaatattcacctttctatactgtaccggatacaaagttagtagtgcacttatattattccaaaaatcatgtcttactttcgggttaggactcacaaatgattgaatgacttcattcttttttaaatgaatgattctttcaatcaagaacatgttcattagtgacactcacgtgcagaaaaggatactcaggttgaagatgactgaaaaattacagttatactctacatcggatttcttcatgtatatatatttaattataatgtacatacacgaaattatttagtggaattctaatgaatatctaaccaccaacaacaacaaatttaatatataaatatatatgtcagtttcatgtattttttttcatgtgtacatgatttgaatgttttgcttttatggtcagaaaatatttgaaacgtaattatacaagttatttagatatttacgtacatacatacacacacattactatcgtgtatgtacacattactgccgtgtacgtacacattactgtcgtgtacgtacacattactgccgtgtacgtatataatattaccgttacgcacatatgtgtatatgatattgctaatcgtgaattatttttcgatgataataaataaaatattatttaaaatagaaataaacatgttagattttattttattgtaaatgcggcatacacaacatttattgagtttgtacattagaaacttgtggttatttcgattagatgagatgttttttggggtttttcccataaatctattcgtatataataattaaataaaaatatatggtcaatgtatagttattcctcatacttttaaaaaatattaggtatgtacatatataataatgtacgtacatctttgttgatgagttaacattgttgagaataaataagattttaaactaaacccgtaaacgtacacgataatattgagatacacgtacacgtgtacgactgcttcaaacagttacatcctaaaaatgtctaaatcacataaatctaatactatgtacgtacacaaaaatatttattggaacgtacatggtataacattaaaatgagtttataaattctctaaccactgtctattggaacgtacatggtacaacattaaaatgagtttaaaatttttgatatccaaattaagttattatgtaagttatatgtatgtctgtatattttaatatagattatacatatataatatttcaacgaatcgtactctgattcaggtaaaatcgatcttttaatactcaattgcacaccattaccattcatttcacatctaccatgcctatatgtattcgtgtacgtaaaacattcaccttttatataattcaccaggtacatagttagtagtgtacatacatattctttgataaatatacgttaaatgtaatttgggtaattagaatataaaaatctaatttaatttatgctaagtatataactatattttggatactcatttggttctcagtttgcttgggataaaattttgattttttaactatgggtcagcttattcaggtatagatatttaataccttttgaataattagtacatggattgaatgttttgtttttatattcaaaaattatttcaaacgtaaacatacaaattattttgatgtttatgtacatgtatggatataattacaaccgtgtacgtacaaatcacaaatgtgtacaagatattgttaatcttgaatttgtaaaaagttaataaataaattaataaaagtgaaaatatgaaagtgtgtcttaaatgatagaaaaaatgaattttaactaaaagtacaaaaatcataaatatttataaaatagaaaagaaaaaaaaaactgtaaaaactaatgacaatgaaaaatattacttttaatttttaataagcaaactatctactgtacgtccattcgatcctaactaagtcatccgttcgcactttacgtcattagatggttcaggtccattttcgtccaaatttggctgaatgacttaatggtggaaggctcattctactttgtcaaatcctaaaataaaaacatggtcaacgacgtgtataatttaccctttattaaaacacaactctcagatataatgatcttcatcaaatgttttaaactgttaacataaaagaagatttgacatctatttcaatataacgaagtttgtgaaaatttaaacttcttaaatcagccagttctaataaataagtaaataacagccacaagccgacaacaaatcaacaatttaagtttaagaatctcactaatgggcctactaagcataatttgtttggaccaaactgccaatgaaaagctaagtcttcatttaaattctgaattggattatataaaaagggcaagtctatctatgtctatcagtactgatgggccttttcacaatagttattaaaaaaattcagagtggtagaaaaatatgttttcttctcactacaataatatcaaggaatttgcagaaaagtgatttaaaaatttgctaatgtacggatgccagtaaaagtgacttctatgtttaaaatctggtttaactttcatcattttttttttgctaaaaaaaaacttcaattcaaatataatcgattacaagttagataagcatcatccgatatatatccaatatgcaaaacaaaaaggtaaaacaaaaagtctacaaaatagtaaaaagatggttacacaaaaattgatatacataagaagagtcgtcgtagcttcaaagatgagttctatcgaaaaagcaacaaacttcgattcaactctttcaaatgagttgaaaatagtcaaaaactcgtttttcaccagaatgtgacatgttgcatcttataagttttcgttatacatatcttttaaactataaaatactgtcgtagttacaaaataaattacaaccaggagactcaaacccgttagctgtcataagattttcataattgatcattgagaacgagggaatgtaatgtgtattgcgctttaagatgaatttgatggaagtctttgtatatatgctaaagaccaataattcacattccctatcaaagggaacaattcagaaaaattagttttgttttttctttaacggacgaggacataagcactaaaagtcatgtgttttgatgatttatttattttgacattctaattggttttactatgtagacttttctattgtcattagaggctgtagaggttaccatttttgggccaacaatggcattttaaatataattagactaggatatccctgtgctaattatttaaatatattttttaaaatttgtaataccaaaaaataaatctataaaaacaaaattcaaaaaaagaaattatcgtttttttttataatttaaagttgcttcttcagcagaattattttaacatctacatgtgtttacaacctacatgtgtttatttgttcaactcgatttggttgttcagtatttagtaatatctctcatttggatatcaccattcaaactagatttgggtaaataaatctaccgaataagtaaaaaaaccaaagcaaaaaaaaaaaaactcaatcgaactgaattgaaaatttgaaaataaccaaatggattctaaatttataaccgaaaccgaataagtactgaacataaatattttggataaccgaaaatatccaaaataataattttttcaaaaatattagttatttctaaactaaataactaaaatacttgaattatatatataatagtaaaaatactcaaaaataaccgaaaatatttttcaataactgaaatattctaaaatatttaaatcaaaataaccgaataaatactaaattttaaaaccgaaattttaaaataacagaatgccgaggactaattcgaacatttcaaacaaaaacttgtcgttaataaatataccgaatagacaatagtattcgtatagtaacgtgcacaatgacgattgactcatgttgaattgatccttagtgttttatacatttttagccttcaataatttttgttttttcctggaatagcatgatacatgcatataatattataatatacatttttataatcaagaaaatgaaactaatggagtcatgattcctgcataggtctaaaagactatcactgtaacgaggtctctctcttcctaaatctgggaaaaaatagaggtggtggtgagtggtgacaaaagaggggccattcaatcttattgtacaccgcgccggacagaatttactcgattccacgtgcgagtccgggaccactaatttacgtaaagacgatgaacacgtggcaagcatcgggtactcttctctaatactctgtttaatctaaaccgtttatgtttgtgtagtatgagaacatcgtaccaacctgtctgctgtttgggaatacctatttgtgtctatcgaagaggtttttgatcttctctgatttatgtgaatacaaaggataattttattacttttttgtatggtaagatgaaatttttgattatttattgaaatatatcacgtgaagaaattgaattccattttctgtgcatgtgttcttgtttttgtgttttgtttctagatatagatacattttaggtttagctgtttacctaaatatactatcagtattcttaaaatatcttcattcagtttgggaaagagcactatctacactacaattactaaaccaagtctaagactaaaccaacaataaccgatatatttgaccaatatagctaaaccgactaatatatattttaatactacattctagctacattctctaaacatttttaatcatagatttgattatggatcatacacattctacatttggcaaacctatttggttcttaatctggaaaggttcgtaacttatgtactcgaaaattttatattaaacgacatttcacatgtgtatatataaagaatgtccattttctttttgttacaaaaatggtcaagtaaaaaatatatttttgtaaccaaatgtccatttaacagagagatgtaaataagaaagtccattttcatcatgttaatactacaatttaaaataattaagtatgatatttagctgccatagaataagaatttcagtacattttgaatatttaacttcaaaggcaaagtttacttgattccaattctatagtgctgttttcaactttacagctctctttttacatatataatcttaccacttttgattatagcagagcgttacgtatttggaaaagaaaagaaaaaaagttaatgatcaaacactatagatgttttggtgatattttatctttataacctatgtttgtattgtaaaatatcatttgaccatgactcatgacaattgtacagtaaaatgtggaatccgtaacattattataatcttgattaaagtaaaattttgcatatattgtccaagactcataactataggttacgaaactttctgatgccgaacttatcttaacagtaaatcatagtttctcatagttttcttttatatattgtagtaagaaaaattcttgggattattacagattttgccttttttgcctcaacttcgtttagatatgtcatttgcttaatggcattgtgaatttgccagtttttagcacttcaaaaccataataatgggattttttataacatacatgtattgttttttgtagaatttataaaatacatacttaaaaacaaatactatatcttaaaaacaattggaaccaaataaacccaaacaaaatgtttaaaattatgtttttataaataagcaaatgacaaatcagaaatattttagcaaaactgacaaattctacaaatgccactaaaaaggaggactttttcctaattgatcaaaatccttatatacatcaatcaataatgcactgaaataaaatagaatcaataatttataaggtggctagctcctatagtccaatcctaaagcgacctagaaagtcaaaacagtgaatccatattcaaaacaatagtaggcatttaatgagaaaggatgtcagatgacttcgctcatcaaattttgggactacaagacctaacaacgaccaatctatatattctaatttcaattaaaattatctggaattaacttagagagcatacagaaacaatttttatagtcaaaacatatctgtgagatggtgtgtttattagtatatatcataaagtaatcatacaagagacagaagatcatactaatacataagtacatataagttttgacctttaaaatataatttgattcatatacaaatcattgatcatctacaaaatgttcctaaaacctcaaccataatcgcatggaaataaatgattattatatgatctaaattctaacaaagtgatatttaaagatgcctccactaataaatcataaagcatggtcacataatacacacgagccctaagtgtatcaactatcaagaataatcatcgaatcatctttcaaatgttaaaattgaaaacaaaagaaaactccaagaacataatggatcaaacactttatcgtaaataatcgtagtttttcttattcataaacaactagtacagaaacaaaagcatcagtagataatgtaaaagaaggttttacattaatatcttagagaaagcaaataagagacaatacatatagaaaaggggaaattatataaatatgatcatactgttgcacccgagtaattagccatcatagactgaccttgttgtggctgctgttgctgttgctgaagctgtagaggcggctgcgtttgcggtttctgcctgttgactctcttcctcttcttctcatagctaacacctcgagctttggcttgaaagtctctgacttcacggaggaataacctgacggcgcgtgagccaaatgggttagcttcaggtgggccaccgttctcctcgtaggcggcgcggaggcggccgataagagcgtcgagtgagccccaagcttgccggagaggacaaggacaaggagcaggagggttagggaggccaaagaaggcacagttctggtggtgaacttttgttttcccgaactggtcaaggtagcggaggaactcgagcacgtgtgcgccgctacacgaggggagagagagcggaggacggtggttccggaggtattgacagaaagtgttccagtcacggcgtttttggttctcgtaccggcttgaggaaggtggtgttagttgtgttgaggaattagggttcttgtttggttggtgagagatcaaatccatggctttttcttgttcttgattttggaaaaagcagccggtgaagccaaagcagatgtctagccggagagaagaggatagttgaagaagattgaatcttgatttagggttttgtttttcttctttaattttatatggatcaaagagagattagggttctttttttgtagatcttgagctaagatcaataattgcagcaaatggagaaaaagtgagaaagagagagaaacttagctggttgtgatgatgagattgatactataaaaggtatagattcatctttttcagatcaaatctaacaaacacttgtgagcagaaatggtgaggcaaagagagagagagaagtgaagtttatttgatgcttatagaagattatagaaggggagatatataagtggaagagatctttttttcctttttattgttttctagcttttctactttgggagatgatagagagacaatacacaaaaacacacttgtcaagactcaagagtgtatagtagctccaagagaggagagagagaagagaagaggactaagtgtttacacatcgtagaaaagagtaacttcatagatgaagagagagagaaaagagagtgtgaccaatggttaaagtggggaacttgaagttgaacattgacatgacatgaggagggaagagtctgtgttctttgtctgcaatttgcagcgacatttttcattttttttttattataaatattgattactttctttttcgcattattcttttattttttgtggttaagggattgcattattcttgttttcttacttcactttaatttttactttgaaaacgacctgattaacatataaatatcttctcttttttccggcaatcatgggtttatataactaggaatacactacttttaaacacaaacgtttcttgtgataaacggtggattatcacaaaacctctttattgactataggctttcaagttttataaattaacatgtgttcagtatttagtatatattgatgcgttagtgtccgtgccccataaattaaattcgttctcagagacgattttatttactataagtatacggctttgtctcaatggtaaaggctgccaattgagcagcatgtagacatcgtgttgattttggcaataactccgactatacttttagcaccaaactatttttagcatcgagagtaaacaaatatttcacgaagaataaattttaaataactctattctctttttgtcaaaaacatgcatcacaaccctcgttaaaaaaaactgtataggtctagcgattagtcaaaaaaattgaattaaaatcgggttattttagatttattttaatgttttaaaacttattaatccaatattgttttcaaaattatagtaaatacataaaactatatttttaagacaaaatttctgttttttatttaaattttgaacttaagttgttgtaaaacattagaaattttcaaactaaatgattaattagcaaaaaagaaattttttttatacttgcaatctaaaagtaattaggatattcaagattaggcgaaaattaatcaaaaaaaattggattaagcaaaaattaataaaataactgatttttaaaggattagttattattcgaggtagaaagggtggacctagcaattaaacagggattaatcggattaggctgggatttttaaaaaagggatcacaactattgtaaggtaatgccttaatggtaacagaacgacgatattatcacaagtcatatacatttgtctaataaaaaccatttatttgaacattactaactgaaatcttcaaacaattgctattaaaaattttaaaaaactcttgcgttggataattaatatttagcatctttataaccaactctttcgttattggtttttatcagcgacaaatcgttagtctacaattttttttgatcgcaagtgtttgcctcttttctaagatctcattttgtacacatgtttgtataaccttatctctttttttccatactatgatcactaagaataaagtataatccggcttgcctcttgatagaagcagcttggataatttatctttaactacgaaagcagtttgacgtttccaaaattttaagagggctagggaatttcaaactttttcgaaattcttatctcttcagtttatataattgaaaattttaaagtaaattttggatgaaattcatgtttagtcaggtttctaaatataatatatatatatatatatatatttatatcaaatttatgaatttgttctctcatatttattttttcttttttgggtatatatatgttcaagttagattatttcttatattttctgttgatttttccggtgtgttcgaaataacgataaaacgtaggataagtgattcgtctactaggtgaaaaaccgaaaaaaaactcgttgtgatgtttgatcgccttctagaagaaaaaatgcgatcatagcatggtcaagacaacacatagaaggataaaaataggtttttctcttgatgaatctcgacgctttagtcatgatgaatattgtggtaaaaaaatgtgtttgaagaatgtatgggtgaaagatagtggtacaactatcttttgcacatatttctactgatataaagtaaagatagaaggataatagcatagtgacaatgtagaaaatgcattatttgattgggattacatagaatccaatttgtttgaatataatttgttaagtttgatgaatttacaattcaaattcaatggatagttagtgaactagttaacgggaaaaacggccaaaatcaatctgtactatttgatggcggtctttttcaactcaaactttgattaacgattgactaacactgtcaaagtcaatgttgaattttgcgtaacatatataaatttagatttaaaattagaatttaacaataattcggatagaaaaagacaagggatcgaaatttgggttggaaaaggccaccagcaaataatacatgttgattttggccgttttcccctcgttaatgtttcttatatatatagtattattagttttttctaaattttgatgcgagataattttattataggataagtttcaatctaattttagattgaactgatttcacttgggataggtttgcatatgtttgaattctgatatcatattaaattttgtgaacatataattttattttttgtattgttttttcttcttcttataatcaggggtgatccgggcttttatcacccgactaatcctccaaagtgaatgtaaccattggctagcccacttaccacgttttttaatgtgcttcaaacatgacactgcttcgactaccaaatagaatgatttagtaatttttgcgcttgaaggaattgatgtttggcctacacctacatggcgactcctcctcaagtactaatagaccactatcagttggttgtttagtttcaaacaaatttgcgagaagttaattaattaattaatcggtattgatatatgtttcctacacattattctagactattttgtaatgttaagtttattgaaaatagatgtatgactccgcataaagaattacagtgaactttatataggcttcaaatggtgactgaactgcacagtgcggtgcatttcaaatagtaacgaaattttctgcatatatatatgtatgtatatatttttgttattatttgaaccgcactgtcctttatccgtaatttaaccgcagatttcctttcggagccatagtttacaatggtatttacccgagacaggttttgcatcaataagatttgagatcgaagataaaaaatacagtgaatagtcgataaggaaataattaaaacaaaacaaacaaaaacaaaactaacaatgagaggtgtcttttacaggagaggtagagccacacgggttgcgcgtgagaaaccacgcatttcgaatccatctctgtcagtggaaagcaaaataaaacagtgtttatgatttgacaccaacgtccccatttattaatttctatgcaacttcgattatttctatttctgttcatattaatgtgatttattttggccaaagagatgtttctaggcacatgctttttttttataagtgtttctagataacatgctcatcgaccaagtgtagaaaaacattattatattagcctcatctatttggttgttcggtttagtttgaggatggatatattttgatttttggattttttggttgtttggaaaattcatgaaattaatagattttagtatgatataattaattatacagaaatatattgaatattttttagaaataaaaagataatatttaagatagccaattgaataatatatttttcaaaaatattaaagttatgcttggttacccatttccgctacaagaaagtattaaactgtttttgttgttgttaccatttcattgagatagtaagaaaatgaagaaaaataaacggtagaagatgggtggtacataataaaggataaacaataagaatatcagtttagaggataatatcaataagagtataaattagaacgttatatagttggtaaaagtaatattatattttttttcaaatcaaaattgtttgtttgtaatttagatgttttttttgttgtcaactaaataataatttaattaagcgataaaaatagcagtatggtaacgtatagtgatttttacataaatttaatggatatgtaagtattcaaaaaatatttcttataacctattcaattttaagctattagaaaattattaacctttaaacaactaaaaattcaccaatgtagattataactaaattgtgatttttaccataccactattttcttttcacttctaaatctatcaacttctgttactgtttttttttataccgccaaaacagattttaccaccttctatcactaattcttccctatctaacaacacacacatgtatcgacatgtatttttgtcttttgaaatctccataggatatatgataatagggagagaacattatacggggaacagagttccagcatttggaaactaaagccctatcatactagtatatactaccatggatctatagggttaagcttttaagagctttaatattttggttaacccaagactatgtattctttaatatcatctagatgtttcggtattgtagtgttcccttttagcaatataccattgttccatatatggcaaagattataagacttctcacatgtctctatgattccctgcctcccttcttgtgtctctctcagggtacattcacttggttatcaaaatcgggataatataattaattagcttacttttttttgttttgtggttaagaattgtgacattttcctagtcaaaacaaatgttctgctggtacaatatacggacatatgtatcaatgtatgcgttgcgttacttgcgtactcctattaaatgagaaattgcagtattgcagaaatatatatacatttttagaatgaacgaagcaacaaacaacatgtcacagctacgcgaatagatgtttcttagtttcttacacacatgtcacagatattattttgtgttctttcaatgctttgaaactactttaaaaaaagtattagtactgaaagtactccagtgctcaatactgtaactcgggttttaaaaatatgtgtaatatttggctttgatacgttatccattttaatttaattcattaactcatataaccaaaaacatacgaagcaaataaatttttaaaacttaatatcagctaacagcgagttaccaattatgaaaatttgaaacctactttatgctctatatatactccacatatataaactatatatatgtagtaaaacatttaaaagaattcaatgaatttttaaacactaagaagtaaaatctgaaatatgggtttttgatttatctatatagtagctgttcctttctgtatttttattttatttttttctatatagtctaagttgtttttttaagaagtatttcaaaaagttttaagtgtaaataaatatccggattaaaaaataatattaaccaccaaatatcgttgattagctttaaagcagatacatgattaaaaaatgtaaattttaaaaacaaaatgaggagaatcacaaaaaatgatttttccctccctatctctaattgttggtagaagtgatctccattttgatttgattttagttttttttttttttttgctaaaatgtaaataccattattaattaacaaagtaaataaattacaaaagtgaataatctagagaaaagaataatcttgaaaaaacactaaaataagattacattaaatttgtgtttgatttagtttagtgtttcttggaatccaaagcaagataagatctttccaacgcttcatgtgttttcgactgatatattttcctaattcatcagtcaatattcttgaagatgattgagggaaggatgatttgagagttgtgatagatattgtttctttgtttcgagatatgatcatatagaccactgtttcagctacaattttaagaagtgtagccgaagcctaagaaatagaatgtcattgtctatgatcagggttggcccaacattatagactgactgccaatttttttgttggcccataaatattaaaaatatggtaaaatggtatttgagagacttgaatccttgacatgagaaactgtaagggttttatacgccaatatatatatatatatatatatatatttacatactaatttaagggcatcaaatccaataaacctcttgtaacgaagcggatttttactgttttacagtttaggtgccaaacctcttgtgtcgccattgtccatgataataactcttgccaagagcaaaccatttgatgagatagatttagccaaacatggcagcatacttcatcccgaatgggcataagtagtagtgtgcacaaggaattactccccatgatactagtctttcacttatggtagtttattgagagtgttaacacgcatgttgaacgcgtgtattggaacaactcctttaaacaacatagacctttcccaatctgtctcaacctatcttggcctcatagcttcccaatttgagtagaagagaacctcttgcattccactccatttaccattgaggagtctttctagtctttttcgtatgttttgagtcattataggtgcagttatacatttgagagctatggagcataatgagggactttggaagcttttcagcaatgaaaattatcatagacgtttttcacgcgatggtgtcgatcgacaccacatctatgtcgattgacacccttattcggctgagggaattcccacgttttacaagtctttgagaagctcctgaagtttttcttatttgcaaaatagaccctacacgtttttagtcgcttatataccttattttatggttattgtttaaacctaaacttgttttattttagagatacattttttgagataagaatccaatccctacaaagaggattctgaactctttctacttttcttcatattattcaatgcaatctatttagactttgatttgtgttcctttgatcatgtatgagtaatcaccttgttgggtttagggagtctcactagggatttagatggattagtatatcaaagaccccttaggcttattcttagagttcttcatctataattattcttactgctagttttagattgatcacctagaacttgatcttagataatagatatacatgccataggtatatgttatcagaattattatagatagacctggtttatagatgtgtaataagaatcggcctatctcctttggtgaactaatcaaactcgtttagcatgcatgtttaggataaggttttatagaacgccactgggaatcttagctctaggcatagtgagtttcacggaacgctaccggttattatgatattagagtttgagttcgagaaccgttcaataacaatcctgataatagctagatctacaatttatctattttctgagaccattccctagacctgacactttaatctcctgaatctacaactcaatttactgttttaatgtcttttacttttacctattttgtctagcttaatattaatcatcataagtctattgtgtgaacatcgagagctcagtggaattcgactcttaagtgctaatgacgatctcttatttgagggagtaagcttaaggcaatttgagctatatcaaatttggtgccgttaccgaagttctctctagttcaccattaggctaggtatcgatttaagtctagacgtttcttttacttcacctactcacgtgtttcttcttcttttggtctcttgtgttttaggtaccctcagattttgatacacgattctatgacagaattcgacgatagtgtcgaccgacactatcaaggtgtcgatcgacactatctatagaaccaaccggctacaataggcgactttaacagagctgatcttttcaaatgtgcattgattacaggaagctgaatgctgccaccagaaaagactatttccctttgccatttatcgatcgtatgttggagaggttagcaaatcataaatacgactgttttcttgatggatatttgagtttctttcaaatcccgattcatccagatgaccaggagaaaacgattttcacttgcccatatggtacatttgcttatcgaagattgcctttcggtctttgtaatgctcatgtaaccttttagagaagtatgatgtatatttttatagatatgattgaggacatcatggaggtctttatggataatttttcaatttatggatcatcgtttgaggattgttaagagaatctcttcaaggtattggcaagatgtgaagagaaacatctagttttgaattggggaaaacgtcactttatggtacaagacgagatagttctcggtcacagaatttctgagattgatatagagggtgatagagccaagatcgaagttatgagaagtcttcaggtgcttgaaaacgtcaaaacagtgaggagtttccttggacatgatgatttctacagacggttcatcaaagatttcagcaaaattgccagaccattgatagctctactgtggaaggaagtcaagtttgagtttacacaagagtgtcatgatgccttccagcagataaaacaggccttgatcagcgcaacaatagttcaaccaccagactgggatttacccttcgaagtgatgtgtaatgcgagtgatttcgcagttggggctgttctaggacaaaggaaggataaaaaatgtcacgccatctattacgcgagtaggacacttgatgacgctcaaatgaattatgcaattacagagaaagagttgttagttgtggtgttcactttcgagaagttcagatcttatcttgtaagatccaaagtgattgttcatactgaccatgaagccctgaagtatctgatgcaaaagaaagacgctaagccaagacttttgagatggattttagttcttcaggaatttgacatcgaggtaagagataagaaaggatttgagaatggtgtagcggatcacttgtcacgcattagggttgaggatgatgttcctattaatgatttcttgcttgaggagaacatatacatgactgatagagctaaggaaaataactgcgaacttgttgtgttgcataatcaagcttcagtgtcgatcaacactcactttgctgaatgggatgataattgatgtggctcgatggtgtcgatcaacaccctcatgatcaaacaagaaattggttaccgactgagaactgcgccgctacagcggtcgagaaggacttcccaggatatgctgacatagtcaattacctagctacagatgtggaaccagataatttcacagattacaacaagaagagatttctgcgagagattagatgataccattgggatgaaccatacctttataagcattgttctgatggagtttataggagatgtattgctgcaacagaggtacatgatatactatcacattgtcacagctccaactatggtggtcattttgttactttcaaaacaatctctaaggtccttcaagcaggtttctggtggcctacaatgtttggggatgctcacaaattcatattaaagtttgattcttgtcaaagaaggggaaagttaagcaagcataataagatgcctcagaaatttatcgtcgaagttgaagtttttgattgttggggtatagattttatgggaccctttccaccatcgaataagaatctctacatcctagtacagtaaaacctgtataaattgatactcgataaattaataacctctataaattaattttttccggttccgacttggaacaagtgtaaaaattgataaaattagataaattaataagttaatattttttataaaaaatcctatataaatattggtcccaacaatattataaattaattaatcatataaatttaccaatatatatcaatattatatagaaatatttagttaaatatgactttagtattttttttttttaatttgtattaattatttgtagagttcaatcatttttaccacgacaaaaaaagtttgtattgttatttaaacttaatatttgttttctacttgtagttggtttccgaaagattattaattattaaaaactatattttatattgaatttttgtaagaaattacaaaatttgtaaaacctctatataaattaataattataaatttatcaataattaatacctctctaaattaaaaaaatttcttagtcccaacattattagtttatagaggttttactttaactgttgattatatctccaaatgggtagagactataactagtccgaaaaatgattctgtagttgtcatgagattattaatgactatcatcttccctcgttttgtagtaccacagatagtcattagtgatggaggtaagcattttgtcaataaaatccttgcaaaattgctttatcagtatggagttaagcatcgtgtggctacgccctatcaccctctaataggcagatcaaagagattcttgagaagacagtgggaaagtcgaaaaaggattggtctttccagttagatgatgcattatgggcttacaaaacaactttcaaaactccacttggaaccacactttttcttctctatggtaaagcttgtcatctcccagtggaattagagcataaagtagtttgggcagttaagatgatgaatttcgacattaaatcagctggagaaaggagatttatccagttgaatgagcttgacgagataagaattcatgcttacgacaattccaagctctacaaggaatgcaccaaagcctatcatgataagaagatcctttctcgaacctttgaacctaatgaccatgtactccttatgattctagattgacgttatttcctggcaaattgtcttctcgttggtcaggtctctatataatccattcggttaggctatatgctgttcatgatttctttcctcagactttgaggtttgaggatgttgaccgtaatgtcaactttggagctgtttttgcacatcatttggtctttcttaagaccaagccctttacaggaacaaggaagaaaattgagaggattggtagtctcctcactcatatctttgagcactttcacattagtactaagggagagaaggttgtgaccaagagagtcactatggatgagacatatctgaagaatgctcattagctgaagggcagtttggtttggtgtttcaaagatcgtatagagaaccatatgattcagttaccctgtcctgcgcttacagagattacaggagagccacatgagcttggctttcaccctgatccttcacttctacacgccgcaccgagcactaggagacagagaggttcagcatcaggatctgcgcctacatagacagaagataagttcatcgaccctgcttggggacttcaatttgggtcctcttcttcagctctaccatatcatctgcctactcctcctcctatcctgatggagctagcggtctttcaccagtacgttgttgacagcttcaagagcgtttggaacgctatagctacactttctcgctgcggttgtgttgctcctactcgtcgacgtcatcgctctcccgcacccacctccggctctaagcatgaggattagccatcctccatatctctgctttgtactctaacttttcttttcttttctttgagacgatttgttgtttgcttcgaaacttgttgcacttattatcctatgctttgttggacctattgatgtgtgttttagtgatttaacagtttaactggaggatccatgtgaaaacactaacctgaactctacaacactgagctgaattcacaaagctctgtaaaaggaccagagtgtcgatcgacaccacactggtatcgatcgacaccacttcacagaaaaggtggcaactcacgtttctctatcttttaacttttgattatttttattttggttcttctatcttgataactttggggacaatgttatctaagtatgggggagttagtgactaactttatcttttcctttcttatgagtcagttgactcgttttcattagatagttgttttattgagtcaaaacttttgtctgaaattatgatctttctctcgagtttattgcatggattgcttaagtactatagattcgattcaatctgactaatggaaaatccagaaggcaaaccaacagacttaaggacattcattcccaacataatctacaaaggctggagctaatctcactgctcttccttttatctcatcaaaacggttagtattcttaggacttgattccttgttcatacctaataaattgacaatgtgatagataaaaaaaaaaagtattcctctcccttgattaaataaaaaataaataaacaagagattgatatgatttccaggtactgtataggggtaggaatgtttcccatgaccccattattatacattactaggaatgatcaattaaaaaggttggaaatgctgagggtgtcaatctagtatgcgagtacacctttgttcactctttaaaaagtataaatctggggagagaaagaataccaaaaaaaaaggcgtatggtcaatttgttatggtatagtacaggaaagagtctaaaaggttcttgaacattagcttgattgatgagacccagcgatgagagcctaatggatatagttgagtgatttggtaagtaatctcggatgttgtgtgagctagctgagaattacatggtggtcaggacttgactagaactgtttagtacatggaattggtttgtatgatcagggtaataaggtagagagattgggagtttctatgtttttcaaacctcttccacatattcagttttatgttttgcttgagggcaagcaaagactaagtttgggggagttgatatatcatggtttttactaatttctaacatagtttcataatagtttttggagtctttctagtattttttgtatgttttgagtcattactgttttacagtttaggtgccaaacctcttgtgtcgccattgtccatgataatatctcttgccaagagcaaaccatttgatgagatagatttagccaaacatggcagcatacttcatcccgaatgggcataagtagtagtgtgcacaaggagttactccccatgatactagtctttcacttatggtagtttattgagagtgttaacacgcatgttgaacgcgtgtattggaacaactcctttaaacaacatagacctttcccaatctgtctcaacctatcttggcctcatagcttcccaatttgagtagaagagaacctcttgcattccactccatttaccattgaggagtctttctagtctttttcgtatgttttgagtcattacaggtgcagttatacatttgagagatatggagcataatgagggactttggaagcttttcagcaatgaagattatcaaagacgtttttcacgcgatggcgtcgatcgacaccacatctatgtcgattgacacccttattcggctgagggaattcccaagttttacaagtctttgagaagcccctgaagtcttccttatttgcaaaatagaccctacacgtttttagtcgcttatatacctaattttatggtcattgtttaaacctaagcttgttttattttagagatacatttttggagagaagaatccaatcccttcggagaggattctgaactctttttacttttc
